United States Patent Application Publication US 2011/0191912 A1 - sequence listing, part 9

SEQ ID NO: 9931 - DNA, 3000 bp, Unknown
  misc_feature (1)..( 3000): cDNA_ID_3034763_gDNA_ID_2096293_Annot_ID_195454 3000 nt of promoter + ATG
gtgtatgtctcaaggcgaaaccctttgagacttatttatactaagataagaaagcgggtttcgagcccacttaacggcccatggacgatgtgatcaagagtgtcgactcaaagtgggcttcctgatggacttcgaatgggcttcgaatgggccttctcttctcttctctttccgttgctcaggttgtctggttgagtgcggattgatcaaagggtcgaggtggtggttgagtaggttggttgacagaatggtctgggctgcttcttggcctctgtgaccgagtatgtgtgttagctgtcaggatggattggttcttctcctctgcgatcgagtagaattggtggactggcaaagtggactgcatggtcgcctctgcgattgagtagaattttcaggatggactccttcaactctgtgatcgagtagaactgcagttgggattgactcctctcctctgcgatcgagtataagtgtctggatggactgttgagctaactgcttccctctctcctactggtgattgagtatgttggtggaaatgtgactttctgttctgtttttcctctttctgagcaccaatagacgcaagactagtcctagactcgactaaagacgcaaaatgtacaagaatgatgatgaatgctatgaaagatggatgaaactagactcaaagtggtgaaaacaggatgtgtaaaacatgcaaattatagacatatcaactcccccaaacttagtctttgcttgccctcaagcaaacaagtagacataagctgaaggagaggtttgaaggtggggatccagaaccaaatcatcaaataaatcagataaaatcaatgtccaaaatgacagttctaggatacgatatgatggaattctactcaaaaacgttagccatgccttattatagttaaatctcactcttatactcgacctacacatgatttcaaatctaccaatccctttaacattcattagtttaggaacgtgaatcaggcaatgcaccatcaatgaactcatttggctaaggtgaaggtcaggagacaaagatgatccctttctggttgttcaagtttagtaacaggggactctcaaaagaaatggactgaggttttggagaatgctaaaggtaagagccaacctatgcatacaaaaatagtatcccatctacccaataacatagacagtgtatacaccagcagatggtactaccatcaagcccaaaatatgatcctagttctaccctttgcactcaaggtatttttttttctcattcttatcttggatcaaaccactctttcttttctttgactcttattctaaggagaagtttcttttactttgatggatctagtggacttttggttttctttgacaactctgactcttgtcctaacactttcttccaagctcaatcctgaaacaggcctcacaatcgtgatctttactatattacggtgagaaaattataggttcggacattgttttcaaatattttgcatgtatcaaagctcttataaacaagataggatattcctacatagctggtgggaccccaacaaatggatcatgaagtcttcaaaaaagaatagatacgattgcattgcatgtagtaacagatgcgatcataccagcactaatgcaccagataccatcagaaatccgcagttaagcgtgcttgggcgagagtagtactacgacgtgtgacctccaggaaagtccttgtgttgcataactcttttgttttcgatttttctcatattttttgttaaaaatgtattactctataacttttagaccgtgaggccaaacttggcatgtgataccttttcggaaagccgaaagagtgctctcaaacgaatgaggaatgggttgtttttctactccaaattttgacctaaatgtactttttatggccttttcttgatctttgctatattacgggacaaaaattatatgttcggacattgtttttgaatattttgcatgtatcaaagctcttataaacaagatagggtattcctacatatctggtgggacctgataatatgtttttagtcaattattctaaaacaccaagcatgtcgttgtagtattttaggtgtcaatccaaatgagtgtgatgcaaacagatgagatgtgatcagaagttactaagtcaagccaagcaataacagttttggggtttctacagtcctaagtgaacatgcagaaaacagaaacaataacaaaattactaaaatcactcgaccacaacaggctgatgccagaagtaggatgtggtcgagtaacaggtaggatatgaaacagatatactcaactgcacagtctgttgccagacactgggtgtggtcgagtatactggtcgagtaacagacaggaaatgagacaactgtactcgactgcacagtctgttgccagacactgggtgtggtcgagtaagttggtcgagtaattgtaaaaactaagaaacaggcaatgagaacgattaagcgataacgataaaacagagaaatagtatagacgagaaattcctaaggatggggtaatcgagtagagtggtatcctgataggttacgggtgacgttggctggtgtgagaagaagggcgagatcaaatggaaggaaaggcagagctcgtgagaagttcctgaggaagcttctatttaaaagtggctaaggcacaaaaagacagctcgccagctcggcacagaaagacagctcgccagctcgccaactgtgtcgttttacttttgggttatcgaaatgctgcgttttgtattgagtctcagtagatgctatttaaggaaccttcccttttagggttttgttatcaaaataaacaatcaacaacattaatcttgaaattctctctctcatctacactctccgccgttcaaggtgcatttcctattgtcttgttattttatcagtcttagtctttttcttgtcttcgatagggtcagaccttatcattggtgcttcttcattggagagaccgatg

SEQ ID NO: 9932 - DNA, 3000 bp, Unknown
  misc_feature (1)..( 3000): cDNA_ID_2186427_gDNA_ID_2096293_Annot_ID_195456 3000 nt of promoter + ATG
tatcttctaacaaggaaacactatttgggctttcaagatccggttgccaatctagttcttatactcaatcatacacaggacatcaattaatatttgactccaaaacactaatcaagcttcttcttgcttctcgatggtgtagccgaagtctgtatgagtatttggctttgtatcttctaataaggaaacactacttgggctttcaagatccgattgcggttttagtttttatattcaatcatacacatgccatctagtcatatttgactccaaaacactaaccaagcttcttcatgcttcctaaaactttgatggtgatgtcgaagtccgtatgagtctttgggtttatatcttcaaacaacgaaacactacttagatttttaagatcaggttgtggttcttgtacttatactccatcatacacatcacatcaagtcatatttgactccaaaacactaaccaagcttattcatgcttctcaaggtctttatggtgtagccgaagtccgtaagactctatggctttgtatcttccaacaaggaaatacaacttgggctttcaagatgaggttgcggttcgagtttttatactcaatcatacacatgacctgtagtcatattttactccaaaacactaaccaagcttattcttgcttctcaaagctttaatagtgtaaccaaagtccacatgagtctttagctttgtatcttctaataagcaaacactactcaggcttttaagatatagttgtggttctagttcttattctcaattatacatattacattaagtcatatttaactcagaaacactaactaagcttcttcttgcttctcaaagctttgatggtctagctgaagttcgtttgagtcattggctttgtatcttctaacatcgaaacactacttaggcttttaatatcgcgttgtggttctagttttacacgccatcataaacatgacatccagtcatatttgactccaaaacactaacagaacttcttcttgattctcaaagttttgatggtgtagccgaagtccatatgagtctttggatttgtatcttctaacaaggaaacactacttgggcattcaagatccgattgcggtttgagtatttatactcaatcatacacatgtcatctagtcatatttgactccaaaacaataaccaagcttcttcatgcttcctaaggctttgatggtgatgtcaaagtccgtatgaatcttttgttttgtatcttctagcatggaaacactacttttgcttttgggataagtttcaagatctagtccaaatacttaaccatacacatgacatcaagtgatatttgatccaaaacactaaccaagcttcttcttgcttctcaaagctttgatggtttaaccaaagtccgtatgagaatttggctttgtatcttctaacaaggaaacactacttgggctttcaagatctggttgtagttcgagtttttatactaaatcatagacatgccatcttgtcatatttgactccaaaacactaaccaagattcttcttgcttctcaaagttttaatggtgtaatcaaaatctgtattagtcattggctttgtatgttctaacaaggaaacactatttgggctttcgggattaggttgtagttcgagttcttatactaaatcatacaaatgtcgtctggtcatatttgactccaaaacactaaccaagattcttcttgcttctcaaagttttaatggtgtaatcgaaaatctgtatgagtctttggtttgtatcttctaacaaggaaacactacttagacttttaagatccggttgtggttctagttcttatactcaatcatacagattacatcaagtcatatttgactctaaaacactaactaagccccttcttgtttctcaaagctttgatagtgaagccgaagtccgtatgagtcattagctttgtctgttctaacaagaaaacactatttgggctttcaatatccggttgccaatctagttcttatactaaatcatacacaggacatcaattcatatttgactccaaaacactaaccaagcttcatcttgcttcttgatggtgtagccgaagtccgtatgagtatttggctttgtatcttctaacaaagaaacactacttgggctttcaagatctggttacggtttgagtttttatactcaatcatacacatgcaatctagtcatattggactccaaaaaactaactaagcttcttttggcttcctaaggctttgatggggatgtcgaagttcgtatgagtctttggctttgtatcttctagcatggaaacactacttttccttttcagatccgtttgcggttcaagttctaatattcaaccacagacaggacatcaatttatatttaactccaaaacataaaccaagatttttcaaagctttgatggtgtagccgaagtccgtatgagtcattggcgttgtatcttctaacaaagaaacactacttgggctttcaagatccagttgcggttcgagttcttgtactcaatcatacacatgccatctaggcatatttgactccaaaactaaccaagcttcttcttgcctctcaaagctttaatggtgtaaccaaagtccgtatgaatgtctggctttgtatctgttggagtaagcttgagtattacttaagaaataagttatttagttttgagaaggattagattaaatctttgggagttatctaaagatattattaggagttatctaatattaatctaaatgtttattctagaattatctattgatctctatataagagttaccaaagttgtggttaaccttatcgttttttagagattgtgaagagatcaatagctttaggttttgagtaattttcctaaagagattaaagagagttattctttactttgagttcttaaacacatctctaaactacaattggtatcagagcttacaaatcttgagaccataaagaagaatttgtaaggagaagat

SEQ ID NO: 9933 - DNA, 3000 bp, Unknown
  misc_feature (1)..( 3000): cDNA_ID_2186441_gDNA_ID_2096293_Annot_ID_195459 3000 nt of promoter + ATG
accagaagacatactcgacccccaggtcgagtgacttcggagccattcttcccacctactcgaccacttgacaacactcgaccgttcactctaccacatcactcgaccccatggtcgagtatcacttcgccacaccaccttacaacactcgaccgttcactctaccacatcactcgaccccatggtcgagtatcacttcgccacaccatcaccatcactcgaccggacactcgatcacgtcttcacagtctactcaaatccgcactcaaccagacaagctgagcacaaggaagagaagaggagaagacaaagtgtttggaagcggcctggacctccatcggatcacgaagcccgtctcggcccattatctttctatgggccgggtaattaggttattggcccgtttaccatcattttattttgttttgtataaatagatgtcttagggttctgtcctgagacatccagtcgacattgagtttttgcttcagttttattttctgttttactctgctgcgccgcttttgcttctgcaacctgtaattcgagatttttccaagttattcagattccgcatttgatttcatctgtcatcttgtttctatactctttatctctttacttatgcaatattatcgtttacctgcgtttatgtctttaagcattttgtctgagtagtgacttagaattcttagggatgggatagagtagttgtggaatccgtagtctgtagaatggttaagttttagaattgattgaatcccttcaggactagttgcgtttactgcttatttctttatgatcaactggaattcaacccaagcattcccgcacccagaaggtgttcgatggaatgttcgatcgactagttcctgagatattcgtctctatcccaagggattggccgattagagcgtttattgactttataagtctgttcttattgcctgcatagttagattccgttaatgggaattagtctgggctagctttgcttgaggatttctatcacgggagtgaattaatctgttgttgaacctgttgtctagggatagcttgattgcgcttgttaaccattcgaataggctaggataccactctactcgattaccctatccttaggaatttctcgtctatcttatttctctgttttattgttatcgcttaatcgttgtcattgcctgtttcttagtttttgcaattactcgaccaacttactcgaccacacccagtgtctggcaacagactgtgcagtcgagtgcagttgtttcatttcctgtctgttactcgaccagtatactcgaccacacccagtgtctagcaacagactgtgcagtcgagtatatctgtttcatatcctgcctgttactcgaccacatcctactcctggcattagcctgttgtggtcgagtgattttagtaattctgttattctttctgttttctgcatgttcacttaggactgttagaaaccccaaaactgttattgcttggcttgacttagtgacttctgatcacatctcatttgtctgcatcacacccatttggattgacacctaaaatactacaatgacatgataggtgttttaggataattgaccataaaaacctattatcaatttggcgctgttatctttttcattttttctgaaagttactaactttgtgttttttctgtttgtctgttttgatttaggtactacgataccagctttacaagttggtactcgttgtatgcaaatacggtcacgaggaaatcagaatctcctgttcaacgataacatcgaccgtattgcacgccaactcagaacacagacagaaacagagacaatggctgcagttgttgatgagcaggtgcaaccaaacaacataggtgcaggcgatgcaccacgcaaccagaatcagcgtaatggcatcgtgcctccacctgtgcagaacaacaactttgagatcaagagcggtctcattgccatggttcagagcaacaagttccacggcctccctatggaggatccactcgatcacctggacgagtttgataggctctacagcctaacaaagatcaatggagttagtgaggatggtttcaagctcagattgtttccattctctcttggagacaaagcacatcagtgggaaaagtcacttcctcaaggctctatcacctcctggaatgactgcaagaaagccttcttggctaagtttttctcaaactccaggactgcgagactaaggaatgatatctccagtttcactcaaacgaataatgagactttctgtgaagcatgggagcgcttcaaaggttatcagacgcaatgtcctcatcatggtttctccaaagcttcacttctcagcactctctatagaggtgtccttcccaagatcagaatgcttcttgataccgcttccaacgggaacttcctcaacaaagacgttgaagaaggatgagagctggtagagaacttagctcagtcggatggcaactataatgaagattatgacagaagcatccgcaccagctctgattctgatgagaagcaccgcagggaaatgaaagccatgaatgacaaactggacaagctactccttgtgcaacaaaagcacattcattttctgggtgatgatgagacagtccaagtgcagaaccaaggaggtcagctatgtgcagaaccaaggaggttacaacaaaggtttcaacaacttcaagcagagccatccaaatctgtcttacaggagtacaaatgttgcaaacccgcatgaccaagtctacccttcacagcagcaaaatcaacccaagccctttgttcatacaaccaaggtcaggggtatgttcctaagccgcagtatcagggcaactatcagcagcaacttccaccacctaggttcacacaccagcaacaacaactagcttcaacaactccagattcagacttgaagaacatgttacagcagattctctagggacaagctgcaggtgcaatggatcttgccaaaaagatg

SEQ ID NO: 9934 - DNA, 3000 bp, Unknown
  misc_feature (1)..( 3000): cDNA_ID_2186563_gDNA_ID_2096294_Annot_ID_195476 3000 nt of promoter + ATG
catgaattttctaaagaaaagaagaactgagaacgaaacagtacctgacgagcttcatctttggatgcgaagaaagaacaaccaaacaaagaaattgacgaggaaacagcgaaaggtgtgaaaaccctcaaaacccttctttcgctgtgagagacctcacgatggagcgggtacagatccgattccggttttggatccatcagctaaattacaatattgggcccaaaaatgtagtaaggcccataaagtccaatggtggaccagtagatgtttcaaccagaaatctacatacagttggttcagcaaaccggaaattgaacacgaaacgttaatttcggaaaggcgtaataaaagcgcgcgagaggttgataaacacgcgtcgaagaattcgcgcgtgaagattgaacgacttcagacgagaagacgcttttcaacgttctctatgcgttaaacagttgactgttgacagatctcctccggtagagagagagagagagagagagagagttctctgaaaaaactgcgtaaatcctaactcgtcaatggcggattcgagctccaatcagaatcgatacactcctcctaatcaaaggtaacttcttcttcttcttcttcagtggtctttgatctgctgatttcgagtgttctttattctactgatttcgctactccgttcttacctttcgatgttgcttctccgtgtcacaggaaggcttctgggaatcgccggaagtcgggaggtatgtgagctctctctctctctctctgtcttctttgcctcagtcgttctttattgattcttaatcaattcggttcttaattccgagagtatctagttctgtggagattatagcttagatcaaagattgtcgatgaatagaagtaatcttgttttgtagattcaggaattgattgcatgcgaatctgtacacattgtgtttgtgcatagttggtaacttcaagaaccgtttctaagaaagtgaattattaggagtttagcctgaaattcagatctcgctctctctttattagcaaatccgctggttgattcatttctccatgtgtgtacttgacccatttgtttgcctgttttcttgaaaataaatcgtcgttcaagctatatctggttttgctagtatgctatggttcttggctaaataaagagtgaaatgcagatcgaacaagtagccaacagaacaacgataatgagagaaatcagcctcctgctactggtcttcagatggaaaacatatcccagacccagaggataataacaataaaggactgctccaggagtgcagcttatcagctcatgagccaacgtataaatctgaactatctctttaaacatttagctggtttattctttgctctgtatcactatctggtcgttcttctatcaactgttgctatgctaagcatttgttgagtcagtgctagttttagaaatctttgaacttaatagataaggtgtgttgaattcactgcttatgcagtcagttttatgtacttgtcttatttacgtgctcttgatttgtcatgaacaggatgggcagctgaaatgcatcaatacgacgacccaactgtggatctatctggtgagattaagggattctaagttttcctttgtcctttgtgtctattatacttgtgctgcttgagttgcctccaaatacaatcagatatatctatgttcttatctggatctctgtcttccggttagtcaagtataactgattttcaagtttgcctactttctctgtttcacagtgcgaccaatcatgtactatggagggagtgtttggggtaaactacctcatcaggtggaactaacttcaaactcttatcatatgcttctagtttttctaaagatgtgagtacatgaatgatgagaccccatctcttgttttgtgtcaaaacaattacagatcctggctgcagcaaacaagacattacctcctccatcgccaacggattacatgactgaagtgcggcgaggattgctgatgccaaaagccaacaattgaatggttcttgttcagatgatggagcccatatagactagtgaaatggtgtttgttgagatggcacaagcggtggtatgtcaatgacttttatattgtgtgtgtgtaggataacagatattgcttttgtcaggatcggttgttttctctggtccctgaaagtgtaaaaaacccaaaccagagatttgagtaacaatcacgttaccatctcattttagcttaactggattacaaattcattgctcctttcatctgtcttacaaagtttggttttgaattagacgggaaatagaccgtctagctaatagaagccagttgttacaaaatttatgtgaatccaagtactaaaagtaataacaccaaaaaggcaaatgtatagtagtacatactattatctgtatgtctgaaaaatcccattggtcgatcaatgaataaacacaatgcggcagatgcaatcaataaccagttgacttgaaacttaaactgactagaccgatactggtcgtgaaaaagctaggattcgtagcaagtactccaaaaattaaagagagatttatcattttgtccttttcaatcaagtttattatttttgtctttaaatgatcaaaacatgttaagttagctggtacattgcaatcatttttccacatcttaagccgacgagagacagagaaacagaacgaaaggatttttactctttcttaatgaaacagagctctttatttaccagattagtaataataatgatataaaaaaacgaattctaacgatacaaagaattttaaaattagttgaattctcaactgcttcttcacacacactatctcataaacaagatatatatatatatatatatatatatatatatatacaattcattgtcgtcgtcatcatcatgatccttcttcattagtcatttactttcctctctctttcatctttcagatccagagagagagaaagagaacaaaacatg

SEQ ID NO: 9935 - DNA, 3000 bp, Unknown
  misc_feature (1)..( 3000): cDNA_ID_3034797_gDNA_ID_2096294_Annot_ID_195491 3000 nt of promoter + ATG
gaaatagcaaagtacctgcaacttggaaagctcatccacgaattcgcgcggaaacaagtctgacctagttgaagacaactgtcccagtttgataaacgttggaccaagctgcaatacactctctctcaaccatgaagctgtttctcttcttctgcttttctgattatataacaacaggtgaaattaataagaatcaggaccaacaaaacatcaaccaatgaatcatttaaattagactaaaatgatgaaaggtttacctgtttttcttctgtgaatcctccaacataagcccatttcgaattatcgaacaagatacgaatcctcagggaaataacaaatgaccaaacatcaatactgcgttgaagtgagctataattctcatcagcccagctaaaaccttcatcagaaggaagaaccctaactccttcaaccggtggaggaaggtacgattctgttgttttctttggtgccttaaccaaagttgacgccgcaccattaatgtttctactactaaccaaactcgctccattaacacctttcccagccgatccattcacaccatctttcctcttcaccacctcactcgcaggaaccattttgactgaacgtccattgattccaaccttagagggcaattccgactgtctcatctcaatacgaaatctcttagacttgctgccataacactgagtggcttccccagtgaaatgattctccaaagagctactgaaaccaatagctttggtgactcttgcggtctcaccgccatagcagcagctctgagaagctaataaagccgccatttccacctaatttacaagaaaccaattgaatagacacaatcaaacaacaaaattcaataagctggattcataaaactggaatgcattggagaaaattatgcggcaagcatcatttgtataatctaaagttctaaactataaaagtatgaccaacacaaaatttctagtgatagaactccattaaatcatacttgagcctattcaaaaccatcgagttcaacgacacctctaaattattgatttgataagagaatcacaacgattctcagccatgaaaaagatataaataatcagcgaacattaacacgtactatagcaagaggaacccaattttactacaacccaaacctgttctgaacctgggatacccaaaagtaattaagaaaaacaaaacaaaaaacagagtagaaattaagaaaaatggaacctttatcaaagtcctgaattgggttgactggtgagacaaagatcaacccagacccagaaatttcgtagcaggaatctgtagaatcagctgtattaagtagaggaatttcttggaacagagtcgagagagagagaggtaagaggactaagttgcgtaatggtgtcgtccttatgactaatgagacgtgtgttgttccaccgaattttccaccttcctaccaaaatcaatattgagactttgtgcgtaaataggaaaaaaattggatttgataggacagggaaaataatctttgtaacttttagtgccaaaattaagacaataagagttttggaagatgcgtgtccagcttctacatctcacgtttattgtgtggacagttcgaaagagagtgttgagcatcttttctaacaataaaattaaaaggatataattgctcgttagtaatccacttaaaggggtttaaccaatttaaacggtaaacttttttaagagcaagcaaaacaacaatggttcatttcaaaaaggaaaatgacaaaactacatattaacatatgaacaaaacttgtgacgcttcaccacatagtttggcttctacatgatcggatcataggcagctccaaaaccgaagttccacccacccagactactattggaagtcattactctatcacaaaaccattcgtctagtttcttcttcccaagtatgaaatgttgcatttgcgagttcggctgaaaacgaatatttcttgctcttcagtagcgcctcctgagcaagtaatgacttccattcaccgctcaactctttcctttccttggctctaaggctcctcaacttctgtaacatctgcttctgtgcatagttgcttaaatgctgaaacagtgtcgtctcaagcgcatcctgtaaagcgcacagctcatcagcagcaccatcttcctccttctccttctcattagcctcattctccatatgtttgtcaacattttcagaaggtaatttgtcatcataagagtcgcctttttttgcaaatccatcaccatttccaggttcactgtttgtcactgcttcaactacctccctatccttcccaccagtctcattctccatagttttgtcaacattttcagaaggcaatttgtcattgctcccatcaacacatcaagatttatctttgccccatatcgccatggacaagtcaaaagcttcagaatcttgggggttactaaagctaggcagcaggatgaatcattatgttggaccgttagtcttcttttttttgctttcataaacttgtaaaaaataaataacctcttgtcaacaaatttcatttacatactccaagcccgtgggccaaaaggatcgtacggagccattttttgttggtccaagactccaagcgaagaagactatggacttcttgtattattagccaaaattaaaatttgaagttaggtaacaaatttatggatttaggaaaatacgtttataattgtattttcttatttagacattgcaaatcccatgccgttttcttttgttgttttgtcaatttcatgccgtatgattaaagtttacaatgcattttgtataagacaaatgctttttgataaaagaatattaaggtacaaaaaaagaaaaggaaggtaaaaagattcctttttccctctctttgggccttaaatagagacagagaccgaaagaaagaggagaaacctcacacaaaattggtcctaaacgagtctccttcagtcgtaatttgcagcagagcaacg

SEQ ID NO: 9936 - DNA, 3000 bp, Unknown
  misc_feature (1)..( 3000): cDNA_ID_3034801_gDNA_ID_2096294_Annot_ID_195489 3000 nt of promoter + ATG
ctggatagaccatgtctgagtttcgaggtcgaaaacgtagagctggttgtcaacaggaacacgtggttgaaactcgccaccaaaggcatacattttgtttcccacaagagctatagcatgagagcttcttgctcctggtccggttcctttctgtttaagctgaatgacaaataacacaaaacataaattactcaaatactaaatcttacaatgtttttataatcaacattacaaaaagtattagcagaaatcaatgagaaagaaacaaagagttgagtcagcattcacaaatactagtcaattgaataatgacaaagtcatagtctactaatccaatagtgtctacacaagataaataattcaaatacttatatgtgatgatgattacaaaattaaaccctcctccatcagtaaactgttaatcaacatgatatgaacaactctgccggtgaataatccatagtccattcaataaatgacaaactcatcatccacaaatccaaaattgatcagagaaagcataaactaggagattcgttgtagaaccaaaatgattattgaacctaagtgtataatcacatcagcaatctaacagagaacttggacagatttacagagaataataaacagattccaaaacgaaattagaatttcaaaagccgaaagtctcgtacgattcaataaaaatccgaaaacatgagacaagtaatatccgatgaaacgagattcgtctctaagagaaacacaaaggcgagaaagctgacctgaacccatttgccttccattggagtcgctgccatcgttgctctgctgcaaattacgactgaaggagactcgtttaggaccaattttgtgtgaggtttctcctctttctttcggtctctgtctctatttaaggcccaaagagagggaaaaaggaatctttttaccttccttttctttttttgtaccttaatattcttttatcaaaaagcatttgtcttatacaaaatgcattgtaaactttaatcatacggcatgaaattgacaaaacaacaaaagaaaacggcatgggatttgcaatgtctaaataagaaaatacaattataaacgtattttcctaaatccataaatttgttacctaacttcaaattttaattttggctaataatacaagaagtccatagtcttcttcgcttggagtcttggaccaacaaaaaatggctccgtacgatccttttggcccacgggcttggagtatgtaaatgaaatttgttgacaagaggttatttattttttacaagtttatgaaagcaaaaaaaagaagactaacggtccaacataatgattcatcctgctgcctagctttagtaacccccaagattctgaagcttttgacttgtccatggcgatatggggcaaagataaatcttgatgtgttgatgggagcaatgacaaattgccttctgaaaatgttgacaaaactatggagaatgagactggtgggaaggatagggaggtagttgaagcagtgacaaacagtgaacctggaaatggtgatggatttgcaaaaaaaggcgactcttatgatgacaaattaccttctgaaaatgttgacaaacatatggagaatgaggctaatgagaaggagaaggaggaagatggtgctgctgatgagctgtgcgctttacaggatgcgcttgagacgacactgtttcagcatttaagcaactatgcacagaagcagatgttacagaagttgaggagccttagagccaaggaaaggaaagagttgagcggtgaatggaagtcattacttgctcaggaggcgctactgaagagcaagaaatattcgttttcagccgaactcgcaaatgcaacatttcatacttgggaagaagaaactagacgaatggttttgtgatagagtaatgacttccaatagtagtctgggtgggtggaacttcggttttggagctgcctatgatccgatcatgtagaagccaaactatgtggtgaagcgtcacaagttttgttcatatgttaatatgtagttttgtcattttcctttttgaaatgaaccattgttgttttgcttgctcttaaaaaagtttaccgtttaaattggttaaacccctttaagtggattactaacgagcaattatatccttttaattttattgttagaaaagatgctcaacactctctttcgaactgtccacacaataaacgtgagatgtagaagctggacacgcatcttccaaaactcttattgtcttaattttggcactaaaagttacaaagattattttccctgtcctatcaaatccaatttttttcctatttacgcacaaagtctcaatattgattttggtaggaaggtggaaaattcggtggaacaacacacgtctcattagtcataaggacgacaccattacgcaacttagtcctcttacctctctctctctcgactctgttccaagaaattcctctacttaatacagctgattctacagattcctgctacgaaatttctgggtctgggttgatctttgtctcaccagtcaacccaattcaggactttgataaaggttccatttttcttaatttctactctgttttttgttttgtttttcttaattacttttgggtatcccaggttcagaacaggtttgggttgtagtaaaattgggttcctcttgctatagtacgtgttaatgttcgctgattatttatatctttttcatggctgagaatcgttgtgattctcttatcaaatcaataatttagaggtgtcgttgaactcgatggttttgaataggctcaagtatgatttaatggagttctatcactagaaattttgtgttggtcatacttttatagtttagaactttagattatacaaatgatgcttgccgcataattttctccaatgcattccagttttatgaatccagcttattgaattttgttgtttgattgtgtctattcaattggtttcttgtaaattaggtggaaatg

SEQ ID NO: 9937 - DNA, 3000 bp, Unknown
  misc_feature (1)..( 3000): cDNA_ID_3409314_gDNA_ID_2096294_Annot_ID_195499 3000 nt of promoter + ATG
aaaccaaacaaccaaaaaagaaagaaaacttcaccataacatatgttgcttgttccatatcatttatagttagattgtagcagcaacacaggattcagctctagccttgtcagaatcttccaagactttcttagaggctttaataacaatatgattagtgatgtaatgcttgcgacaaacaggcatatagacatcagctccaccaataagctcagttctggtgtcacaattctttcttaaagtgaagaaagctttatgtccacagacctcacaccttgcagttagcttagtcacagaatcagctattggtataatgtcaagtacagccccaaaactcctcctgcacatagagagatcaattccacattttacagtcaacaaaattgttaaacattgaagtaaaatatcaaaatcacagctttggtactaggatgaagcaccttaaatagtcaccatctaggccagcaacgatcacaattttaccatcatcatcagcgactttgcagcaaaactcataaagatctccaaagaactgagcctcatcaataccaatcacatcaagctgccaatcattttaagagaaaaacacaaattcaatacagatccttcacaattaagacccgaaacaccaaatagagcatcgaatttattaccttgttataagcatctagtccgaatttctcaggaaatgacatgagatctggaagagcccagcaagggaatccaattccatcatgtgtcaccaccgaatcttttgcgtatctcgtatccttactcgatttcagcatcgcaacacttctgcttaaccaaaacacgaaattaagaaatttacggagatagatctaacaattaaaatctacggagatagaaaataaactgtaccttccgtcgctgatctctgacttgattcggcgaaggagagaggtcgatttcccagaaaacataggacccatgataacatgaacagcacctgacccacgacgttccagatcggagagaaaatctccggtgacgtcactgtcgagggttttgatcaaaaaggaagctttgagagtcgccatggcagagacttgagaagaaaagatggtttgtagatgaaaaaagggagaagggttcaatttgcttgtggttttaggtagcgatggtgaatagcttgttgaagatatatatacgcggacatccagaagttgaacaaggaagaaaattgctggagaagatttgtcaaagataagggtttgaaattttgaatgggaggttttttcaaaaaaattacatctttggagggaaacagttttttagagcgaatctttttattttacctctctcttttcataaagcggaacactataaacggaatttaaaaaaaaaaaaactgattttctattggcttattttttttaattaatttccttaatgtatagatcatatgaaatttttaaacatgtgtgtttaggctttgcaaacacattatttaagagaatgataaatatttttaaaaaatatatccacataaaatggtactggtttttggtcatatattccactaatgttttttagaattattgtttaaattagaaagtcgtaaattcgtaatattcgagaaaacaactttctcacttgggtttttatcctacaaacccatcattttgtgtgtgtgcttttgaatgtgggcttaaacccaaaaccctgaggctttttttggccctgagatgaacatgttcacaaccttcttcaagtgttccaatacatacacgttcattgctttttcgtagttgcaatttttatttaatttttcgtatgtagttgcacaccttcatgtctaaagctacaaattgttgaaatgttttttccgatcacctcaattaatgtacaatcgtagctcgttgtattcctaaaaccgaactagaatacattttcatcgccaggttattacaagttaaatcaatttgatcaaaattcaaacatagataaaatgtacaccagtaggttaaaactaaaccaaacgtacacaacaagcctaaattatccaaacaacaacaactctcagttttgctttaaaaattctgtgaataagacatccttaattgcaaatttatttttaattacttctttttaaaaaacttttagtggcaccatcctaattagtaattactttctatataattcttctttaagatacaaactaaaaattccgcaaaaagaaacatctaaacattccaatatattaatatttttttgttatgacaaaagtaaaatttccgtgtaataaatggaagggaaaacgtataaaaagtttagtattgaaaaagagaaaaaaaagaaacaaaccaattatgtaataatgagtataaatatataaatacagacatatcttcttcttcttgcacacccaaaaagcctttgtctttctatctctctaccaaaacttctttctttctctctttttctatatctctagagcgcgttactgcgcgtcgtgagtatgtttttattgacgccattgaaattgggttaaatcggtttgaatcggattgaacaaaaactgtattaataataattcttcctctacttttctctctgattgattccaatcttctttcattttcttcttcttcttcttctggggaaggggcaggttaaaattatgccatctattcaaatcgtgcctatcctcagatcttaactcttttctctacgagattcggcatctgggttttattcttcttggtgggtttttttttattcttcttcttctgatctcagatttcccctgattggtttttttttttgctaaatccgttttatgttttcccgatcaaactctcctggcagattctcggatctgttgttttctagattcaatctgaatttgattttacgtttttgtctttgtaaagatgtttccttttgatcagattttgataatccattgacatctctgattcaagcaaaagctaattaactttgatccgattcctttgtgtgtgtgtgcagagcaaa

SEQ ID NO: 9938 - DNA, 3000 bp, Unknown
  misc_feature (1)..( 3000): cDNA_ID_2996092_gDNA_ID_2096294_Annot_ID_195496 3000 nt of promoter + ATG
cctgtttcgttttcgatttggattacacgaaattcatgtgatatgttgcttctttgggttttgtaaaatgattgctggtgaattgtattgggaattttgtgcagaggaaaggatgaccagagaacatcctcccgagcctcttgatttcttcatctggactgttgaggtatattcaatcaatcattccttctttataagcctttcatgatgatcacttcttcaattcgcatgtttcttggaattgagctcttcattattagacttgttggttgcagaatcatgtttattaaattattcagcctatttttgatctgaattcagcctatttaaccagttacagggttgatttgatatttcttcaggtatgaccctagtttgccttaggcttgttcttgttgtttgatccaattacactgattgatttagtttactatgttacttattttttttgctcttttggtactctgcttgttattacaagaataaatctcaccttaatgattgcaattacatcaggcaagctcgaatttgacgcacctctagctattgaagttccattagtggtcatttagtttactatgttacttgtcgctctagtccaaggaatctgtgtttgttgatgtacatatactccggaagtggttttacctcagggtgtgtagactgcagagtgatgttcgcatatgtcacttgttgatttgctcttcagaaaaggttgaatattggatgaagattagttgatgaaaactcgataacctgtgcctgataccaaaaatagttaagagttagtccactcatatggagaagctggaggttgtgtgttgctgaatggttttgttctatcagatgctattatggattttcttagttatgctcgtgtgtaatggcgagcatcttgtagatgagaagctttgttctttttttcttcaggatgttgggtcttggctcgaggagataaaccttgggggctaccgccagattttcaaagaaaatggtgtcaatggagaatatctagaaagcatgtctgtgtttactaccgagcagatccttcacttcataaggaggcatcacatgaagtggggagacttcatcaccctctgtaaagaactcagaaggattaaaggtactctatcgttctctctataactctcagcttaagttgttgcaggaatttaactatggaaagaaatgtctttttttttacagtggcttgcttgaaaggtgagcagagagttagacggccatggtgggcaccgtcttgtctatccgtagtctttgttaaggcagccaaacgcaaccgacagtctcgtgttgtatctctcaagcttgaatcttgacattacactttggctgtttatgtacgtacttgtctctcttctcttctcttgttttcttttcctttttttttttttttggtttgggtttgtttgtggcacatgcactaggaagaaacaaactcaagtcaaaaaagctgtttggcttggtgaaatcttgcaagcgggaaaaaaattatgcgttttgtactttggtggtgtatacaaagcttgctctcagatgtttaatatatggcttgtgcaatctttatgtgacagataatagtgtgacgaatccaaagtagtaatttgattatatgtaatgtggaaaccgattgaaacccaggcgatattgagaacgtagtaatttgattatatatgttatatgttccaatgattttggacactaataaaattatttaggtcacaaatttaaaaactctatcggtggttaaacattttcagagatagcgtccattcaaacattttcgtggtgcaaattttcggagaaatatggtagagatttggcgtatagctcatctcatgttcctctttggagattagtacgtttagtaccctatcctcttggacgaaatctcttatcgagtatcgagtccactttatcttcacagaagtgagtaagtgacaaacaatgggaagcgaccacaacttctaagagaaaatagatattttatacattctttcttacaatttttttgcagttgaatttatcatctacaaagtgtaaaattatggattgagcaatgcaatttttagaagaaacaattaatggacagagatataaagttttgtaaaaatctttaaaattaataattatctttgaggtttttacaagtttattatatgtccctttccattatttatttttttcgttattgacattgcttacatacagtccattattttaagtttctcttaattttattttatttattagatacacacttatgtgatacatattgatatcatctttaccaaaaatcttgagcttagccaccaacataaagttttgacaataactcgtcatcggatttttcctcagtctatcaaaccttatcaagtctagtcgtctagaaggggaagacatgttcaaacggggaatcagatttatcgtcgttatgtgagtttattttattccatatatggtttctcgctcgatacgtttgatggtacaattcatcatgcgtattctcacttcaactttaatcgaagccttgttcatattgtataatcaaccgttgatacgtgtcaccgcatctggacatatcacattttttgttggatttcttatactcacccctttcgtgatccgatcaaataataaaactgtgtttttggtacatgttcttgttgggatagcgtttgtatgttggtttattttcgtgttagttatcttcttcattgcatacattctaaagcaatatgatttcttatacaagccaataaggttttaatcaggattatccttaattaatgtattcatacttaccgttcacaaaataattatgagaaaaccaaataccggaattacccttcaaatccagaagcttcggctttggcctaaaaaccctactaaaccccaatcgtctctcttcttagctcagagtgctaccgaaatcaaaatccaccattcttttctcttccgagattttagaagtttgcgacg

SEQ ID NO: 9939 - DNA, 3000 bp, Unknown
  misc_feature (1)..( 3000): cDNA_ID_2186625_gDNA_ID_2096294_Annot_ID_195492 3000 nt of promoter + ATG
gaaaagaaaaaatcactttagtcaatcaatttagtttcattttcttttccaattagttaaccgactgattttcaaatcttactttttaattgtttatgctagtcacaatttaaatgtggaaacgatgttagttgattcgcaaaaacagttatcaatatcattgttagttagttcatcggaatatacgtaaattcgttgagttttgccatttaacgctttctatttgctccctccttttgttgttttgtagtatgtaccatatcataattctatgacataatagatgactaccaaattttctctgccagcttgcttgttatgaaatgaaggaggaaacaaatgtgaatagtatcggatttgggagttttacagaaaacaattgaatgtttcaaagccatttttaccaaacccgaagctgagatacacgtgaccaacactgctcacacactcttttgacctttgagcttaatcatggaccaccaatcttctcttttttccaagtccacttaatttcatttgctgacctcatctccattctcatttcctcctcccaaaatatcacaaatccttttgtaacttgttatgtctttcactttaaacacagagatccaaggaacgcctcttttaataatccctagatgagatataatgttactaatactataatggcaaaaatatcacctttactatcacaaagcatggaacattagaacataggaaaaaggattttgattagcttaatctgttctgacttcgtataagattttccacagatacaaatattgttgatcccttgctaacatgtttcatcttgaaactttgattctctgagactcaagagtcaagattcgtcttcgcaggcctctgcggctgaaatctctgaatcaagtttgctcatcagagtctctgtcacatgcttggcaacagagatcatgtcaaggatgacgcttgggtctaagccagacccgcttcgtttggttaacccacatatatggcctgtccgattcacagatatagatacagctgagctcatctgagactcctcttctgctgttgcatcaactatgtaatgcgttcccacctgcaaaaaccaaggacagcatggtaaaagattagcgaaatgtacataagaagatgtcgatgtgaatcaagaaaagtgagattcgattacttttgttaacgtgactatgaccgggacactggaagtgtcaaattgaagatattcctcgtcgctgatgtcaatctctggttgctcatcatctgctacttcagctgaaacattgacttttgggatggccgtgttggttaaagcagcctgcaggagtatagtcaacaagtgcattaaagcatgtgatcagccttgaggaaagatgacttttgggttgcttaaactatcaattggaaacatatcgtaaagctactaaaaccaataacaagacaactacattgagctaatctatatacacttaactaaagacccattccctttcgtttcctatattctctggcctttcctttctcatgattctgattgatgggtatgatttactcactaacattcgtaactaaaacctgagactaagggttaagagagaaaaccaaacacacatcacaagaattaccttaatggcagcacccagggcatccaatagattcccatccgaactaatgacaagaccatcaatataaaggtcccagcaaacttttccttctttgattaaaagcgaagataaatttattccagctcctggtaccaaaacatgaattgctataaacgttacaaacagaaagcgtaacagtgtgcaggtaaaaaaaagcattgcataaacatgattgcagacctgctccacttttgccacccagaagacatctttgaagagccaaagcaagctcagaagacaattcctcacctcctctcccctaagtaacaacatatcacaaagaattagccgcctaaagacttaacacagtagaatttaggagattctgaagaaaagtaatgataaccaaaatctcatgttgaacaattccactagtaagagaaacaccaatagaacgatagaacgggtgtgacaagtgctagatagaaccaaaaccaaacgaaataaaagaaaagctcaccccaaatgtcggttcagctgttggactgcaatcaatgaaaactgcaacctttcctttatcgggttgaagtgaacttggcctcccaatttcagcctgcaattacacaagattactgggtaacatctacaatagcacttcccattcaacaatagaacagtagcagagagaacaaaggaagtacctttacactagcaatcacatcggttccaccaattctaactctcgctgaaccattagcctagagccaacaaaaacaagagaaagaacatatctgttaaacaactgggaagcaacaatgagaagcggacgagctctaggagattacactacctgcggaataacaccggtttcgacgtagataggacggtaagtcaatcttttccgaccatcagttcgaagatcttgagcaatcccacctttaatgaaatgttgttccccaagagaaagccccatcactaatactacacagagaacgaattagatcaactgctgaggaatttctaccggaatgacaaacttcaaggttcacggattggtgctagggtttaagagacagctcaaacaaagtacacatctttatacagcacaatcaaaacccactaatcttctttaccttcccggagaattcaatagaagacacaactctgaagttttccggtgaccctagcggcaactttggattggttaggttaagagagagacgtgaccactgacaactgccgtagggtttaaagatggcgtgaacataattattgacacttgttaagggtaatttagtcatttaccgacttaccattttttcactgctttttagcgttttctcgctcttctggttttttcttcaatctgccgggaagaagtgcgagcttggtgccgatg

SEQ ID NO: 9940 - DNA, 3000 bp, Unknown
  misc_feature (1)..( 3000): cDNA_ID_1398698_gDNA_ID_2096294_Annot_ID_195483 3000 nt of promoter + ATG
aaactagactcctggttttatggtctgccatagaatctcttcacacaacacaaccttttttgtattttcttcttatcgttgataatgttctagaattagggcttttattgggcccagtgcaaataaagtggataatgcataaataatactttttaaacacaaattatgggccttaggattggtccattagaaaaaccttatgatagataaataatgtggcccatcaatgtcacctccatctccatatacatatctctcatcataaacagccgtcaaaacaacatcaatggcaatgcacactgttcgattgtcgccggcgactcaacttcacggcggtatctctagcaatctgtcaccacccaatcgaaaacctaataattccatcgtccgatacggatgcggatcttcgaagcgtttccgtatcgtaacggtcttggcgtcactccgggaaaacgatgcaaacggaagggataactccgtgagagctatggaagtgaagaagatctttgaagactcgcctctgcttcctagtacgaatccccactttcgattcctttgagctgtgtgacagatatcttcttcatttgcagtagacataacgtatatatgtaaatagtagcagctagaatttggatttagtgatgattagttcgtttttgtttgaataatagagccgttatcatcgaaccagctcacggaatctgtctctaatggctcccgcgttcgtgttgcgtatcaggtaactaattcaaaggaactgaattgtttctgagagtcataatgttttgggactttattggctaatgaatgattctccaattagggagtacgaggtgcatacagcgaatcagctgctgagaaggcttatccaaactgtgaagctgttccatgcgaagagtttgacactgcttttgaggtcagaatctcgttcctttactgatcaagactgaaatgatcagtatttcattttcttaagttttggttgccattagtcttgctttgttcttgtttaggcggttgagcggtggcttgttgacagagctgttttaccgattgagaactctttaggtggaagcatccatagaaattatgatcttctgctgcgacacaatttgcatattgtaggcgaagtcaagctagctgttcggcactgtttgttggctaaccacggtgtaaatattgaagatttgagaagggtgcttagccatccacaggtatgccacatacctttgtgcataatcgagttctttttctcttggcactatttaaacccttcttcgttgctttggatcaggctcttgcccaatgtgaaaacacgttaaccaaattggggttggtcagagaagcagtagatgatactgctggcgctgcgaaggtatgttttatgttcctagtatgtttatatattcacactcacaacttacagtggcagctaaataagtttgtgaatttgattcgcagcaaattgcattcgaaaatttaaatgatgcagctgcagttgccagtgaaaaagctgcaaagatatatggtttgaacatagtcgctaaagatatccaggttttaaagactttccgaatgccttttccaatttttcatccatatttttacacttctgctggattatttgattgtgaagttcaatcaatttaggatgactgtgataatgttacaaggtttctaatgctcgcaagagaacccattatccctggaactaacagactctttaaggtgagaaatccagtataacttccatctgcaaaggcaactctaatttctggcaatgtttttttttctctgatggaatgagttactttgattcttgtagacaagtatagttttctcgttagaggaagggcctggagtacttttcaaagcgcttgctgtgtttgcccttcggcaaatcaacctcacaaaggttttgattaacacactcaaaatcttccttcattatgtgcagccttgtttccagtcccttacaatcaattttattgtggtttcgatcagattgaaagccgccctttaaggaaacatcctctccgagcatctggaggactaaagtaatttctctcacaaaaccactgttaagtctataccgtacccagagtgtctgagcagtgatgaaagtgtctctctttctgtgcttgacagatactttgactatcttttctatgtggactttgaagcatctatggctgatgaagttgctcaaaacgcacttaggcatctcgaggtaaagcctttggtcacttgatctgaaaacatgtacatgtgactaagactctggattttgttattggcaggagtttgctacctttttgcgggtactgggaagctacccagtggacactacaatgctctaaacatttcaaacatcttcttggtaaatagttcattggtttgcatttcggatctgagttagtaaaattatatcaagtgaggtgaaatatttgaatagtttgtgacagagatccgcttgatgatatcataatcctggtataaggagctatatccctgaggtgaggtctgagaggagtcaccaccttacaagacattccgctcttgttacaaattctgtttagttttccaaaaaagatcatctttgtttttagtaagaatgtagtcactaagtcagatatcaatgacaaataccaaagaactagtgttttttcgtgtttcatccatacatagatacttatcctgtgtcttttttagaaatttctttttgtatgacgtttcaaaattttgattgactattgttagtggtatatctttgagttaataaacgagatataatctgttttcctgttcacaaaaaaaaaaaaaataaaaaaatcatatatcatccaattttcttttggttcagattttaaaacattgggaaaaatagggactagatgacaaataacaagaaatcagaattttggaaggattaaacaataatcgcttcttgtgcaataagccaaaaacaggattaaacagattcgctcagttctcaaaacg

SEQ ID NO: 9941 - DNA, 3000 bp, Unknown
  misc_feature (1)..( 3000): cDNA_ID_2186596_gDNA_ID_2096294_Annot_ID_195486 3000 nt of promoter + ATG
ggaacgtctcaacctttccaagcagattttgaaatattgattaccataagtcaatcatgctttctgattaggagaatctaggagctaattggtcataaagataagtagaagtacctcacaattatgattaagcatatctgcccatggaactaaggcaaatcttccatccatagaaggcaaccgcacctgtgttagagaagcttaagtctgaattgcagagacaagcacgcagcacacggaaggaaagagaaacgaaataatgcaatattttggttgtgagtggtcattgttcaaacaataaattgttggagacagctatattatgcagaaagtcatgctaagattaaagaacaagtctgttgtttcaaattcaagacatctagatttacatcaattatcaagataatgattgcttatgatacagtagttcttaccaaccgtgagaataggattccaaaagaccacttaaatgtctcatcattgaaaacctgcaaccaagaaatagcacactcatatacatgtggacaaaacaaatttaagctcagataataaaatagaaccaacactagttgtaattacagaagtgcatcttattacatgtccaaatagtaagctgtagcaaaatgggcgtataccagttacctctttagggaaaagttgagggtgtttggaaaatatcctgcttcttagatcttcataactgaggaaaagaaaaaggaaaaagacatgagcagtgtcttgcaagacataatcatcaaccccctagcctacaaacaataagtactagtgactgcatcaatgatttccagcagttgagagaaagaaagaaagaaagaacaatatctcacgttccaacaacattggtgattctttcaattgcccgttctcgaatctgagaagcttccaagtacatatcaagctctgtccgagtcctgaaatagtacaaaaaggctgtagggagtaagaaactgagaccaaagttcagctacagaaacaagtacaaaacttaccagtataaaagcgagtaaggttgtcggggaagagctgagatatagttaaaccatcttgagcttttctgaagacttgcttcacttataagataagtggcgagcaaaggccaatctggaacatcataacgtttcatcacttcaccagcttctgcgttggtccattcctaaaacccaatctccgatattagatattcacattcatgaaagccagatactttaaccttgcattgatctgaacaagaggtgagggattgcttgcaagtgagatcaaggaatataagattagattctttgattccgagtgaaattaggagtgtgaacttacggaatcagcactgatgacgagagaaggaggaacgaagagcaatttctctccttttctgagattctgtgaagcgacgaggcctcgctcaccgatgtcgactctatcaatagccattttctgcggagggagacctgaatcagagagccagttctgaagagaagtagcgttctcaagtgaatcaatctcgcatccccatgatatcttcggagcttcctccatggattgtattgtagtctcaccggccgaaactgagcagtggattccgggacggcatcgggacagcggaagcggtgagaaagagagggtgatgttttgattacgaagtttgtgaagtggagagtaagctgggagtagagtagactgcaagaggcaagcttttgccatcggaaaagagaaaacgatgaagcgagaagacgaatggttgcacttagcagagggggcatgacaaaattaaaagataatgtttttaaattcgaaccaaaattagtttgtggatttacggtttggttcggttttgagtttaatttgatgctaaggaaaaaaaatctaagctgcctatggataatgatattaatattcaaaactttgttatgcgctaatgctaatgggaaaaagcctagtgattagattttgatagaatcagttgatgagatttattgaaaaattgtttccataacagcaatatctggacggtttattagaatttagaagcaatagggacccaaaacacaggaaaattaatgaaaaaattgaagatttgtttatgtaaatgacaatccctagagttgctaattgctattaataatgctaaaagcgtactggacctggtaaatatttggacaaccatataactcattatgtttttgaaatccaatttttaaaatattttaatttggtattgtaaaagaaattaccaaagacaaaaaaaataaacttattcagtaaattaaatatatatgtaattatcatggtggggataataataacgtattataattatttgataatttaaatatttacatagaaaacaataatacgttactgagatgtaaaaatataaataataatatgctaatcattaaatcgctcatctcataatgatatgggtaacatcgtttgagatagttgagatttaatatgatcaagttacaatcaaaacttatcttcttcttattttcttaaatactatgttttatgtttgtcattattatgtagtgtaaatattcagaagatatcctaaatcctaatttaaatatatttgtggacaaaaaaagattgtgacaacaatttggttatcattatttaccaaagattcagattaaaacaaacaaaaaaactcaatattaaaaagctacaaaggaatgcaaaacaaaattgaaaaaagaaaagagagccctacgcttccaaaatcacagtgcgtattattttgctcattcctttctctcgcccccttcctcttttttttttttttttcttgttccttcttctttcttcttctccttcgtcgacccaaactagtttcaaatcccatcctctcgtactgatttatcactcgcctcttcgtatacatatataggtactcagacctcttttggtctaggtccagatttcgattcctgttaaaatatcagaagcgagattttacgtttgatagaagagaggatg

SEQ ID NO: 9942 - DNA, 3000 bp, Unknown
  misc_feature (1)..( 3000): cDNA_ID_3034805_gDNA_ID_2096294_Annot_ID_195487 3000 nt of promoter + ATG
gagcttcctgatttcggaccaacagtacttttatccatcacagcagaatggctgtaaaccaaaaaacacaaaacaaaaatcatgagaaggatcatctatagagtatatccatgctggaaaaaggcccacccatctttaactgagggtgttatacatccacctataagtcacatagaatcaaggagaatgatacataaaaggaattagtactataggatgacaatcaccttgagaccagagctatatctttcgtttttatctcttgagaggttgaagttgatggatcaataacctgctttggaccgttttcttttttgaaagaattctttgcaccagcaacatctgatcagaagtaaacattcaccacacagttcatcaattacagaaaaattaaaaagcaacatgttacagactgccgctagggaactttctctttcacattctttcgctaaacatactaaaagccaatcatgaacacaactagtatgtcctaggaggaaaatcaggaaagaatcaatactgagtaaatataacaaaaagtattgtgaccgcaagtaaccaccttccagagacaactaatgtggcatattaagagatgcgagttcatatgattgtaaaacattgagttcatcagattgttatttaccatttgatgcatgacgagaagagaaattcatccgaccacccctgctaccacggccccctccaccagatctccattgtgattcagcagaatccttgttgttgatgttctgtaccatttcaataacattgtcaatacccatgtcccaaatatatgcggtttaatagacatcctttacacagaaacccatgaagagaccaaaagaactgcaaaaaccccatacctctttcctcttatcacgcttttttttaacctcatggaatggatctgcagagtcataaacaattttttgcattagcacataagattgtatagaaaaacacaacaaaaaaaaacttaaaacatatcctagcaaccatctctaaattacatggtacacaagcaggttacatgaagcactcgaaaagcctgatgcaataccacatctccaaagaatcctattttcataacaatttgttttggtaagatgatgaaaatgtggatttctaagcactagattcatctacaacgcagcagtctttgtttagaactcatacctagcaaaagtattattcctagacaaaccactcagaaaaattctagttagaagctaattctctttgtttcacacatcactagtgtaagtaattgattcccgtatattccaaatcaattcgtgaacctttttttgtgaaaaggaggttacaacacaatatcacataaacaactagagacagcttaaaacttaataggcgaagaaaccgatgatagtgaattcagataaaatctgaaaaaaaaaaatcaaagagcagagaaatcagatgctaaaacctaagttacaggagaaaaccccaaatcgaaaaatacaatctcgatccaatcaaagaagagaaattaggtaaagaaaaaagtgcagagaaggtcgagattataccctgaagaagtaagcgttgagcggtctcatcaggatccatgttacattcatgaagcattgcgataatctcatcctcgctatagttcccagcagtggtctccttaatgttctgaatcatcttccgagtagtagccgaaatcgaaaccctagcgccactgccgaccatcctctcttctatcaaacgtaaaatctcgcttctgatattttaacaggaatcgaaatctggacctagaccaaaagaggtctgagtacctatatatgtatacgaagaggcgagtgataaatcagtacgagaggatgggatttgaaactagtttgggtcgacgaaggagaagaagaaagaagaaggaacaagaaaaaaaaaaaaaaaagaggaagggggcgagagaaaggaatgagcaaaataatacgcactgtgattttggaagcgtagggctctcttttcttttttcaattttgttttgcattcctttgtagctttttaatattgagtttttttgtttgttttaatctgaatctttggtaaataatgataaccaaattgttgtcacaatctttttttgtccacaaatatatttaaattaggatttaggatatcttctgaatatttacactacataataatgacaaacataaaacatagtatttaagaaaataagaagaagataagttttgattgtaacttgatcatattaaatctcaactatctcaaacgatgttacccatatcattatgagatgagcgatttaatgattagcatattattatttatatttttacatctcagtaacgtattattgttttctatgtaaatatttaaattatcaaataattataatacgttattattatccccaccatgataattacatatatatttaatttactgaataagtttattttttttgtctttggtaatttcttttacaataccaaattaaaatattttaaaaattggatttcaaaaacataatgagttatatggttgtccaaatatttaccaggtccagtacgcttttagcattattaatagcaattagcaactctagggattgtcatttacataaacaaatcttcaattttttcattaattttcctgtgttttgggtccctattgcttctaaattctaataaaccgtccagatattgctgttatggaaacaatttttcaataaatctcatcaactgattctatcaaaatctaatcactaggctttttcccattagcattagcgcataacaaagttttgaatattaatatcattatccataggcagcttagattttttttccttagcatcaaattaaactcaaaaccgaaccaaaccgtaaatccacaaactaattttggttcgaatttaaaaacattatcttttaattttgtcatgccccctctgctaagtgcaaccattcgtcttctcgcttcatcgttttctcttttccg

SEQ ID NO: 9943 - DNA, 3000 bp, Unknown
  misc_feature (1)..( 3000): cDNA_ID_2186609_gDNA_ID_2096294_Annot_ID_195488 3000 nt of promoter + ATG
catctctctctctttgtgggaaaattttcactccatctgcttatagtttgctttgtcaattatctaattgtaggaaagtggatcaatggatttggacataacatctccaaaacagttgaaccgaaaagcgtttctgaaacagctagctgtagacttgtccactagtgagcgcaggatactgtaccgtgctcaatacgtaaggaacaactttctagccaatacgatagataagagtctgtggatcgatccatgatattgtggaatctgtgtttttttttttgttttgtttgggtcagattctgaggaggagactgagagatatcagaagtggtgagctgaaggctctacggctcttcagtggacttaggaacttcttcaagtgaatgttgaatgaggacatttcaacagctttaagatggatcaaaggtaggcctcgttgtgcttcaaccaaaaatgtagttttttattacaaaaaaattgaacgttggtgtaggcatggttggatctgtctcactcgtataggaatatattggtccagccatatatgtaatttgatcattttctataaactcaaaacctgaacctaaattgattaattaaggaaacgcatgagagagtaagggtagaaacatgttcttcgtatttgatccgaatcgaactgaaataatcgatccaacaaacaaagataatttgaaaattaagaatatatctgactacaactcataacgaaaaccgtaccaaaactcacactccttgttaccgcaaacaagataatctgatggtacacgtcagaacatttgtttctttagcaaagcaagtaaacattccactgtggcaaagtaaaaaacgagaaacctataaagtcttcctaatgaaacgtactgattttatggagtttccattttcgacataatatgacgtggcaatatctaaatggtttaaagatgttttatctccaatgatataacgccacgtaagcccgctgaccaaataacccaaagagtaagcaagcgacgtcgtttatagtttgatgatcttgtcgggtaacgaaactgccccttgagtcaaaacaggcttcttcgtgtccgattctgaacgagctcgctctttctcatccaattctctccaccgtcttctactccgatcaatcttcaaattttcttaacactcatcgaccagatcgagtttccatcgatctaatcaatcaatcatcagatttgatcttctcaagaaggtaaatccctctcactctctgtgtcaaacctaatcacctcgtaggaatcgaaattggaacaattcaatttggtttggtttggaatctctagtcgattcttcttctaaacgattgaattgcgttttgtgctttgatataattcgaaattattgtggcagatgagcttgaagggtacgatcgtattactagggctcttatggagcttccaggctacgttagggattagattcgtgatagaccgtgaagaatgtttctcccacaaggctgaatatgaaggtgatacgcttcatgtctctttcgtcgtcatcaagtctgactctcaatggcattttaacgaggatggtgtagatcttgtggtatgactttttttcttctaattgaacttttctacattctacattgcaaaatcgtcgaaaatcaatagaattggtattcctaaacaatgcttaggatttccattgttaatgttggtagataatttgaagtatgtattgataaagaatttggttactctttaaagctgttatattgtaccatctggttaatttggtggttgttgttgttgttgatatattttggatgcattttgaatagatacatggcccaacaggcgaacaaattcatgacttcagggagcagataagcgcaaagcatgattttgttgtccaaaaaaaaggggtttacagattctgtttcacaaacaagtctccttatcatgaaaccattgacttcgatgtacagcttggtcactttgcatactacgatcaacacgcaaaggacggtaaggattatctgtttagttttgtttcagtttcgtttggtgatgaggtatttagctgaagatggtttttgtgcagagcatttcactcccttgatggagcaaatatcaaagttagaggaggctctttacaacatccaatttgaacaacattggttagaagctcagaccgatcgtcaagctatcggtaacattttttcctctaaaaaccacatttgttgttctcacttcaatattgagtgatggtttgaatatggttgttccttgtgcagtgaacgagaacatgagcaaaagagcagtacacaaagctttgttcgagtcgtttgcactgattggggcaagttttctccaagtttatcttctgcgtcgcttgtttgaacgcaaactcggcatgtctcgtgtctaaaagtatcgagtttattatgactttgaacttattttgccttaaaatgtaccagggaatctttacttaaaacctttttacagacagatcgtagttcattggaagatttgctttctcccatgttcaagaactaatcctctcgtgatgataattcttttttttctctttattaacagacaacttttccacaagctaggttttcatttcaatagagaaaatagtgattccttaaaaccttttttccctaaaacaaagagaataacaatgtgatcaagctttgaataagacgtgtcaaaagtactcaaaatcccttaactggattcgaactcttatagagaaggttataaaagtggacactagactaagttagttgggcccagagtagatagataaagccagctatcattttcttagtcgtcgtacaagttacctgaaaataaaataaaaacacaaactttcctgaaaaagtcgtctccagttttaagcattgataaatccgacaagaagtccgattttgttccatagcttgcttgtgtttttagtggattgagtcactgaaagagaaatcataaggctttgttgatg

SEQ ID NO: 9944 - DNA, 3000 bp, Unknown
  misc_feature (1)..( 3000): cDNA_ID_2186592_gDNA_ID_2096294_Annot_ID_195485 3000 nt of promoter + ATG
cagctgaataacgagtttgtgttgttgttgtcatcacaggtgatccatgaaacaggggagctcgtggctagttggacaggactgtctttctcaagagacagaatcaagtggagcgcatcaaagacatcaaaagaagaagaaagtccgtggcgtgctctttatggctaatcttcacaggtcaggtctttttcatggcccaacactgctacagtctttgcttggacctgcagtaaatttccctattgtagtagtacccttttgttaaaattcttatgctcagcagaaccaaatccacgtcactctgctttttctaggatatttatttatgaaagaaacagtttctttttttttgggctgacttggttcaaccaaatcttaaactctcagaagcattttgatttaaaggtacatatatttggtcaactcatgggaggatcataacataggagtgggattacttaatataatacaaatgattagagttatgattggtgggagaggcataaaaaaagagagattaaaattggtgtgaagtccataaaaggcactcatgaagtatagtaatagagatagttaatgttatcttaagagaaaataagtgaggtgtcgtcagctctgctaactgctaagccggttgtttaataataggatattgatgaagaagaaggaatacgatgttttgtaccaaagtttttcggatcgtccgagaatcttatcctactgacatttcagcatcatatgttattttttttgtttgttgtttttatatatcttgttcgatctttttagtgcgtcttatcgtcgccttttcgctttcattatcatttgattagatgactactattcacttatttgccaggcagatttgttaatattttaaccaattagggtctttgatcattcgtctttgattggatacatacgagtctggataaagagcaattcattttgatgttttcttaattgagaacgaaacacaatattaactcaccattaactaatactatattatatgagtttaaaaattaacacttgctcaatttcaaaaacaatagttttctgattaacaatgcatcatttcaattcgacttctcatcttgtaattataaactttgaactgaagttatgatcaattatttagtggtactaaatcgtatattcaataggaacttaaattgtaaacatgtgaaaacagtcagacacttaaaaaaatggaggtggggtttcatccaagacttaaccatcattctttcatatttggtctatcatgttttgcttttttatattactcaatttaataaatcgatatcgagtacccaagaaatcgaaataaagaaatgggtttaagtaaaccggtgaacaatattaatatgaggaaagaaaaaggacaaaagagagatctatcatattgatttcattatttttcagcgactttatgattattatttttatgaagaatattggggcaaaggctagtagtacgtagacgtagtgtgaaatatctttctggtctgaaagagttatacagacgtatctaacttggcagatattttttggttttcattcagttctctctcccctcaatgataaatatcattaatttattttatttgttctaccaaaagaagatatttttgttatatacgcccaccgaaaaatgaagaagaagaagatatttttggcttttgtaaggtcaaagcaaacagatttatcaattattattattattatctgagactgagagagagagagagagggagattttctgaattctgattcgtcgaaaagcatcaaaaaagtgaacgcttgagaatccattatggcacaaactagccacttggtaacttccacgtcgcgagtagattatcttcaatactcgcatgcgcgtgagtaaaaaacatacaacctttttttcttttctttctaatagtaatatctttaagaaatatccataaaaattttattgctttcactataaatacgagagggacccacaataccctacacgaacttttttgcactttttcgtctttttaattaataaaaaaaagaaagagaaggaaggaaattaggcacttttgataaatcagattatgtcagaagcgcctacatgtccctttgcggacacacccacccattgtctatccattcatttttttttttcatttcttcctccagagagagagagagaagccacaacaagaagaagaagaagaagaagaagaagaagaagttctggaatagtcatcatcttctctgtttctaggctttgtttatttgtctctaaagtttctggattcaacttctgaagaagatagtagtagtccacaagaaggatcttctttacgtgagttgtttgtttctcttctccctctgtcttttcttttctgattttaataatcccaagtgtgttcttattttcttgctatctgttgtataattggtgttagtgattgattattcattgtatatcgatgaagggttggttttgatttttgttgaattggatcttttgatttggggttttaaaacttgttcggatgatgatgattgggattgatccaaaagttttcgttatttattggaaattcagattttttcgattcagttccatttgaactagtaagtcaaacaaaatctctagatttactgatctggggtttatactttgaagcttgagttgttgttgttttattaatttatttcgattttcagtaatatccatttgtaggttttggtctctgactcttgtttataataaaagctctgtattgagtaaaatctcatgaaagtaggtttcctttcccttttttatccttctcctttggttattaatctcctacaacctttttttagaaattactacctatattcagaaagattccatctatttcttcttcaaggcttgcttttttgaaccaaaagtctctctctttttcatctaataatttgtttacttttttggacagcagaaagttgatttggtcagagccaaggaag

SEQ ID NO: 9945 - DNA, 3000 bp, Unknown
  misc_feature (1)..( 3000): cDNA_ID_2186574_gDNA_ID_2096294_Annot_ID_195480 3000 nt of promoter + ATG
gaagctcgtcaggtactgtttcgttctcagttcttcttttctttagaaaattcatgttgttcttaatcttagttagctcctggcatggaatccattcccaatattgagcctgagctgatttgtgttatatggttttgattggatcgagtaggtttttgatgaagttaaacaatgaaactgtgtctatcgagctgaagaatgggactgtggtccatggaaccatcactggtaagttcttattgttagcttccggtttctttgtagctcttctcatcttttcttctctctcgatttctccgttgctaggtcttatacaagtcgcgatctgttcccttattttcaattggccctaatcgcgtccttgtgatcacatgaataggttgagtaaacacacagttagagccagtagtcataaaggtatatttattgaagtttaagcttgatgatttgggcaggtgttgatgtgagcatgaacactcacttgaagacagtgaagatgagcctgaaggggaaaaacccagtaacacttgatcatcttagcttgaggggtaataatattcgctactacattcttcctgatagcttgaacctcgagactttacttgtggaagacactcctagagttaaacctaagaagcctgttgctggtactgcttcattcatttttggtgtttgtaatattcgtcttcataagctaaaagacttctttatcagtccatttattcgttctctctttctttcttctttagggaaagctgttggacgcggtcgcggacgtggccgtgggcgtggtcgcggcagaggtcgttagatgtagcagcgctctggaacatgttgaaggtttgtgagtttaatttttaggagaatgtacgagttatgtaactagcaactctggcaaaggaaagatttgattgagaaatagtatgattgatgctctagtaaggagttactttgtaatggaattccatggataacaagatttggctttacatgttataagagcatctacaagtagagaatttgtgtgatactgatagctcaagactttttattcatttaacaaatctgactatcaaattgcattaacatgttgacaatcttagtatagaaaaactgctatctcctccgttaatcttccacatgaaacctatctcacatgatcctgcaattgggatcttgattgtaaacgggttccccgatctgattgtagggatcacacgggtagggataggaagatggcacaccatatccatcatgaggccatggttgataacatggctcaggtttttgccatggttgacaacatggctcaggtttcttctcttcaggtttcttctcttcgggtttcttctcttcgggtttcttttcttcttctggctttttgtcaccatccttaggtggttcaactttagctacgctaacaagctccgcaaatgcaacttttttcctgagtgtgttgattagagcaatcatatcgacttcaacaccggtcacctcaatctggttcctgtgatctccctttatttccacagcgttcacgcctataaaccaatgcgataaatctttagattcaacaagaattacaatcatcaagttctctagtgtttgtatcattgttacctttaaactgaaccgcagttttcattgcctttgctcgagttgtgtcatcagtcatagcaattcttatcaggatcttttgctgagtacaataagagaactccttaacatcacaaagagaagtctctctctttcacaagagaatcgaagttattacttgttgttgagtacacaggagacataccttcatgttattgtcttctgagaatccgcgtgatttgtttgatgggagtttgctccgaacttttttgtgtcttcttcgatcacaaattagaggaaatataaataaggatcgattttatatattcatttgttccatgagtcgttgtctcacacaacggaatccgatagtttgaatatcgttgtcaggttcatatcttcggtccttacgtgttttattggttctagttgccgattcgtacgagcttattaccaattttttaattttaaaaagcctaacaaaaatctttatttgattgagtcaaaaaattagatgaaatagttatttgactgggtcaaaataaattgattaaataatggtaaacaacacaaataatatttgtttactacaccgttgcctggtagttttagacatgtatggcaaaagacttaataatttttgagtcgatatgtcaattatgatgattaataagttttgtttgttcatcatccagttgtgcataacaatgaatagaacagatgcgttaaaagtcttggtcttctctagagtacatgtttccctctaacttccttctcaataaaaaaaaagattaacttgactactaatctgtcatccatctgtattaacaaatgttatatgcttgacttgcaatacgtactttcgcaatcatattgcagttttctaacgtaatgaaacaataagcttttagtttatactaatgtgtgttgtctaatgctaatttgactttaatttcttaacacattacacattgatgatgccaattgcagtgatatcagcaacttgcaaccgtttgatccaatgatatatcataggtaattaggtatcatatctcatggagataaacgggtaaataaatataatcttatttgctaaataaaaaataatcaagtttaagttttaacatcttcatatacaatctggtttctgtgatctccctgtattagcaaaaaaaaaacatgatttaaaaaagaatttggaaagaaaagaaaagagcgggaaataaatccaaagatttgaccaagttaaaccaaaacttttttactatctgagaaaaccattcagtttccccaaaataaaataaaaaatcagccttaaatcccgtgtctagggttttctttcgtagctgattgggggctgcaagagtttcgccgaggacgattgagaattttgattttcgaaaa

SEQ ID NO: 9946 - DNA, 3000 bp, Unknown; identical to SEQ ID NO: 9920
  misc_feature (1)..( 3000): cDNA_ID_3034913_gDNA_ID_2096295_Annot_ID_195514 3000 nt of promoter + ATG

SEQ ID NO: 9947 - DNA, 3000 bp, Unknown
  misc_feature (1)..( 3000): cDNA_ID_3034901_gDNA_ID_2096295_Annot_ID_195517 3000 nt of promoter + ATG
attctctaacttgatctcctcctcttagattactcacccgtcatcataagccaataaaaagcaaaatgcataagaattaccaaaagatttgaatttgagaacaacctcggattgtggagaggacccactttgttgacgaacaaagggacatgatcgccggcattataatggttcgacgagcctgatccgattccgatccagaaggtcaatgcaagtaggacttgtagtacagtaagcagaaattgcgccatgaattggcactcttcttctgctgggttccaaaagaaacgaatcaatatgtgcaacaagaagagctccagaagcagtcatcttctaaaatcttaatctaacaacagctcaagaagaaaaaaattccatagctagagagaacacaaagtcacaagacgacgtcgtagaggcacaaagtcaaacctgaatggcttaagccgaactgagtggttttgactagaccatcatcagaaaagtctccaagacggtagtcggatgttagatcgctcaagtaatttttggttttgttggtctcacgttttcagctgcccatttgatttcagtttgggcttttccttatctctaaaggcccaatttcatttaggtttagtttatttgatcattatccttactataaaggcttcgcctttcgagaaatttagggtttcttctgtctgtctcgtcactcaggtttgtgcctcaacgactgcttcacttctagcttgattcttcttcttcgtttatatgtatactgtacattagattattcttgtttctcgagcttctgctatagattttgattcttttttttgttgtctttgtttcgtttccaggatcagatcttagctaaattgagacaagctcaaaatgaggtacttgacgcatctcttacattcactgtttaattagagaacaatacgtctctgaatcgtgattcagagacgtattgttcttctgtcatatgcaataagtttaattagagaacaatacgtctctgaatcgtgattgttttttggatgtgcgttattgatagctttatgatgttaatagtctaggattgacacgaagttgttctgcagttttgcataaatgctctttactaaggcctctaaatttggatgacaaatctaaatcttgcctcataaaaatttaggtgtattaagataagattattttgtatggtagtgtctataatgtgggttgttcatgttgaggttgtcaatgttgtgtatttttgtttgtttagttaatttgcttaactctgttctttgtgggttaatacagtaagcttcagagtgaggccgttcgtgaagccatcactactatcacagggaaatccgaggcaaagaaacgtaactttgtcgagactattgagctccagatcggtctgaagaactatgaccctcaaaaggacaagcgtttcagtggatctgtcaagttaccacatatcccccgtcctaaaatgaagatctgcatgctcggagatgcccagcatgttgaagaggtgatatatcttttcatggaaattgatcattttgtgctctgtttcttgtataatggttttgtgctcatttcatttggtggctctattagtttcatttgatgttgtatatgtcttctgaatgtagatgcatgatgttttcggaatttggtcattgtttatttaggcttcatttcttgcataattaaatatttgcttatttcatcttgtatcttttcgtaggctgagaagatggggttggaaaacatggatgttgagtctctaaaaaagcttaacaagaacaagaaactcgtcaagaagcttgcaaagaaataccatgctttcttggcctctgagtctgtcattaagcagattcctcgtcttcttggtcctggtcttaacaaggcaggcaagttctggctacagctaatattccattgttcttctttacatccgttttgattttggataggttttagtagtctatttcttttgtcaatgtctttttgatacaatgccaatcctttatcctgtgagattatgcttctttgatgattcttaagtaacattcctttgctttactttacacaggaaaattcccaactcttgtgagccaccaggaatccttggagtcaaaggtgaatgaaacaaaggcaacagtgaagttccagctgaagaaggttctgtgcatgggagttgcagttggtaacctttcaatggaagagaagcagatctttcagaatgtgcagatgagcgtcaacttcctcgtctcgctattgaagaagaactggcaaaatgtcaggtgtttgtacctcaagagcacaatgggaccaccacaaagaatcttctgagctttcacctacttaaaattggtggctataagacacttcttcttaccctttcgtttttgtttcagacatatctgttaaacagtgtaagagttgtgctgctactctcctctttagcttttggtttggataatttgaaataactgcagtgattttggttaatggattttgtagcttatattatctttgaattagatgtgcttatttcaaagacgaatcaatccacagatgtgaataaaaacagaaattttcgttttcaatttgaaaattgtcctcgtggactgttccataaccaaattctattgactatgcagtaattgatctttgaattaaaaggatcaacccactgattatactccaattgaataaatattcttctttaatgttgtttataatctcttaagcaagctctaatgatgtatttttgaagcaaactctaatgcttttatggtcagtatatttattctcttaagttttataactaaattaccatttttttttgccaaagcagacaacaaaatagcgaagtgcgttccaaaagttagcgttttcgtctccgtccccaaatctctcagctaccttaaatcagaattctagggttcttccgattagggtaaaatcgaatccagatttcccaaaattctgatctttgatttataaaag

SEQ ID NO: 9948 - DNA, 3000 bp, Unknown
  misc_feature (1)..( 3000): cDNA_ID_3034895_gDNA_ID_2096295_Annot_ID_195520 3000 nt of promoter + ATG
gtggctttttgtgctgtttatgtgacgcggtttgcttctttgctgtcactttctttgaagacttaagcccattggcaagatcaaacgagctcagatcatctagcacatcatcaataccaggaacttgctcgttttctgtctcatctcctactgcagagtcatcggactctgaaccttcgagaatatcctccagttcttgagtgtcttctatgtccggttcatcagcttggggcattccaggtggcattgcataatgtggcagcttacctccaatgtaatctttcagaatcagccttgcagctttcgtttcatccggtagtccactcgaggcaacatagccacgagaagcacagtaactttttaagagctctgcagcatgaggcgggcgggactgacgctcataggttttgggtttaggaagagaaatgttgtacacactctcaattacacggcgagggaccttgtcagccaccacctgaatagcttcacggtgctccgtcatccggtcaatcggaagtacaccagaagcaatcatttcatatcttgagcttgagaacgaagggaagactaaaccagggcaatcgcatagcataagctcatcagagatgatcaaagtctggaaatgctttgtttttcctggggtagaggtgacacctgttcgcttctgacccaccaatgcattgattgtagaactctttccaacatttgggtacccaacaaatccaaccacggcttgatcacgttgatattcaccagtccatgactgtgatgatacggatgctgctctagaattccttactttgacaatctcttgagcctcaaattgcaaacgactcaacagctcgtctctgccatatatcataatgtctggatcatctgtcttctgcaagttatcgggttgtctccattgctctttcaagactttaccttctagggtagctgtagcagctatggctgaccagaaaacaaacagaatgttgttaaggcggaaatattctgcccatttctccctacaagtcaaaagttaaaccaatcggttagaatacaaaaaaggttggaggcaaagtattaaggcacaagaggattggctaacctgacatcagtaggtaaaagatccgccttgttcactagaagcattatttttttatgctcatcaatttcttgagcatatgcctgtgtcacgatgaatcttcaagtaaatatgaatcaggaatacggtgccaagtggagtttcaagctgggagaaaatgcattacctcaagatcagggcagcggtaaaacagtggatctctagcatcaactaccataacaatctgaaaaaaggacaagtataagtaatcaaaactgttttgcaattaactaaaacgcagaaattgaacttattgagaaggttaatacattattgacaaagacttaccaaatcactgcgttcaagcactctccaaagctgtctccagatgtcaaggttcttttcgaatggagtcaacactagcttttcattttcctcaaggctaaaccaaaatacaggagaacatgtaagcatgcgtaacacctataaacttcccaatccaaaagattgattagggtcaaacatctataaactctagtttggtttatatacgaaagatatcttgaacacaactcgattctataaaagttccggctttagcaaacactatcctacatgagataaacttatacacagcacattataccaataacaacaaaactgagattttcagtttccacaacaaaactgggaaatggatacaagaatgagatcttctcagcttatcccatttcgaccttctcagtacgatacaaaggtagaatatttgctcaaaatacatgcattttatcaactacagcatcagcttttaccatttgaacaaaactatgtgacagaagctgcctaaattttatcatcaccaacaaacaatttggtgacagatattgatttgtttataacacaccgaagaagtaaaattaagatggggtagaacaaaaaaagctaacctcacaagcatccggcgccaatttagaaaagcttgtttttcattagcatcaagttcttccactgacatttcaggtgtccacggaggtctggagatgaagatagacaaaaaaaaacgttgtcttagagctatgatagaaaggaagaataaagctaaagagaataaaaaccacataccttcgaggtacttgaagactactggcgtgtaaagcctcctctatcttctgttgctctctccattcttcagctgctataacacttgagctagaatttgtgtctctgtttcaccaaaaacattagagaaacagcacaccataagaacatcaagaggacatgtaattgttctttaatctcattaccatattaaatttatacaaacagaaccacaaatacctaatcaatcaaaggacaataaaaaagaggaatttagaagaagagaagcatacagattgatagacaaaggtgtggaggagctgtgattaatggtgtaaagacgctctgcctcctcagcttgctcaatgatggcgtcgatgtcactgacctcagtcacagattcgagaactttcttctgtagattcttgtagtacttgcctttgtctttggattcttgtatcatatggttgtggtgcttcacgagtgatcgccccaacgacgtcttttcgctcttccccatctctctgttctcaagtaaaccctaaaagtctctaaacccttaaaaatggattcgcggcgcgtttgttatgttgcttcaaaagtgttagggtaaagaaaacgtcagccgccgactacactcgctgcacggagaagctaaatttttttatcaaagcgattttttttactttttattttcttcaaagtaaatactaatttttagttaaacttaagggaaattaaaaatcataacataacccatcattagactcagaggacacgaaggctttagaaaacaaaaggaacaacctttttcccggcaaatgcttccgatg

SEQ ID NO: 9949 - DNA, 3000 bp, Unknown
  misc_feature (1)..( 3000): cDNA_ID_3034887_gDNA_ID_2096295_Annot_ID_195522 3000 nt of promoter + ATG
ggcgccggatgcttgtgaggttagctttttttgttctaccccatcttaattttacttcttcggtgtgttataaacaaatcaatatctgtcaccaaattgtttgttggtgatgataaaatttaggcagcttctgtcacatagttttgttcaaatggtaaaagctgatgctgtagttgataaaatgcatgtattttgagcaaatattctacctttgtatcgtactgagaaggtcgaaatgggataagctgagaagatctcattcttgtatccatttcccagttttgttgtggaaactgaaaatctcagttttgttgttattggtataatgtgctgtgtataagtttatctcatgtaggatagtgtttgctaaagccggaacttttatagaatcgagttgtgttcaagatatctttcgtatataaaccaaactagagtttatagatgtttgaccctaatcaatcttttggattgggaagtttataggtgttacgcatgcttacatgttctcctgtattttggtttagccttgaggaaaatgaaaagctagtgttgactccattcgaaaagaaccttgacatctggagacagctttggagagtgcttgaacgcagtgatttggtaagtctttgtcaataatgtattaaccttctcaataagttcaatttctgcgttttagttaattgcaaaacagttttgattacttatacttgtccttttttcagattgttatggtagttgatgctagagatccactgttttaccgctgccctgatcttgaggtaatgcattttctcccagcttgaaactccacttggcaccgtattcctgattcatatttacttgaagattcatcgtgacacaggcatatgctcaagaaattgatgagcataaaaaaataatgcttctagtgaacaaggcggatcttttacctactgatgtcaggttagccaatcctcttgtgccttaatactttgcctccaaccttttttgtattctaaccgattggtttaacttttgacttgtagggagaaatgggcagaatatttccgccttaacaacattctgtttgttttctggtcagccatagctgctacagctaccctagaaggtaaagtcttgaaagagcaatggagacaacccgataacttgcagaagacagatgatccagacattatgatatatggcagagacgagctgttgagtcgtttgcaatttgaggctcaagagattgtcaaagtaaggaattctagagcagcatccgtatcatcacagtcatggactggtgaatatcaacgtgatcaagccgtggttggatttgttgggtacccaaatgttggaaagagttctacaatcaatgcattggtgggtcagaagcgaacaggtgtcacctctaccccaggaaaaacaaagcatttccagactttgatcatctctgatgagcttatgctatgcgattgccctggtttagtcttcccttcgttctcaagctcaagatatgaaatgattgcttctggtgtacttccgattgaccggatgacggagcaccgtgaagctattcaggtggtggctgacaaggtccctcgccgtgtaattgagagtgtgtacaacatttctcttcctaaacccaaaacctatgagcgtcagtcccgcccgcctcatgctgcagagctcttaaaaagttactgtgcttctcgtggctatgttgcctcgagtggactaccggatgaaacgaaagctgcaaggctgattctgaaagattacattggaggtaagctgccacattatgcaatgccacctggaatgccccaagctgatgaaccggacatagaagacactcaagaactggaggatattctcgaaggttcagagtccgatgactctgcagtaggagatgagacagaaaacgagcaagttcctggtattgatgatgtgctagatgatctgagctcgtttgatcttgccaatgggcttaagtcttcaaagaaagtgacagcaaagaagcaaaccgcgtcacataaacagcacaaaaagccacagaggaaaaaggatcggacttggagggttcaaaacacagaagatggagatggaatgccttctgttaaagttttccagaaaccagctaacacaggtcctcttacgatgcggtgattatcaaattgtagtccatccaagcaaagatggcaaccgaagctacttaaagtttttttttttttttcaaaaaatgtaacagcagttgaacctgtcgcagtagttctcgagtgtcttgatgtttttgtttttatgattaaagtcttattttggggaaaagtagaaaaaagtgacaactcaaatctggtggaaaatggagaattgtttttgccagttggagatacctatcgctttgttttgagaatataatagccataaatagagttttcatgtaactttaaacttttttcttatttggggtttggactcttttgaacaataaatagtgataatgaaactttaaagtttaaacatttcaataaccaattcttgttgctaaatatgtcattaccaaatcgatataaaaccaaagtaaatagaaatgttatagtgatttcggttcgtacgtttggcaatgagttggttcgtgtctctcgttccattggcgtccttgagggttaagactgattaggctttgttgtacttatggagagaggagagagaaacttgagataaacaaaaaaaaaaaattggtttttcctaaatgtgtgaatgtctgcttgctgcatcgttttattaatttccctggaaaataactgtttctgtttgttgtaaacaagcctcgaggatctgaccggtgaatgaaagaaaactagggtttcgattttaccggaatattctccgagagagcggcaagtttaacatcagatatgttgttgatcacagattcgcttttctgcgaattttagctggatcggtctttctttagttagttttttttttttgttttcccacttttgaagctttttgata

SEQ ID NO: 9950 - DNA, 3000 bp, Unknown
  misc_feature (1)..( 3000): cDNA_ID_3034879_gDNA_ID_2096295_Annot_ID_195524 3000 nt of promoter + ATG
taggcatccatggaaacaatatgttgccgttggtgcattactccggcagtgtgcctacaggattgatgccttgaattcatacatcaactcagattttcaggtaatcgctaactttttgttaggtgtttgcatatttaattaaaacaaaatttgaaaatacataaaagaagaaaaactaatatgctattatgctataactatttttgatctaatacaatatatatatctatatatatatatatatatatatttacatgtcgcaaatgcaaacacaaaaataacatcaggttgaaattcttagtctgttaatttgtttatatagtttttttttttagtgtaaacatgtatagtagtatatgtttctggttaacgtgtttctaaccctttgtttatttcttattttttctattagatcccagtggacataaaaaagaaattagaaacaccattaagaagaatgagctcggaatcgggaaactcaatgaaagaaatgtccatttcactaaaacaaatgataaaatcatcttcttctgatatccatgtctcaaactcacaagctgcatgcaaatctctttctactttacttaaatcaggcatcttgaacgatgttgagcctcttcaaatgatctcattgatgacgactgtctccatgctcatagatattgttaacttaaccgaaaagatctcggaatctgtacacgagcttgcatccgctgcaagatttaagaacaagatgaggccgaccgtgctatacgagaagtcggattccggaagcattggtcgtgccatgccaatagattctcatgaagatcatcatgttgtcacagttttacatgacgttgataatgatagatcaaacaatgttgatgattcacgtggagggagttcacaggactcatgtcatcatgttgccataaagattgttgatgataactcaaaccatgaaaaacatgaagatggtgaaatacatgtacatacattaagtaatgggcatcttcagtaagtaattcaactcattatttgaggagcagtcttttgtacccgcaagattatagagacgagaccatcggtatataacatattcgggtatttcattcagatttgaagtttgttacaaatactattgtcgcctttgatcatttttgaactattggtcacacatttaataaagtcttggtcttcgttttcctttgcgttactcttttaaagatttttatatccaactgatcaaaaaatttaaaaatagcatggttttatttttggattatggtgttttagagagctaacctcagtaaataaaagaacatagaccggcgccagataaagacaagtccggcaaaaactctagattgttattttctatgaatataattaattttattccaaacatatatcgtatgaaaaaaaaaatcatttatcattggaggaggcggtgatcaggcgcagtgagaggaggagtcggttaacaaaagtggtcttggccagtgccaaagcgtcattgtaatcgctttcaattctcaaaaccaatacggtaatatgcacaactaatagaatgtttcaggtgacaaattttctcactaaagtcaaactttcatacttgccgatgaagtaacaaacatacagtacgttcaatacattaaggatatatataagaaacaaaagctggaaattgtgtgaatttagctaggttagattatagtataataaagttgccttgtacgattggggtaatggctaatggattccgtacgttgatgccaacttggtattggcaaggctgagtgtgactcggtgcaaaaagcaccagctgctatctaattccgcgttctaaccaatactacattttcatttattattactttttacaatccataaatctctctgctgtggagggttgatataagatccgaaacttctttgttgataaaaaaaaatctaacaatcttccaagttcaaatctcactcaggaaatatgaatgactgaatatttaattagatattatcgaaattgtgattcttgttgacaaaaaaaaacaaatctcataagaagtggtgatgtcagttttcgttgagagaaagagaatttaagtggatatgttcaatatacaaaaaaaaaaaaaaaaaaaaaattggacaatttggtcgaatattaataaggtaggtctaaatattagtgaaagtaacatatgtgaatgcccaaaacggacggatattttactagctttgaaacaaagaaacgatgggacaaaatgacaaattgaatgtctatttatttggagtttgtcatgattattcatgtcaaaaacgcaaactattattaatagactgtttattttattattttcttacactcgccgaaaatgttcagaatcggaaataattagatgtaacgttcctgtaaaaaatgcattgagttttaattttattttattttcttaaagataaaaaatttctgttaaatgaaaaatgaaagagttgtgaattacgtttttttttttaatattgattataaatgtacagctagcaactttaaaaatggttagaaaacaaatgttggatagcactattttatttttacataaagaaaatcttttggacgtggaattttaatagaaatttcggaaataaattaagagaacaatactaaagtatgctactaatagccgcttttaaatatcggataaatcagcaccaaagtagaacttggttacgtaagtactagtctctgcctctaattaaaaatactctgtctccagttaattatatttctcattttcaatttctttaaccctcaacgtacgatatgaagtacaacgcaccactgatttttttcttaaaataataaaataacatttcacgagtcccgaacaggactctctagtctcataatgctcattataaataacgacgatccatccgctcaaaacaacaagtcatctttctacttcttcctctctttctgaaacttatcagaaagttgagtgataatcaaagggtgta

SEQ ID NO: 9951 - DNA, 3000 bp, Unknown
  misc_feature (1)..( 3000): cDNA_ID_3034865_gDNA_ID_2096295_Annot_ID_195528 3000 nt of promoter + ATG
ttgtcaggaattggcatgccgaaaatccatgaatatgaggtttaattttattttcctacaactagacgtcaatgacgtacatacagtcacggagattctcacatgttttctaactgtagattttaatttcttgtgtcatccaggtagagattggtaagtatttgtacgagaaactgtcttccctgcctgatgtgcggatatacggtcccagaccttctgaaagtgttcacaggggtgctctttgttccttcaatgtggagggcttgcacccaactgatttggcaacctttcttgatcagcaggtttgttataattgggagctatctgtcccatcacatactggttttctcttatcttgaacgtattcttttaatatgaggtagtacctcaagtaggataagggcactacctaccacctctttctcttcttagtgggtaatgttaccacttagtggtcaaagcgaatctcagatgcctaccttaggatatcttgtggtagcagcctataattgaggttgatcttctttattccaagatttaggtgaaatctcatgtgtgaacacgagcctggactctgttgataactaggttaaaacaaaacccgtagatcatctaggttacatgatacctgtccaagtacttgatccgagtgattctcatacattagtaatgagttcagctgtaagaagttttaactgatctagattaaacaaattcatcttgatcgttctaatgttaaccgtccacctcaaacccctactttactctctcatcagaatatccatagtgggatgaaaactgaaaacgaatattgtatgttgcagcacggagttgcaataaggtcaggacaccactgcgcacagccactccaccggtatcttggagtgaatgcaagtgcacgcgccagcctctacttttacaacacaaaggatgacgttgacgccttcatcgttgcgctggcagacactgtgagcttcttcaactctttcaaataagtggaacaccttcctgctggatctctcggctggtttgtatggtatattgcttcagaggctacttatttaaatctgctttatatgatcaatgggagtggattttgtttcttcaagtccgaagggcaatttgtgttgtagttagcaatttgtatgaaaaaatagaccgacagtagtcatgaacaatttcaggcctctacttgatcatatttgtacgaatacacacgaaagcaaatgcttcgttgttaatttgtaagtttcataaaaaacaaactcaacatgaagaaaagttactaatatgaatcatcaaaggaaaggtttcgatatgtgctcagttggggtagtcgtcattccctgattcttttgagaccatttggtttctttgaattcattttctcaaatcttcaaaacattcatgaggcatgttgtattattaagacaaggcaaacatgttccaagagtgagaatagaaaaagtttcaaaggcgaaagtctggaaatggatggataatcagcatttcatgttgttcccaagaagatactctggacgagaaagcagcacacgtcttcgttttagattcaggacctttattgagacttacgttcccaccattccatgaacttaacttgggctgccattgtgtccaacttgtagagttgcagtgtgtggttggcgacctcttgcccaaaggtccaaccaaaaacacctcctcctaagaaggacaatgcagcacctgtcgcaccagcagtagtttagaggtgtcaaaagttggaagaaaaataaacagcaatttagtattgagaaacaatgtaagcgccatgagaactgcataaactttcaaaccagtttccaagtattatcaatataggacataaaggtctaattgactcccaaataatcccattatccctgaattgcaagctttgtgtcttcgtttgaagaaacaagtgaggtttataaagagcaaatagttattcacagagagagaaatgtcattaccatgtggactcctggagtatttccaggcaaaagcagcagtagagacagctccaagtgcagctccggtaacaccaaacgtcacagcttccctagccgttttcagctggataggatgaccacaaatacacaatgagtaccaaacgtaagatcttcagtaagaataccaaataccaaaccaacagttcagtttttgctaggttttttatgccatccgacgacgatgcagtgggcttagtcctcttgtatctgtgcttccaaggactaaagccagaaaaacctagcctagtggaactttattatatcaaaaagtaacagaaactttccaatggaaaatcaaatgaagaagaaaaaaataaaccgatgacagcagagtaaaatcgagtaccagccgagtcatagataatggaccaacaatatctatagattccaaaacacagagcgagagaaagatagaaggaaattacggtgggtccatgaacgggatcggaggcaatgaattcctcgacgtcggaggaagaccaagaaggaagaggcgcgtcgcgtttggtgaatctggtgtaattttcgaaaaatgataacctatcactccagaaatccttcaatccattccaatttttcccaacaaatgactccgaatctcccatctttctcagatcgattaatcaatctccttctcactgcaaactttttctctgattgaagacgattattatttgcagaataaataaaactggtctaccgaaaaaatggaaggtcgatccggttcacccggttttcatgtttctttttttaatttaataccgggttgccatcagattagccgatttgcaattgctccttgacttttcttaatatatcgaaaaagagcagcaattgagaaaagttttaaattttcaaccagaaaagtgtactctactgcaactacttcttctctacttctctaccttaaaacttccccaaccattttcttcttcaaatcatcatcatcatccctcgtacaaagaaaatg

SEQ ID NO: 9952 - DNA, 3000 bp, Unknown
  misc_feature (1)..( 3000): cDNA_ID_3034862_gDNA_ID_2096295_Annot_ID_195530 3000 nt of promoter + ATG
aaaaagaaaacacaacaacaatggctcatttgaatccccttgtaactatatctgctactaccaccttgcttgcttgcaaccaccaccaccaccaccaccatttcatgtcctcctcctcacaaaagtttcggccaccaaccctttgtatatttctttttttggttcttcttctttttttattcgatggagatttattatatttatttaatctttctatttatttttttgcttaatgggaaatgggtgtcgtgtatcattacgaattctgatgttatgtaacccatgtgccagcggaagacaaaggcatcaactctctcttatcctaaatttattgtactttgttgagttttgtagttgtttccagctaaacaagcacgtggacgatccttgtaatgaatttgtatgaatgtgatgccttgtacctgtaaatttgattgaaaggctatttaataaacacgaacaaccaaaacggtttgtccaaacaataaagccatcgcatattggaatccggaaagtaaaatctaaaagcaagattgagtaactaaatccggaaagagacgatgaagtgaaagcaaaagaaaatactacttgatagaaaaagggctccattggatcccattggagaggagattacacttatttaaaagaaaatatttgcgtgaaatgaaagcaaatgatgataaagacagtttttgagaacataaataaagttaagatagtgcatgaatattggaagttgctaggtcattctccatggataatgaattataaaatgattcttgacttgaccacaaataaatagtcccttcttttggagtttcttgactagcgaaaatgtggtcaaacatgatagacaattagacatcacatcctgaatggaatccataatctcttgagttaacatgttaatgcatccttaagctttttagcacagtttctatgtcaactcatgtaatgatcattttgattaaccatgttgttgacgatgttctcatcatttcctttcttgtgataatgatttgacgacctttaaattggttaaaattgttgttgacagtattttttgtatataattaatgtaaaagtaaaatccccgtgattggaaattctagaatatgtcaaattatttaagttctttgatacaatacaccttttaaaaacttttgtaataaaagtggttggaaaaaacaatttagataacggatgaacattaattaatcaactttatagatttgtcatttgtgactacaaatattgtagatacaatgaattagtccatcaaatcagattagtatgtataacctaataatctgtagtggagtcggtattgtgtcacctactagatttatatccgtcataatgcatattgttgttgatacaattagatcataaaaacaaaaattgcagttctacgttgaagcatctcggagaacaagtgatactcaactttgagacatcaaaatccgaagtaaaaaactgaacataatacaaactatattcgataaaaaaaggataactcatgatctttactctttttttctttattccctcactgctttaaaatttccactaatactcttttgtttctttgattattattatcctagttatgaaaaagaagaaaacagaatgcatatacatacaaatatgaaagaatatttgattaaaatgatgcaaagagccccataaagacaaaacaaaacaaactagtttttgttgtggaagaagaactttttttactatgaacctctttatcatcatcagcactttcaatatctttaggatgatcgaaattggccgggacgatggtatcaggagcaacttcatcatcaccggactgagaggattcgctaggtccaggtgcagcagcatcatctggtgatgatgaatctggtaagccctgaccatgtgttacattgatcataaaatgctgaccgaatttacattgttcgccatcatagtttcccgagaagaaataattggaaccttctttaacaagaggaacacttattgagacgggaacaggagatgttgctgaaggatttgcagccgaccactctgttgtatcattgttttcattgttgtcgtaatcacaatctttgtatgttttgaaatcatatgtctgaaccaccgaatggttgctatctgtgttgaatactacatattgaaaacaaaacaaacgatataacattttgctaagttattgtagtaacgaaaatggggttgaagaaaaaaatcttactgaggaaatcacccaaagaaaaggatttggaatcggcccatttctgataattagcagagggtctctcttgaatatcgaaccatcccgtggactctcccacagtgtagttcttgtacgcatcagctgataaactcagaagcataaggcacatgatgagtaacacattgacacaagatgaacaagaaggcgacataattcttcttactctcttgtccgtttttcttgattataaattgtgattcgttgattgatctttctttgtaataaagaaaggcataagaaactgtacataaagtaataatgagctcgtcattgactgcatataaaaccaagacatgtgtgagtgtgacatgtggacaattcttggggatgcgaaggaacatgagacgatacgaagtggtcggtccaatcaaatgacaacgcctctttgctcttccccatgtgatctctcactctcacaccttacttttgctgtcttcgcttccctacgtatcattacttctttcataaatatctgtcaactgcctttttctactaaatggaggatattttagataacgtgttttgtagtgtttcaaagtcggttgaaccggtatttaaccggtttgattggaccttaaaaaccaagggcccatttaatggagtaaaaggcctaattcggcccatatctttagatgaaattaatcttttgaccgccgcctgtggtcgaacttgtgactttgaagactcactcttgttcattcgtcttctccaccatg

SEQ ID NO: 9953 - DNA, 3000 bp, Unknown
  misc_feature (1)..( 3000): cDNA_ID_2990070_gDNA_ID_2096295_Annot_ID_195529 3000 nt of promoter + ATG
aagaatgtattagttagttagatataattagttatatataaattgccaaatcaagtccataacaaattagaaacgtggatacacagctttatccttaattttgtttttgttttaattagcttacatgattgcatgtgacacataaatgacaaaaaacaaatttgacataaaccatactttaaaaataataaaattatgtattaatgatgttattggtttaactgatttttattttagaagtctacactttaaagtttaatccctacctccaacatctttaatcctaacaatcctatgaaattgtatatgcttaagcagttaaccctaacactgtgtacccttacgctaatttaaaagattctatgaaagtacttctaattttatattatttttagcaatagaatttcataacattaatttctatgctttataaacatgtttaattctagatatggtataactatatttcttaaattgttaccctaaagtcgtataaatgtgtgtaaaaaaaaaagtcgtataaatggtgaacaattaaattgcaaagatgaaagaacacaaattattcacgtggccagcccagcccagtaattgatagatttgttgtttaagcccagcaattagtatcgaatcgaaccaatattctgaaccgaatacatcatggttacacgaccgacacctataaggttgtcttctttgatgatcaaacctaaagtccgaaaaagaaaaaaaagaaaaaaaacccgaaaaactttagctcattgaaagactaattgactaaagacatggcaaaaaggatactgtatttagtaattgtttgtgtttgaattgattacgtcaaatatagtttgataacgagatgcatattgcaatcccatagccaaactagaaatatacaaatttgaatagaaaaagaaacgaactaaggcaagtcatatacggcaatgaaggacatcaatacacttcccatccaaagcttcccatctttctcctccacttcactcactgccttcaccactttccctttactatcttccaacacctttagcactttcccttcttcactgtacttcacagctacagcatgaggccaaccacctacctgcagcaagtactgaaacttcactgatatcggcagcttcagaaagaacttcctcaccctcgggtaatgcgccatcaagtgtgtgaatatgtttctgtggcagtgcaccgccacccagaaatctccatctttgtttgtgcggatgttgtctgggaacccatgtaatagagctaccacttctgacgttccagctttctcccctttcaaccagtatttccgtaatctgaacaacaacaacaaaaaatgacttagattctgttcacagtattggagtttgtttctagcagaatcattgaaacgatatggaaacaacatgctaatcgttccattttagcttcaatcagaaatgctgattgcagaagttatgccaagtatatatacagacaatgatgtggaagtcagagaggaattaagatgaaggactcaccttccaatagatccttcacaaaagatgaaaaaggagccgtctttgccgagggataatccgttaggaaactggagatttctcacgagagtggtagtctcctttgtttttggattgtatttcaacaccctcccactgtcttcccccgagacaatcaaaagcataaatttcctacaaatagcgcaatcaacatactcaaacaaaagtagtaactagacatcggaagctcattgcaacttcttgtagatcctcaaaagataaacagaattcaacatttaaggctctgaagttatagccgcagtcaaaattttcaatttatgtgcctatgacagatcatttcaatcaatataacatgagttccaaaaagcaacactttatgcaagccactgatcaggagagttagtaaagatcaaaactttaaaaccttacataccttcgttggaagaaagagctgctatcagtaaagtaaacattgccttcatcatcaatgtcaagatcattggtaaatctcaaaggcacaccatcagcctcgtttgtaacagaagttgctaaacctccttccggaccaactttcattatccccaaatacgcatctgcaatgtacaaatccccatttttcttgtcgaatcgaagacctaaaggccgaccacagatatcttcatcctttaagtaatccaaaagcgatggcttaggatcacatagctctgacctaataaaacatcaaagttgagaactttactggaaacgaaatggtcacaaagactcgattgcaatcacaagactcaccgattgttcgaagtatatgcgaaatctgtccaacgagtgccattccaaaagagaattcgaccgtcggcgactccggtataaggaccacgaccttgcggatcgaaagcaatgctctcgggaccttgaacctcgttaagaaacctgatctctgaattctgcaacagattctggcggtctctctcctttggaagtgacgataacggaggcatgtcaatcttgtaagttttgaaatccgggaacttggaaatggagctgtgactgaagggatcgatagcgcaatagatggcaaagacgagaaagatcttcgcgagtatgctcatggccattttctttgtacgagggatgatgatgatgatttgaagaagaaaatggttggggaagttttaaggtagagaagtagagaagaagtagttgcagtagagtacacttttctggttgaaaatttaaaacttttctcaattgctgctctttttcgatatattaagaaaagtcaaggagcaattgcaaatcggctaatctgatggcaacccggtattaaattaaaaaaagaaacatgaaaaccgggtgaaccggatcgaccttccattttttcggtagaccagttttatttattctgcaaataataatcgtcttcaatcagagaaaaagtttgcagtgagaaggagattgattaatcgatctgagaaag

SEQ ID NO: 9954 - DNA, 3000 bp, Unknown
  misc_feature (1)..( 3000): cDNA_ID_1827487_gDNA_ID_2096295_Annot_ID_195536 3000 nt of promoter + ATG
gaagtccacttgataacttccttgtatttgtaggcgaagtatttagaagctttagcctctgagacacttctcacaagcgatgaagcagtagttgtagcagcagcagctgaagcagtcgcccttgcaagagctgctgtcaaagttgccaaagatgcaacattatttaagaacagtaacaacacgaacctattaacttcgtcaacggccgacaaacgctccaagtgggaccagtttactgagaaggaacgtgctggcatattggggcatctagcggtttcggacaatggaattgtgagtgataaaatcactgcatctgcctctaacaaagagtctattggtgatttagaatcagaaaaacaagaagaagttgagcttctggaggagcaaccttcagtgagtttagctgtgagatctacacgtcaaactgaaaggaaagctcggagggcaaaagggttagagaaaactgcatcaggtattccgtctgtgaagactggttcgagccctaaaaagaaacgtcttgttgcgcaggaagttgatcataatgatcctttgcgttatctaagaatgacaacaagcagttccaagcttctcactgtcagagaagaacatgagctgtcggcaggaatacaggtttgtcaccaatattccaaattctaaactaaccacctccctttttctacatcgcgtctgagacatcacaaacactcacccttcgtaggactctagattctaggcgaaaatgatgtctacaaaatctttagatgtttgagaatgacgaaattagtggttagtggtagaatccaagatcgcttctttgtgctttctagccaatatatcatctgaagttctgtgaaagctaattatcctgacatgcttgtcttaaattgaattgtcaccttttttgttcttattatgtagccattcaccaactgtttagtgttgatagaaaatgggaaacgtatgttcagctttggaagaatcaacattacttgtgaacgttatttcttcttctctgtaatttttcttatctttctttattgtggttttgatcacacactttggtttctttgtttaggaccttctgaagttagaaagacttcaaacagagcttacagagcgtagtggacgtcagccaacctttgcgcagtgggcttctgctgctggagtcgatcagaaatcattaaggcaacgtatacatcatggcacactatgcaaagacaaaatgatcaaaagcaacattcgactcgttatttcgattgcaaagaattatcaaggagctgggatgaacctccaagatcttgtccaggtttgagcttttctctccttatttttttttgtaataacacatctgtaagcagtagtgatgaaagtgatagatattgaacaccttgctcaaatattttcgaaatggtcacaggaagggtgcagagggcttgtgaggggagcagagaagtttgatgctacaaagggttttaaattttcgacttacgcgcattggtggatcaagcaagctgtgcggaagtctctctctgatcagtccagaatgataagattgcctgtaagttatcccaaatgtttttcttttttacttgtttaaacaaaaggtttgggattatgcctcaaattttaagggatgattggcagtttcacatggtggaagcaacatatagggtgaaagaggcacgaaagcaactgtacagtgaaaccggtaagcacccaaagaacgaagaaattgcagaggcaacagggctgtcgatgaagagactcatggcggttctactctctcctaaacctccgaggtcgctagaccagaaaatcggaatgaatcaaaacctcaaaccttcggttggtaccacctgacacaacacacaccatacaacatagacttgttgtttgtctaaaaatagtaaataatatgagatgggtttgtaatgtaaaaatatgcaggaagtgatagcagatccagaagcagtaacgtcagaagatatactgataaaggaattcatgaggcaggacttggacaaagtgttggactcgttgggtacaagggagaaacaagtgatacgttggagatttgggatggaggatgggagaatgaagacgttgcaagagataggagagatgatgggagtgagcagggagagagtaagacagatagagtcatctgcattcaggaaactaaagaacaagaagagaaacaaccatttgcagcaatacttggttgcacaatcataattctttttctcttcaatatggaatgttttgtgcatagaacccacccacctgagcataacaagcagtaaattattactttttagcatttacgattcttgtgacaactactaaatcgaaaaaattattttaaaactaaaaagaaattgttgtctgaaaaacataagtgatatacaacaataaataaatatctcttataagaatttgggaaaaaaaaaatccaaagattagagatatttgggtggagaaaacaaccgcctaggacaaaaaaaaattgtgggtagaggaggaggaggaggctttgttcacacaccacacgacggaacattctcttccgagtcttatccaaagcaaaatcatattttgcttaaatatcttcttctccggctctgtctctgtctctcttcttcccgcggagctttcagtttttgtttggtaacatcgtttctctttctcactaactctgatatcatattatcaatttttccttttcaacacccaaaatcacaatctttcagctttattctgtttttccttgcttgagaattgtgttcgattcatgtctacgaactgaaatcacaaattttgccaacgttttatgattcctggttccgtatttttttttttgtaatcaatagttagctcatttcgaataatcaaactcaattttattgttcatgatttgttatctgggataaaagagagtaatgtgctaattatgtatactcaggtattgcttggtgtggggaagattagatagtgtgaaga

SEQ ID NO: 9955 - DNA, 3000 bp, Unknown
  misc_feature (1)..( 3000): cDNA_ID_3075670_gDNA_ID_2096295_Annot_ID_195535 3000 nt of promoter + ATG
gatattatgtaagaaggcagatgcagtgattaaaaatgcgggtgttgtgttgtttaggatgagattctggaagttgctgggaagatatacaaggcagggatgtctcttctagtgattgataccgagaacaagtttgtttcaactggttttgcaaaggagatcgcaagagttgctcaaggttgggtctctgcaattgattttgagatatttttttttgtcatttcaaagcagaaaataatcacattgtgttttgattgttcttcttcctcacaggaaaatattattacttgccaaatgcttcggatgctgtaatctcggccaccactagggatgcactatctgatctgaagaattcttgacctcattttgtctgcaataccttgattctggatcaaagtgtatattctaattgtgcaacacatcagtcactaaacatgaaattataagaaatgaaattttgttttaacatactcttaaaatgaatttccgattttattccgttggtcggtaattgacgactgatatgatgatgcattagtgacagatcactgtttgtattaagaagaagacgatgaagctgcaatattcacaattgatacaagaattaagatagtcggtataatcccggtttgcagtaaaccctactctaatgtctaaaccacatcacaacatcaaatagatggttcggtggtttagttacggcagatacaccggcctgaaccgaataaaagaaaactggacttggctcctggagaagagaagactgtacagctttctgaattccgaaagaaatgaaatctctctgcttcatttctacagctccattgattcgttcgcctccatttctcgatctttctccaacaagcttgaatcgatttacccttaaaattccagcttctctctatgtatctcatccaacaagatgcagcatttcaaacccgtcgagctctgaggaattgttgaattccaatggtggaatgtctagggcatcgattagtgtcttcggaggtacttcccttaacaatctcaagatgcaagtgggcagtccaatttctctgcattcaatcaatccattagcaaagctgagtttgagtgatcaggcatttcttctcttggccttcatcgtttgcacggtaaaaggagtttgctcgtgttttgttttgaccatttttgttgattcattgataaaggtttagactttttgatctcttttgatggtcctctgttacagacttcagtggcttttacaagtcttgtgattacagctattcctacacttgtggtaagtctccacatttgtctcaattcttttgcttcagctatatcctaaccgcatcactaattttaaaactgtttcaagtcattaccaatgaatcaacaaaaatggtcaaaacagatgaacaaagaattgattatttgtaatatgctatcaacaatctgacatataccttttcaaactcagtgagaaactatgacatgatctatgttatgagtgtagtcctctgcttgaaatttctactccacacttgctgttagcaccaactgaaaggataaaaggctaatgagtaacacatgagtacagtcactaacagataaaagattgaactataattgttgaattccacacttgactcttctttatatgtgtcctagatttggttcagctatatgatcatttctatttttggatttggctgaattcaacaaagcttggtggaatttttcagtttaatatgtctgtctctttgttcttggattgatatctattcagtatgtcctatatttacttacacaccttcaggccatgggtagagctgcaacttcctttgcaaagttagctgacacagctcgcaaagaactccctagtacattggcagcggtaaggctctctggcatggaaataagcgatcttactcttgaattgagcgatttaaggttatctctaaagctcttttcttttcttttcttttctggcttttgatcatctcaactctaaaaaaagtgaatgctacatgtttcaaagcaattagttcacaattagttcttccgagtcaccttgttatctgtccggaataagaaactttttctaaatcattattatgcgatgcaaatggtttcagccaagatataacagatgggataaacaaatcagctaaagcggttcaagcagctgaagctggaatcaaacagattggaacacttgcacagcagcaaactctctgtaagcttcttctaagcttttggataatctgtaataaaagctgctgttcatggtggcaacagttcacactggtaaaaaaaaagcggaaaatatgatctgatgatgaacttgatcttgtgattcagcaatgattgaagagagagcaaatttaccagaaatatcactacaacctgttgtggctggtgcagccgaaaagacttctcacgcaatcggcagtgcaaccaagagactaatgaacattataaccggaggaaacaaggatgaagattagacatttagaagttttcacttggagtgtgtttttggtccgtctttgtttgaagggattagtacaaggtaaagtccatttagggaaacagagaatctatgaacaagaagactttttagtaaaatttggtatatttatgaaacctgaagtgtaactgtgtaagacacaaaagaagaaataataacagccacagccattttaagatgtacaacagcagataaaatagtttacataacaagccgacaaaaaaaaaaaactattctattcttacatatgggttgactttgcaaagatggtaatagtgtgattgggattgggccaaagttaataggcccaaaagaagtggaaaattagaagtaatgaatcctttgattgagatagaagctttatcctcttcttcgtcttcatcatccgcgcatcaccagttttttctctctctctacaaatcttcttaacggcctttcatcaatggtcagcagacttagctttcgaatataggctaagaacgagc

SEQ ID NO: 9956 - DNA, 3000 bp, Unknown
  misc_feature (1)..( 3000): cDNA_ID_3034847_gDNA_ID_2096295_Annot_ID_195534 3000 nt of promoter + ATG
tataatttgtagttaactacaaaaatggcagaagaggaaaaggacttccataaacgaagtaaacaaacactaaaaatcttcaacacaccacacacacacacaaaaaaaaaaaaaaaaaaaaaactttttgttattgcgtaaattgtaagataatccagttcggccactgagactattatgtaaatcgtcattgtattcaaagattcaacatttgccaaaagaggtttccgaagttttggtagaaaccaatttgatgcaggtaagaaaaaaaacaccagatctgaaatacaaaacaacaaagaacagaagcgagaaaaagctaaagccggtaaaaccagatcgtagaaacgcaaaagaaaaacaaaaacttgtattagaaaaaatgtaattcaaacatcattcttcaatcaaacatcaatcagatgaagaatccgaaccagcgacgaagagattcagaaattacacaaagagaagaagaacccaaaaaaaacaaaaaaatgaaagagagagagatcttaccaatatgaagagagcagatgagaaatttgttgaggaaatacaaaaaaaacgtaacgccaaatttcaacaaaagtctccaaaccctaaattctcctttcttcggcagcctctctgtctctcacgatctctccttcgccttttctttaaaactttttttttgtttttttttgtatttctctttctcaaatattttttacaattcagtttttttgcgattctcaatactttttggggtaaacaatagtaaaaaaaaaatacaaatttttggtgttgagagaaaaatagggcgagaaaattctataaggtgggtgagagagagatatatgtggatatgagagtcggtttttatataattgcctctcctcttcttctccatagtttcaaaacaacaacgacacatttttatttcattttctatatttcccattttgcccttttcttgttacaagattggttaacctaattaggcaaatttattcaatttttattcatatggactacaaattttctttgaatttcatttagcacgcaaaacttgatttgcgcttccgtggaaatttcctttggacttggaaatttttttttgaaaaatcgaaccaatcaaatttgtaattggagagaaaaagacacatatccgaatgtgtgagcaagcttgttgtcaatactggcaccgacgctgtgtaataataagtgggcagagacaacaaggtacatgtgcatcaatctctatcttacttgtatttattaagactaacgaaaactacatttaaactaaacctaactctagctttttctcatttttttagtttaaccataaaactttgtcgaacgtgtaaagtcagccttcggatttatatatttattccaccgaaaacataatttaaattaacttcttcaaaattttacgtaccaagtaatctatacaaataatgttattatacaaaagcaacgtgttatttttttcaaatcgaaacaatatagccaatccaaatgtttaggagagtaggtagatacacttcccaacaagaacatcacaatatataattaccagtttggagagatcaattttgccttcagctatcattttggtagcgtataagaggctaacaagaagatatgataagctattgaggaccaggttcatggaattgactatgattgccaatctttacaaggaccatatccgtctcttgtttgctccatattcgtggttaaatttgacgatcataataaatgtgagacacatgcatgcatgagatgatggcaagcgtagatcaataaaagtttgacaacacatatactagggacatagataactaccacgatcgagagacgtgtgggagatgcacactcgcacaagcatgcttagcatacgtcttgaaggagacggtataaaactttgtagagcatgtgatctactagtacttccgaagagccatatggagaaggagacttaagcgaaacgtacttacaattctaaaatgagccatgagagcagcctattagtcctcgcatacgctacaagaggagcctgggaccaataatagtataaccattgagaaagtacagtagacatcgactagatcacaataaactttattttatgttgactatttcgtcattgatgatattacttatctttgattattattaaatctctcatttggacgctttaatttgcttggagacgagtcaagaattaagtcaggagaaacagcagcgttgataattctgttttcattttgaatatatatcgtgtttaatttggtttacattaaaaagtcttaattaaacaaaaaagatgattcaaaacctttagttgcatttgcatatttatttttcatatacaaagaagtacagatgattatgccttttgaaaacctagttattacttattgcatagtttattttctgatcaagtaaaaaaagttatgaacacaattcttcttatgaatgactctcaaaattaaggatgttgccttggagatttataggagttagcctacttttcaccttgaggatcaattttatagtcaaagctaataatgtttgtggtctatattagttaccacttgtttactacatccaagcgattgaattcgcatttcccatactcttgacttaattaaaccttgagatttcatgatttattatgcaaaatttaatccttcgctatctatttgttcctaaaagatataaattgaataaaaacgtaactctccaattaataagaaaaacttctttaattatttttctaggttaattaataaatttataaaacaataaatatcatattagaaattcatactaataaattttgagacattttattgaaatcttaatgtggatagtgctgcaatcaggaaaggatgacgagacaaaagatagagaagcaaaagtaagctgataaggtttgatacagtagaaaatactatctcttaacttcttcttcttcttcttcttcttctcctatctttgaaa

SEQ ID NO: 9957 - DNA, 3000 bp, Unknown
  misc_feature (1)..( 3000): cDNA_ID_3034854_gDNA_ID_2096295_Annot_ID_195532 3000 nt of promoter + ATG
tatccacattaagatttcaataaaatgtctcaaaatttattagtatgaatttctaatatgatatttattgttttataaatttattaattaacctagaaaaataattaaagaagtttttcttattaattggagagttacgtttttattcaatttatatcttttaggaacaaatagatagcgaaggattaaattttgcataataaatcatgaaatctcaaggtttaattaagtcaagagtatgggaaatgcgaattcaatcgcttggatgtagtaaacaagtggtaactaatatagaccacaaacattattagctttgactataaaattgatcctcaaggtgaaaagtaggctaactcctataaatctccaaggcaacatccttaattttgagagtcattcataagaagaattgtgttcataactttttttacttgatcagaaaataaactatgcaataagtaataactaggttttcaaaaggcataatcatctgtacttctttgtatatgaaaaataaatatgcaaatgcaactaaaggttttgaatcatcttttttgtttaattaagactttttaatgtaaaccaaattaaacacgatatatattcaaaatgaaaacagaattatcaacgctgctgtttctcctgacttaattcttgactcgtctccaagcaaattaaagcgtccaaatgagagatttaataataatcaaagataagtaatatcatcaatgacgaaatagtcaacataaaataaagtttattgtgatctagtcgatgtctactgtactttctcaatggttatactattattggtcccaggctcctcttgtagcgtatgcgaggactaataggctgctctcatggctcattttagaattgtaagtacgtttcgcttaagtctccttctccatatggctcttcggaagtactagtagatcacatgctctacaaagttttataccgtctccttcaagacgtatgctaagcatgcttgtgcgagtgtgcatctcccacacgtctctcgatcgtggtagttatctatgtccctagtatatgtgttgtcaaacttttattgatctacgcttgccatcatctcatgcatgcatgtgtctcacatttattatgatcgtcaaatttaaccacgaatatggagcaaacaagagacggatatggtccttgtaaagattggcaatcatagtcaattccatgaacctggtcctcaatagcttatcatatcttcttgttagcctcttatacgctaccaaaatgatagctgaaggcaaaattgatctctccaaactggtaattatatattgtgatgttcttgttgggaagtgtatctacctactctcctaaacatttggattggctatattgtttcgatttgaaaaaaataacacgttgcttttgtataataacattatttgtatagattacttggtacgtaaaattttgaagaagttaatttaaattatgttttcggtggaataaatatataaatccgaaggctgactttacacgttcgacaaagttttatggttaaactaaaaaaatgagaaaaagctagagttaggtttagtttaaatgtagttttcgttagtcttaataaatacaagtaagatagagattgatgcacatgtaccttgttgtctctgcccacttattattacacagcgtcggtgccagtattgacaacaagcttgctcacacattcggatatgtgtctttttctctccaattacaaatttgattggttcgatttttcaaaaaaaaatttccaagtccaaaggaaatttccacggaagcgcaaatcaagttttgcgtgctaaatgaaattcaaagaaaatttgtagtccatatgaataaaaattgaataaatttgcctaattaggttaaccaatcttgtaacaagaaaagggcaaaatgggaaatatagaaaatgaaataaaaatgtgtcgttgttgttttgaaactatggagaagaagaggagaggcaattatataaaaaccgactctcatatccacatatatctctctctcacccaccttatagaattttctcgccctatttttctctcaacaccaaaaatttgtattttttttttactattgtttaccccaaaaagtattgagaatcgcaaaaaaactgaattgtaaaaaatatttgagaaagagaaatacaaaaaaaaacaaaaaaaaagttttaaagaaaaggcgaaggagagatcgtgagagacagagaggctgccgaagaaaggagaatttagggtttggagacttttgttgaaatttggcgttacgttttttttgtatttcctcaacaaatttctcatctgctctcttcatattggtaagatctctctctctttcatttttttgttttttttgggttcttcttctctttgtgtaatttctgaatctcttcgtcgctggttcggattcttcatctgattgatgtttgattgaagaatgatgtttgaattacattttttctaatacaagtttttgtttttcttttgcgtttctacgatctggttttaccggctttagctttttctcgcttctgttctttgttgttttgtatttcagatctggtgttttttttcttacctgcatcaaattggtttctaccaaaacttcggaaacctcttttggcaaatgttgaatctttgaatacaatgacgatttacataatagtctcagtggccgaactggattatcttacaatttacgcaataacaaaaagttttttttttttttttttttttgtgtgtgtgtgtggtgtgttgaagatttttagtgtttgtttacttcgtttatggaagtccttttcctcttctgccatttttgtagttaactacaaattatacctactttaggaagatcctcctgctagtagctaaaagatgtagcatttattttattatcactcacttgagctaacttttttcgatctttatttggtggcagtgtctttgaacgcttcatctcctcgtcatg

SEQ ID NO: 9958 - DNA, 3000 bp, Unknown
  misc_feature (1)..( 3000): cDNA_ID_3034876_gDNA_ID_2096295_Annot_ID_195525 3000 nt of promoter + ATG
gctattctctctacagtgatactcacgacaatgccaatcttatttccaagcttgatttgattgtatctggaatatatttataaaatctctttctgcaaaattattattctgtcacaaaaaatttgggttcttctagtctaaacctaactagttgttaaaaaaaaactcaaaaaacaaagtcggatcgtgtgaataagttttcatacaaaagatagtttgatcaacaagtattttgatatatacggtttgacctgattgatttggatctgtgttccaaaaggtcacaagacaacgaggaataacataaactcattcatacgtcccattttcaagttcctctgagaaatggaacaaattcggtgtgatatgttttgattgactccacagcagcaacagcattagcttcttcttcgggataataagcgatcggatcagatagatgcggttctggaatcttcagcaccccttcgagcatggcgtggaggcagtaagctgcatatgttacatgatacccgccttcttgcaccataagcaaccttccatggctgtgctcctctgcaactcccctcattatctgcccaatccttctgtatccattcattgtcaggctttgtctcccgtttggatcaaactgcagatccgacagtaaatagtggttatccgtcagtccatgacattcaaatcccctcacaaactagacaatcagcatccctagcaaatgtttgaaaccaaactaatggatttaagccggagaactttaagagagagtttcctgtgaaccagaaaattcattaacttccatgggccaaaaagtgaacagctctgttagtaacatctgtgctgaatataaattcactaagctcgacaaggggaccactaggtagcgtaataagaaccataaaaaccatatcttcctttattcctctctgaataagaatgcaaactgaagcaaagaatccaaagatataatcttatggtgaattctcgagcaccctagactcttccaatgcaaaaccaatacccaaatccctagacaacccattcctcctttggtcatcttccatttatactgattcgtttatcttttgctgactgaatattagagagatgacatgactaatgcaacagctgcactcttctaactacttatgcagacttatcacagcagagccatattggagcagcatacataagcgatttacttgtaaccaaaacaataattgcgaacaaaaccctgagtaagtgctcagtcagatagtctacacgtatttgggcaaagaaagaacttacagcgctagagtcttgaccaacaacgagaacaaccatatcgggtccaaaccttctaactgcaggaaccaccagctcattcatggcatattcatatccccggtcacccgtgccattcggtaaagggacattcagattgtaacccaatcccacgtcttcaccaagttcatcaatcgaccctttctgcgggtgggacgatccccatgatccatggttcatatggagtgacaccgtaagaaccttatcagatgtataaaacccttcagctgtgccatttccataatgtacatcgatgtcaataaccgcaactcgggaacaagaacccgaattcaatgccagcttgacagcaagagcagcgttgttgaggaagcaatacccatcagcctgagtaggctgtgagtggtgacctggtgggcgtaccagagcatatgcaattttcccatggcaatcaagaatatgttgcattgctgaaagagttgttccagctgcaagaagagcagcttcccacgagcctgggctcatgaaagtacctgcggcaatttcacacctttctcctgatttatctgcctccactagcttctcaatgtactctgtacaaggatcacaatggattacatgagaaagcaataatcacaaatcaaagtcgaattttttaaggttaagatttgtcaaaactaccaaattcagaaacaggtttttataaaagttccttcttttctgcgaaccttagagcgatgtacctgaagtgtgaaacattagaagctccgaaacgattgctggaagaccggtaaaccaattgacatgaggagcgatgggaccgcgtcggagaatcgaaagcatgttcctgacgcgatcggcgttctccgggtgcttctccaatacgtcgaggaatccagggtcgtatccagtgtcgaagacgccttctacggcgtcgtgtcggagcattccttcgtgccagaagacgtctacgcgattggtaaccatcggagaagccggcgacgaagataggcttgagccgtcgtcggaggccaacggtggtgtaataatggaggatgctcacgcgcaacacacgtgttctctaaccattgagataacaaggggtataaatgtcttttccaaataaactcaaggattaagttaatttcggagaagagaaatttcgtgcttattgggcctggactgaacatgctgttaatgacatgttgtactgttttagattggagctttttggatttcgttatcccacatttaattattgtagaacctttattttttgactacaaaaaaaatatattcttcgctctcataaaataaagaaaatataattgaatttatttatgattcatattcgtataaaaaacatttggctacaagtatcatgtacaaaacattcggctagatttagttagaacaagatttgttataaatcataatggcaatataagagattagagcaagaaacatagcaattattatttgagaccagttttgccccatttcttacgatgataaacgactttgaatattcttcagtccactccacactgcgacgacgacttgagaaaaacaacatagagaaaaaaagaaaaatccaaaccttaggggcaatattgtaactaaaccaaacgacactgagtcaacattctgctttgctataaaggcccaagcacaatttttcagtaaccatgatgaagtgagaaattctgaaaaatg

SEQ ID NO: 9959 - DNA, 3000 bp, Unknown
  misc_feature (1)..( 3000): cDNA_ID_3034883_gDNA_ID_2096295_Annot_ID_195523 3000 nt of promoter + ATG
tcccttcagaaaaccaataatctctttcttttctcacaatatttattctgtgcaatgaggtgctgctattgttagaccaagaatatatgatatttttttcttgaaaccaaggaatatagtctagtttgctcccaataatttaccatatgaagaagtgttaattgcttttgcttttcatttttacctgttctgttactcaccaaaacttggcaattgtagcctgaccgtgtcatggagttctgcaacaacaacgatcttcagttgattgtacgagcacacgaatgcgtaatggatggatttgagcgttttgctcaggggcatttgataacgctcttttctgctacaaactattgtggtatgtacatggactcactaagtgccataaccggattttgatattttgatggggttatttctgttttcttaatagtttttatactaaatctcaggtactgcaaacaatgctggggctatcttggtactagggagagatcttgtagtggtacctaagctcattcatccgttacctccagcactttcatcgcctgaaacttcaccagaaagacatatagaagacacatggatgcaggttcatattgcttcatttcattactgaatcttagtccatagttattgacctgaaacattggtacttagcgtagtatgcacttttcgcaggagctgaacgcaaataggccagcgacgccaacccgaggacgcccacaaaattcaaatgaccgaggaggttctctggcttggatgtgaggcagataaagaggcactcgtgcacatacataccgctccaaaaaacacttgtaacatctgcctcctggtgttcctcatgtgtacagaaaaagatgagccatagacgagaaacgatgaggcttgaagatatcagggggtgtgtaaattaagatgttaaaaggttagagaagtcagttttggtggtggtttagtagtgatttgtagagtttatttgtccgggctttagtcctctcgttcatttttattcagtctgctgtttcttctttttttttatcatgtcatatctttcttttttcctcttcaattgtctccgttgttttcgtttgtggtatagttttttggcgagtgggtatgaattcttagaatggtaatggttgattaggtggaggatggtctgatgtcgtggggggggggggcttttgtgtattttaattttattgtcagttcatactttgtaacatttgtgttgattatatgatacgaaaaattttcctggctccttttggttgtctaagctagaccaaaaaagaagagaaaagaaagaacttatgcccttgaaagcgactttgagttggttcatggatcctcgggtgatggactcagtcactcgatttgcttgagattcataaatttatacatgtgctttgtggccttcaaatgaaacactggtgatgtcgatatgatgtgatttggcatcgatgctgtcattggctccaaaaaatcatgttttagcggtgagaacaaaaaaaacaaaatttttggaggatcagatggttgaagttaaaactcgagggtattagatggttaaattttaatattgttttggatataggatggtgattaaaaaaaaaaagttttgattagtgttggtgcaggaattagcatctccgataataccaatttaaaccaaggaataacgtgaataaaatcgagaattcgattgaaccggggtatcccggctagtctgttaatgggcctaagtcatgagctcgccagaagatttaggtcgacagtcaagatcgccataggcggcttctcaggtcgtgtaaagggaaaacttccatttaagagaagaggatctcatgaagaatagaagtaatgaagatttagacctaagataattagaagtttatcatattttggtatgttggacccattgtataaatagggggggggggtcaagccctctaagaggatcatgaccaacctaagacaagagactactattacagagcaaactctagctttttattcaagcaactttgttcttctcctttgattattcgtgagctaagagagaagtgaatttgtctaaatcccttagtacaaattaattgtttgattagagaatcaacaattagttttgaacctgatgatgtattggtcaaacttgtaatcatcgcatctgagtttgaggtcattttttccaactgttgttatacatataaaatatccaaagaataaaagccttgtacgatcggggtattggggtccgtaccaacttgttgacattttttatgtttttggtgtgtggcagactagattgaaacaataatgactaagcaactcagtaagagtcctttttttggactcagtaaaagagtccaagttttctttgaacaacaaaattttgttgaggtgtgtatgcacttggttgggaacaaacaagtagatggcaaagatcattcgaacattggagcccaagtgttgagggcactaatcttgtcgattacagaaacgaaattatttggggaagctgcaagaaaaagtttagttaaatcttttatattccttaatcaaaatgtatcatgcatacactatatacaattcactaaagtatgatagttaaatacctaattaatatcatgatcaactcctaccggttcatctaactaatccagctcagcataaaaaccctcacgcgtcgctccaattaaggggagggcttaactagtgcccaacttactgggctaggttcgactccgtttttttattacattttccttttccatttctttaagactttaaccctgaaatctcgaagtgcaacgcaccactaattttttataaatattaacataacatttcatgagtcctaaacaagagtctctcttggtctttataaatacatcgatccatgtacataaaaacaacaagtcatcttttctttctatctgaaagtaatcagagaatcagaaaacacttgagagagctgagtgaccatcaaaaggtgtt

SEQ ID NO: 9960 - DNA, 3000 bp, Unknown
  misc_feature (1)..( 3000): cDNA_ID_3034891_gDNA_ID_2096295_Annot_ID_195521 3000 nt of promoter + ATG
gactcaaatactgatacaattttacaaaaaggcattcattactagtaagacctacaaaattgttccacaagttgaggagacaagttagaaataccaaacaactttagacaagtatttccacttcgacttagagctcctctcaatcgtgccttttcttcctcatgcatcctcaacagcctaagaatctctcgcacacgagggaaaaatgcaccaggacgaacacaataaggtttaagcacagtaagaagtgcctctgcgtcaacttcaaacctatcaaacttttgtctccgtaaaacaggttctcctgagaaaaatttacgagaaacataatggtcaagcccttccgcgagatttctccacaagtccaagaagtctttcgggttcatgtttagatgaagaacacacagatgccttcttaaattgtccaatgcttctgcgacaccctgagacactgttaaattgctggagctggtaatgacgtcttcgtcccatgaaactgcattgttgtggaagtggtcgctgcaaagattgtcaaattggtggagaaaaactgttataatctccataagccaattggtttccaactcaacaaggcttttcagttcttccccaaaaaagcagccttggcaggaaacttcaggttttctatcaactttgacactggtttcggcagcccacatctctacaaaaaccaaatcatcactccattctcgtagttttgattcaagataccgagcagcattaaccggtccacatgcttgtatcagtgtatcttcagacaaaccataatgagagagatcagtctttttgaactccaataacagaattttgaatatacaccagagaaatctggtggcagtagctcttataaattggatccttggtagaatggccggtagagatagaccatggtctatcaacctccaagtcctattaagaaaagagtctgctactaatggcgctttataatcttctcttgtagatagaacatactttgcagactgtgagttggattcattaccaagtctagttctttcactatcaattacccaagctttctcattcttaatatcctctttactttttctataagcatcctttagctcaatcttcccccaggttttgagccactcaggtttcttacaaaacagtcccattactgatataccttgagaaaacgctgtcgaagagccttcataagatagacaagtatctgtattcacaaaagactgcattcgcttatcaaatgtaaccatctgatcgacaagatggaaccacgatgaaataccttcagatttcatgtgcttctccttgtacatatctataagcccaggaaaaacttttttctctaagaaaccagatagcatttggaccatcgctgaaacccaagcttctttagcactacagcttactaacatagccctatcaatcaaaggctgtaagaaatcgtcaaccccatcagcaaagtctcttgtaactttatagacaagttcaaaaataaactcaggttgctcagcccattttagaaaatgatactccatccgagatgcaaccggtttaactagttcatcggtcgcccaaagtccatcattatcagtttctttggtcatattaagcttctttcgtttttccttctgcgtattatgttgctgtaaaccacagaggagtagaaagctttgggaataagactcttttttatctccttgcatcaagagtagaggattagggatactatcaacctctccatgctcgactttggatgttgcaagttttggtggccagccaagagatgagagaaaagctcggtgatctgcgataatctgtggacgaagaacagacagacttttatctactctactatcaacagaatctacaaggcgacgccaccgtgagtgatgccttgtaacatcaccaagtatttcttcaatctcattcatggtcttaatagcatgactgaatctctcttgcttcaatgcaagatcctgcacgtacaaataaaaagttttaatctttcatatttaccaatcacaactccatatagtacttaacttgtggattgaaaaagctttacttgaagcgtacttcctttgcgtttacttatcggatgaaacacagaatcttcaagatcgccaacaagactttccaactttaaggcagtcactgaaaaattgaatctttcttagctagctcttgatgataatgttcaagaatcaaaaatcgagtcaaactcaccgaaatatttacgccgattctgtatacgacacaattcctctacgacttgctgtaactcccaattcgtttgctttccgacagaatccgtagctacaatgaaaaattggagacaataagaaaactcaatatctttacgtcaccaaaaataaaacacgagggtttggtaacttacggagacagaggaggctctccaggttcaatctcaaatcttcgagtgaaactttagcggaaagtgaggttgagatccaggaaacggcgtgcttcgtgagatccgtccggagatggagaagacggtcgtttagatcagaacagtcgtggtttaaattggacgtcagagtcgaagcgcggaggagcagatcttggaggtctacgaaattaccgtcaataaagcctagtgcgagaccgggaagggtggccgggtttggcaagacgaacgacagtggaagtggatgttccatcggaagcatttgccgggaaaaaggttgttccttttgttttctaaagccttcgtgtcctctgagtctaatgatgggttatgttatgatttttaatttcccttaagtttaactaaaaattagtatttactttgaagaaaataaaaagtaaaaaaaatcgctttgataaaaaaatttagcttctccgtgcagcgagtgtagtcggcggctgacgttttctttaccctaacacttttgaagcaacataacaaacgcgccgcgaatccatttttaagggtttagagacttttagggtttacttgagaacagagag

SEQ ID NO: 9961 - DNA, 3000 bp, Unknown
  misc_feature (1)..( 3000): cDNA_ID_3034899_gDNA_ID_2096295_Annot_ID_195518 3000 nt of promoter + ATG
attgatagggctatgttagtaagctgtagtgctaaagaagcttgggtttcagcgatggtccaaatgctatctggtttcttagagaaaaaagtttttcctgggcttatagatatgtacaaggagaagcacatgaaatctgaaggtatttcatcgtggttccatcttgtcgatcagatggttacatttgataagcgaatgcagtcttttgtgaatacagatacttgtctatcttatgaaggctcttcgacagcgttttctcaaggtatatcagtaatgggactgttttgtaagaaacctgagtggctcaaaacctgggggaagattgagctaaaggatgcttatagaaaaagtaaagaggatattaagaatgagaaagcttgggtaattgatagtgaaagaactagacttggtaatgaatccaactcacagtctgcaaagtatgttctatctacaagagaagattataaagcgccattagtagcagactcttttcttaataggacttggaggttgatagaccatggtctatctctaccggccattctaccaaggatccaatttataagagctactgccaccagatttctctggtgtatattcaaaattctgttattggagttcaaaaagactgatctctctcattatggtttgtctgaagatacactgatacaagcatgtggaccggttaatgctgctcggtatcttgaatcaaaactacgagaatggagtgatgatttggtttttgtagagatgtgggctgccgaaaccagtgtcaaagttgatagaaaacctgaagtttcctgccaaggctgcttttttggggaagaactgaaaagccttgttgagttggaaaccaattggcttatggagattataacagtttttctccaccaatttgacaatctttgcagcgaccacttccacaacaatgcagtttcatgggacgaagacgtcattaccagctccagcaatttaacagtgtctcagggtgtcgcagaagcattggacaatttaagaaggcatctgtgtgttcttcatctaaacatgaacccgaaagacttcttggacttgtggagaaatctcgcggaagggcttgaccattatgtttctcgtaaatttttctcaggagaacctgttttacggagacaaaagtttgataggtttgaagttgacgcagaggcacttcttactgtgcttaaaccttattgtgttcgtcctggtgcatttttccctcgtgtgcgagagattcttaggctgttgaggatgcatgaggaagaaaaggcacgattgagaggagctctaagtcgaagtggaaatacttgtctaaagttgtttggtatttctaacttgtctcctcaacttgtggaacaattttgtaggtcttactagtaatgaatgcctttttgtaaaattgtatcagtatttgagtccatgatcaagaagatgagaagtgcagcagaaattggataaattgaaaactagcaatggtgtgttaaaaatgatacaaccttgcttttgattccgtagaagtacatacccatgactctaaagatcatcttcaataaacaaaaaaaggattaatctggtctggtgaaactaaaagaagaatagataagttaagtgaagtgaagaatcaagagaactcttggatcaagggctcatagaagagtctgtatgcgtccatgacttctaaataccacatggcttcacgatctgggctcaccgacaggtcaaccatcttatgaacctggtttcagtttaaaacaacaatgacaagtttcagtaatcaaagcattgcatgtaaatgcagatgatactttgactcgaacatcacaagagaagatgaatcttaatcactagtgattacaagcatcttcatgccacacctagatatatcatcacaagatttttactaacacattcaaactcaaaacctcttatggaacttaagctccttagtcacctaagcttgtgtcagcctgatctagtgatcataacatctaacattctcacttaactctttaatgtgccaattggcataataaaccaatttgactagtctgcaactctagcgaaactaaaatcacattggagtgatccaatgtgcatatcaaagacctaaagttttcaaattaaccttaagtagaggtatctgcccagtacggacttggtagacaccaacaaccatcacgtacattcctgatttccattgacggagggcaaaatcgttggtgagaccgagctccaaaagaccggttccgtcatcaagtaccagacaattatcgccgcctccaccggagaaggggaccaaaacgccctgcaacgcaagacttgaagtcatcgaaacaggaattaacaatttagctatagacaatgagaggatgatagattgggaacctgtaaccaagcacgttgaaaaagtacaccgcctagggaggcggcgttctgagaaggcgtcggtttagcgtcccggagctgagaacaaagcatcttcaccgccgctaagctgtagtccattttacccgccgatccgactcggctgatcaatttcacaaatgcctttacctcatcgattaccggattaaaccgaaccgaacaaatggtatcggtacagtaatttgattttgatttttggcagatattgggagagggaatattgtgtttgaaaaaaaaaaaatggaattcatggtgttttggctttttgactaattaaaatcattaacatgcaaactaaaagatgtaaaaatctttataaaatacaaacaaaaaaaataaacaaattttgagacaaaaaataaatctggaatcaatcttatccaagaaatagacccacaatatcaaagaaaataatgaggtgtcacaaagctattgattgataacacatcctcgaaatctctctctttgtccacagaataaaaatctatttcttgtgtttgtgttgtatttacttaaaaaaataaaggagatcagtttgggagaaagcagcaaagaagaaaaatg

SEQ ID NO: 9962 - DNA, 3000 bp, Unknown
  misc_feature (1)..( 3000): cDNA_ID_3034909_gDNA_ID_2096295_Annot_ID_195515 3000 nt of promoter + ATG
cttacgactctgaatgacaaaagacagatcaatcattaggtagggaagcaaacatcaaattatgtaatcgaagattgattgagactaacccattggctgagctcaatgttgaattcatagaaagtgacatgagcggctgtgatgaggatttcctcgatgtatggatcgatccgctggagaactgtgagattgaggagcctcgtactgttttggtccagatttgggattatcttcccgttttgagacatcttttataaatcaaagatcagaattttgggaaatctggattcgattttaccctaatcggaagaaccctagaattctgatttaaggtagctgagagatttggggacggagacgaaaacgctaacttttggaacgcacttcgctattttgttgtctgctttggcaaaaaaaaatggtaatttagttataaaacttaagagaataaatatactgaccataaaagcattagagtttgcttcaaaaatacatcattagagcttgcttaagagattataaacaacattaaagaagaatatttattcaattggagtataatcagtgggttgatccttttaattcaaagatcaattactgcatagtcaatagaatttggttatggaacagtccacgaggacaattttcaaattgaaaacgaaaatttctgtttttattcacatctgtggattgattcgtctttgaaataagcacatctaattcaaagataatataagctacaaaatccattaaccaaaatcactgcagttatttcaaattatccaaaccaaaagctaaagaggagagtagcagcacaactcttacactgtttaacagatatgtctgaaacaaaaacgaaagggtaagaagaagtgtcttatagccaccaattttaagtaggtgaaagctcagaagattctttgtggtggtcccattgtgctcttgaggtacaaacacctgacattttgccagttcttcttcaatagcgagacgaggaagttgacgctcatctgcacattctgaaagatctgcttctcttccattgaaaggttaccaactgcaactcccatgcacagaaccttcttcagctggaacttcactgttgcctttgtttcattcacctttgactccaaggattcctggtggctcacaagagttgggaattttcctgtgtaaagtaaagcaaaggaatgttacttaagaatcatcaaagaagcataatctcacaggataaaggattggcattgtatcaaaaagacattgacaaaagaaatagactactaaaacctatccaaaatcaaaacggatgtaaagaagaacaatggaatattagctgtagccagaacttgcctgccttgttaagaccaggaccaagaagacgaggaatctgcttaatgacagactcagaggccaagaaagcatggtatttctttgcaagcttcttgacgagtttcttgttcttgttaagcttttttagagactcaacatccatgttttccaaccccatcttctcagcctacgaaaagatacaagatgaaataagcaaatatttaattatgcaagaaatgaagcctaaataaacaatgaccaaattccgaaaacatcatgcatctacattcagaagacatatacaacatcaaatgaaactaatagagccaccaaatgaaatgagcacaaaaccattatacaagaaacagagcacaaaatgatcaatttccatgaaaagatatatcacctcttcaacatgctgggcatctccgagcatgcagatcttcattttaggacgggggatatgtggtaacttgacagatccactgaaacgcttgtccttttgagggtcatagttcttcagaccgatctggagctcaatagtctcgacaaagttacgtttctttgcctcggatttccctgtgatagtagtgatggcttcacgaacggcctcactctgaagcttactgtattaacccacaaagaacagagttaagcaaattaactaaacaaacaaaaatacacaacattgacaacctcaacatgaacaacccacattatagacactaccatacaaaataatcttatcttaatacacctaaatttttatgaggcaagatttagatttgtcatccaaatttagaggccttagtaaagagcatttatgcaaaactgcagaacaacttcgtgtcaatcctagactattaacatcataaagctatcaataacgcacatccaaaaaacaatcacgattcagagacgtattgttctctaattaaacttattgcatatgacagaagaacaatacgtctctgaatcacgattcagagacgtattgttctctaattaaacagtgaatgtaagagatgcgtcaagtacctcattttgagcttgtctcaatttagctaagatctgatcctggaaacgaaacaaagacaacaaaaaaaagaatcaaaatctatagcagaagctcgagaaacaagaataatctaatgtacagtatacatataaacgaagaagaagaatcaagctagaagtgaagcagtcgttgaggcacaaacctgagtgacgagacagacagaagaaaccctaaatttctcgaaaggcgaagcctttatagtaaggataatgatcaaataaactaaacctaaatgaaattgggcctttagagataaggaaaagcccaaactgaaatcaaatgggcagctgaaaacgtgagaccaacaaaaccaaaaattacttgagcgatctaacatccgactaccgtcttggagacttttctgatgatggtctagtcaaaaccactcagttcggcttaagccattcaggtttgactttgtgcctctacgacgtcgtcttgtgactttgtgttctctctagctatggaatttttttcttcttgagctgttgttagattaagattttagaagatgactgcttctggagctcttcttgttgcacatattgattcgtttcttttggaacccagcagaagaagagtgccaattcatg

SEQ ID NO: 9963 - DNA, 3000 bp, Unknown
  misc_feature (1)..( 3000): cDNA_ID_3034905_gDNA_ID_2096295_Annot_ID_195516 3000 nt of promoter + ATG
ctttggaaattaagtgattattctaaaagcacaatcatgtttcacatttttcctactatgaccgtttcaatctatatactcaaggtaaatatgtatcaggtgatggattctcatcatacatagtcaatcaaatccacatgtttggatagaaaagaacgcagtacagtataagaatacgtacctccaccaccattcatgatcttcaccggatagctgaatgtaggtcaagataataccgacactcgaactcaagaagataagcacaatgaatgtaaaaagcattattccaggcgaggtatatatcttaaatccccacaagcttgcatagagttggtgccattcgagaacaactgcactgaaaggtacaaagcctccaagaaacacctgatacagctttctacggtaccaattctgtggtggaatttctcgggggtttcttttaacagcggatgggggttgaaactctaataatccaaatcggttacctaacactcctcccaacatgagaaatgggatattcaaaagagtgaaaatgagtatgatgatgactattgtgccaaaggggagtgcagctgttgccccataagtaattgccacagtgttgagaaccgaaagtattatgaagaaaggaaccggatagaggatcccagcaagacgaacactccttttctgaaaaaggcaataatgatttaacaaataaggttatacgaacaatgaatctttcgaggtcagaaaaagtagaaagcactagaaaagtcaatcacctgtttatttccctcgaattggctatggaaagaagtagatgtgtaaccagccactattgatgttagagtgtacatgatgacgagagaagtcaacagcattccacgattgtatgggtagagaaaaccggtgaaggccaatgcaaatagagcaataatcctgaagacgaaaaacaagttagaaacaacaataataagaagccaaatgttttttttttggtaagtagaagccaaatgtttatagataatagaagcttacaacagtaataatggaattatagataatagaagcttacaagattagcaactgagtaccagttcctaagattgcacaaagccagctgatgttccgaggacatcgaaatacatcactatgtacgagtttccaacctgcttcctttctctcttcttcatctccgatagagtaactgaaatgcataaaggagaagttaaactcaaaaatgtaaattttatcaccacatccgttaaactacgcaaaacaagaatagtctcctaagaaaaaattgtcaccttcttagttcattcttgagatggcgcatgaagagaaaagatataagtccaattaacaaaacaacaacagttatcgagttgagaaatgagaagaagtgaatcttctggctgataggatgaaacgacgcccgggagtacttattcattcttgtctcagagcgttctgaagtcagattccaagaaaccgagtatgtaaattgaacatcaatctcagtgttctcggatatatcaaccatataactcggatcactaaaactgttgatctcaataactttgtctgcattgtacagaacattgaactttaagtgactgaatatataatacttagtatgcttctccccttgaccaaaataatctccctctacttttccaacaaatccccacaaagggagatcatcgtagtacatttgaaagtagtaatcttgagcaataatatctctgaacctggcaatatcactcgatgttaatctcttccggcacaatacaaaatgagttttgtcctccctaaatttcagcttatataaagagctcattaaacgatcaccattaagaacttccccaagagtttcctgtttctcaatcacaggccctacaaaatataaaacaatcctaaatcaaaagaccgaaactagggacagatacaaatcctaatgtaaaactaaaaggacatcattgagaaacctaacctcgacggcagaacggcaaatcatagtattgataggtctcactgcaaacaaaacaaaacaccaaactttaaaatggggtttaagaaaatgtgccatctttgagttccatggtcaaactaaagctagaacaaaaacatatcttacacattctctaacttgatctcctcctcttagattactcacccgtcatcataagccaataaaaagcaaaatgcataagaattaccaaaagatttgaatttgagaacaacctcggattgtggagaggacccactttgttgacgaacaaagggacatgatcgccggcattataatggttcgacgagcctgatccgattccgatccagaaggtcaatgcaagtaggacttgtagtacagtaagcagaaattgcgccatgaattggcactcttcttctgctgggttccaaaagaaacgaatcaatatgtgcaacaagaagagctccagaagcagtcatcttctaaaatcttaatctaacaacagctcaagaagaaaaaaattccatagctagagagaacacaaagtcacaagacgacgtcgtagaggcacaaagtcaaacctgaatggcttaagccgaactgagtggttttgactagaccatcatcagaaaagtctccaagacggtagtcggatgttagatcgctcaagtaatttttggttttgttggtctcacgttttcagctgcccatttgatttcagtttgggcttttccttatctctaaaggcccaatttcatttaggtttagtttatttgatcattatccttactataaaggcttcgcctttcgagaaatttagggtttcttctgtctgtctcgtcactcaggtttgtgcctcaacgactgcttcacttctagcttgattcttcttcttcgtttatatgtatactgtacattagattattcttgtttctcgagcttctgctatagattttgattcttttttttgttgtctttgtttcgtttccaggatcagatcttagctaaattgagacaagctcaaa

SEQ ID NO: 9964 - DNA, 3000 bp, Unknown
  misc_feature (1)..( 3000): cDNA_ID_3033127_gDNA_ID_2096296_Annot_ID_195551 3000 nt of promoter + ATG
gatggattcgcctcagaattttgacccggttctaggctcaatggtatataagtcagaaccagcttcgctaaactcttctttgagtttgtattcagcggaagcacctgcagttcatccttggagcatctcgaacgaacaagatttcattaaattggtgagggagatggcggaaggtgatccgctattgatggaattggtataatgatgagtcaaaacaagagtaagtagctgcagcgatgaaaggatgtttagaaacagatttaccatttgtgttatacaaaaaaatgcttcattgattttttggttctcttgatgtaatttctccatgtaattcgtgatgtttataactttctcagttaaaatgttttgaagaagaaaggtcacttgcaatcgtgaataataatcactttgaactagacggtgttattgtgacgcttatactatgcgcattgctctgacggcaaaacattgtttcatccaacacacaacaaatggtcaacgaagtgaataaaggtttttttttttggaatacattttatccaagttaaattaatccgttttacttgaaataaaaaaaaatccgtttgaggttgagaaaagaaattaaatattcctatcccacttggagtactgagtcgagtaaccttatcttctatgacccaaaaataaataaaaaatcacgtcgttgtcatctgcttcgaaccggcaacatatattcaaagtatatggattattttgactgcatgagtaatgaaagcgaccaatttctaattttttcttttgagttgtcattgtattgccttcatgatgagttggctttgcttcttaatatatactactacttttcttataacgcatcatttattttccaaaaaataaacgatagtggtatttcgtaaaatattgatgaaacaactctgaggttagcaaaagtatataatattggttgaggttaattggtcggcaccggcgtagatatggtgaccgccatcattctgcacgtacgtaatattctacttcttttcatatgtctaaaaggaatatatagacacacactagaaatataacgataaataccaaataaatgagtatatatatatgagtatatatatatataaaaagatgatcaaaatatcgaataatgttgttccatatatatatgattgttttcaagatttcctatgattgtagtagatcccgtaaaaggattagtgtatttctatgatgatactgaaagttttcatatgcataaaaatgtatccttttaaaagagtttgtttgtgtctattcacatgcgaaatggacccaatgtcgtcgtcttgaaatgatgatgttattaaaattactaataatagtgtgcattttgttataatatgcttcaaactttttctttatccttttatgttcgatctttaacatcgtctgccaagttcaaactcagcatgttttttttttgtttttttcaaaaggctcagcatgatttcttaattgtgaatagtaagagaaaacatgaacaaaccaaattgttgaaactgactgttttcaccaatcacacatttatcatgtatgagaaattccaatattatgccatttaattactctgcaaaaattattgacaaattaaaattcactttatggttaaattaagtttatctctttggtgcattttgtatatatatatatattttataattaatctctctttctgccttaaaaataaatcacagtctcgctcgcgtctttcctcaaacctctctgtctcttcttcttcctcgcctcgtctacgcaataatactactcttatatcacaaaatctccacgaaaggtttgtatagagatgctataacatagcacacatctcctttcaataattcgctttttcctctctctcttctttttcatgttttcttgttcctgatctctctccattacttttttgcccatctctttgtcttcctcagcgctactcgaagatctgtcttttcaggtatgatgggtttgtttggatcagctgatttcgattcaaattaacgttttttggatctctctctggttgtttgtacttgaatctgagtttctcggtctgctttgtacttgctgatctctgctttaaaattgattgttttcttcttttggttctctgattatgtggtcatgcattcatcagcttactttagtatttctcaaaagtaaggctctatccgttgagaaacaagaacgaacaagttgatcatcggattattttctgacccgaaattcagttaaaagtaagctaagacagaattgaagtttgcgttgatctttaaaccaaaacaagtggtggattcgcgagtgtgtaccaatattactgcaaagttggatcactgtttcaagtcttggactttcattgtgaaaatggttgagatccacatggaattgaaggttatatgtagatcattctagagcctgactactgtagtttaattgattacttcgattatttggtggcgggagatgtttgccagaaggaaggtttgattcagtaatcatcgaggctgatcttataagagttatttgcatttcctctgcttctcatgtctagagatgtatattcacaacagagcttatagcgatacatgaaactccgagtgatagccaggctcagttttgaaccccttgaattactttccctgaggaaccattattatgaatgatttccagataataatgaattgtgggagagaactgagtactcagattgttgcagagttaatatattgctcaaacatgcttctacgtaatactgtatattctctcatatatgattgccatttagaaattcaattataaaagctagacctttgtgttgctctttagtgttttttaggctcctatccaagcgccagtttcttcttataaaacaatctcttaccttcttattttttatgcttgctctatgtttttggcaggtcgtttatgtattttctcttgaaggaagagattagccactaatacaaaatg

SEQ ID NO: 9965 - DNA, 3000 bp, Unknown
  misc_feature (1)..( 3000): cDNA_ID_1440840_gDNA_ID_2096296_Annot_ID_195560 3000 nt of promoter + ATG
cgatcataatcgaccaggactactgcgacaaggacaaatgcgaagaccaagtaattgattgatcgattaatatttttttcttcttcttactagacaagcattcactcggattgaaaatgtgaaatatgttatcaggagtcggcagtgcaagtgaaaaacgttgtgtacaagaacatatctggtacgagcgctacggatgtggcgataacgttgaattgcagcgagaagtatccatgtcaagggattgtgcttgagaacgtgaaaataaaaggaggaacagcttcttgcaaaaatgccaatgttaaaaatcaaggcaccgtttctcctaaatgctcttaactgagctaattatgtaatgcacatacacatatttacatagatatgcatatttatatatagcatgtatattgtactacatgcattgcttcttaatacatgtagtaaagatatatgcaaaaatagtcgaaagatttgtttacatataaaatcaccaatatttattgttattgtattttcatgaataaagtaataagattatttgtctaatattttgatttactagtactagaaatgaaaaggaatatgcacaatttcagcattatagtttggtaggcaaaatggagtgagaatagagtttcatagtatatactaaggttcttaattgtgcaaatagttgatacaagtcacatgggccaagtttgtaaatcttaaatcgaaatatgccttcttctttttttgcatgaaaatgctagtaatttataagtgtgtttttcaataagagatgctaaataccaaaattaacctagttttcagtgagcgcttgcattattgtggcctactttactctttagtccattcaataatcaatgtacttacataaaaatgttaaatcccataatcaaccaaaaggaccaaggcatttaagcgaacccttagagcatcctcaatggtagtttttaagcttaagtctcttaaacaaaattgaagtgtaagtatagataaataatatttttaattatgggtttcttaaatttggtgaaaccaagaccaattatctcttaactaagagacaatttgcctagatttcatcaaagttaagagacttatgaatatttaaatcatataaattttttattctttgttaagaaacttgtttaaaatcccccattaaggatgctcttatgttttggcctactttaccaaaagtccattgtattaaatgatttactttttacgtgaatgttcctcttattttgttgctataaggataaagtaaatcttggtgttttttttggttaatgccgttgctctttaatctcaacggatttatttaaagttaaaagttgacaaagaactttgcttttgttctttcttttgaaagacataaataatcataaaacatctgaggaaattccgaaatcaatgtccgtagactaaggtacataacaaaaaaaggaacatgttttcaaaattaatgatattacatagtgttaaagctaaaacgaagaatgtagttttacccttttttttacttcacttcttggtttgctcctcggctgctggcttactccgctcttccgccgttgctggcggtggcggcggtggaggtgaaggagcagcggatacggcaggaatgccggcatcgatgcagctacgacactttctctcgacccaaccttcgatgtcgtggtctccgccgtgagataagtggcgaccgccacaaagccgagcgaaaacgccggctaagacggataaaatggtgatgacggctaagacaacaacgagtgtttctattgaacggtggtccgagttgtgactcggctggtcttgggagggtgggtctatataaatggtggttggtgtggtgctgagttggtcatcgagccttgccgtggctccgaacatgagagagacagtgtgagaagaggaagagagagagtttcaggtgagcttgtgggagcaaaggtttaagacttgattgaagtagagagagtggggttaattatatcgactttaagaaaacaaattactttcattaaaaaaaaaatgttactcctaaaaaaacatctttataacattgaatactaatggtctcattgtaattatgatggtttctttttccttttctatccatgattctatgaacttaattggttcataggcattgaatttaaggatatttatgtatatgtatatatatgtgaaaaacatacaatgagaaaaataaaaaagttttttgcttttgtttttgacgtaaatagtaaaacagtttatatatgaaaaaattaaaattcgcaattcccaatttgtcctcagtgtgtgtaaaaaccaaaaaccacatgcatttggttaaaacgaagaggtgtttgttttgttgtccccattactccttcaatgaccaccaccctctctctctgccacttctactctcccctattgagtcctctttgactcaactaaccattacttactcttacaaaataaatgtgataatcatgactatatatatatatatatatatatataaattcatttttatctgtgaactcactagtaactaatttagatttttacgtggtcttgtctttttatttgtctgttgatttttggcaggtaatatcaatggtggggtttgttcatcttgttctatctctgtatcttcttatttttaaatatgtcaatgtgtcagctcaataatgtttatgcagtgaaaaaattatcaccccaaaaaaatatttttcaagaaacatgcaataactgacacagaaaaaaaaaacgaatcaagaaacagtcattacattacacgaatcatatgttgggccttagtttagtaatgggcttataaacccaataagctcattttagccagaaaaccctaactatctcttctcgtctggagatataagtagaatcattttttgccgccgtttctcgctaacacaccgaaaactgaatcaaatctcctagctcttctacgcaaaatcgagtgcatcgacaatg

SEQ ID NO: 9966 - DNA, 3000 bp, Unknown
  misc_feature (1)..( 3000): cDNA_ID_3034940_gDNA_ID_2096296_Annot_ID_195563 3000 nt of promoter + ATG
cttgagaagatgaggccaatgaaatgatattagagatgacttttcacaagaaataagtacatgttttcgtgaagacatatgagaaatgtcttaataaataaattcttaagacaaatgcctattttgtaattaactcaatttacacaaagccagatgtacaaataaaatcagaaactaaagtcccatttcgttttgtcctggtggtcgactttgtctttgtggtcacagttttgttttcaaaactgtacaatgttttaaataagtatataacggaaactatattggccataaacttttatcaatcccatatagctatagtagtcgagaagaaggaaaattcagacaaaaatataataaacgtcgttattggcttatcgcagcatcaaatctaaacaagtggactaaatatttgtgtcctctatattattgtcatcaagcataagacaccagtcatttgaatatttgatcaacagccttataaaaaataaaaatttacaatcatatctactcgatgagtttgcaactgttcatgatattgatatcctacaaatctgatacccacacaatgtagataaaaatagcatcactgaacatctgttaagtattataatcacaaacatacaagtgaaaagcaatttaactcaaatcattgctttttggtacgtctaataaatatccacctcgtagtagtctcatcgacacgggagacttacgtggctatttttgtattgttgccaaattttattgaaaatcaaacaaatcaatcatgcaaaaggcgtgaggttgaacggtacacgaaggatacacatgtccgatgtcgaccttgtagtaaataacaatatgatttggaaggacactatacatgattacagagttaacattatagtaatcaccgtaatttatcattgattaatcgtcgtattaaagttatatacatagagccaacaaaatttataatcgtatcacacacctaatgataaaagtccaaagtgaaaaaggaatctagacaaggacatggtgaactgatcaatgctaattaaggagatactttagatcttttaacatttgattaaacagagctgacgtggatgagacccacttgcgccgtttcattacaaaaattcacctacgtacgtactttttctttcgtttttctttaataactattttgggggttaaatgcaattattaggaatgactgaataagaggacatcattaaagagcttgattgttttttcttttttttcgttttatctgaatcaataatgaaaaagaaccaagtgttcgaaatgcaaaaaccaacaaaggaaaacgataaaagataatccgtaaaataagtaatgagtcgatatataccaaactctatcttcataatccgtaccgatcgacggacctacgtacagtatatattaggttcgatttaaaacattatcgtaccatgcattattatttattagtgtgtcgttccacgaattatccacaacaggaagtagcttttagtacgaaagagcagccaagtgaattaacccggctcaaaccggtcgtcgagtgttgaccacacacgtggttccagataagcggataaggatcgtgacatcaagtgtgagtatgtgttacggtccgtatcttagcgacgttgttatggtttgctccgcagaggagtcaaactaaaacacaacttgcataatactttctcaattaaagtaaagtaataaacatgtgtctgtttatatcgtgtgtttatagtattgggcggcttcgatagtcgttttgttgaaaagtttatatatattttgaagacggttctaagtactatgaaccatacattttaatggaattgcttcggtcctcggtccatatatacaatatcttcccgaatttatcaatttggtttttacaacatatttcataattatccggcataattacattatgcatgtaaagtttttataagatgtaatagcgcatatagaagaaaaacgacttgttcttttttgatagagaaaaaagaaaaaacgattaagttttgtaacgttctcgttaaagagtgagtatcttacatgactacataatttcatgcatgcattattttaagatattaaagagtaatagtctcgtcgaaattataacattaaaaagtggattattcgcctcgaagatatccgatgtcacaattttgtcttcttttagaacataatgttgaatccgagaatcgaggtatacctgaatatctcgccaatgtgataatgtgatataatcgagatacctgaatacccactgaaccagactcgtgaattgactttgtccttaagtttttcaaatttgatcagcaatacagatatgtcatttcctaggactataaaagatatcaaacaaatattaattaaagatatgtaaaacttatgggtgaatgatcggtgatgtatgtgtatatgttactggcattccataatacacgcgattcaactaggaaaaatatactataaaaagaggcgtatggaactacgttacacgtttcttgtacatttgagcttcgttacgatgatttgtatcaagagtgaaaaataactacgatttattatttacagtttcagaatatgatttgattcgatgtttaatatgatttcttgcacagctagaaacaaccataatttcaacatttcatattagcaattcctccgttaacagccgtttgacatttttaaagtaggctaaaatttgggtaaactgattttttaactaatattttttaattttatattaactacaactattattattattcgtttataaaaatatacgaaattcaatttaaatgctagtagtattttggtatttttaccaaaaaaaaaactgacacaatcgaaagaacgtagtaaaaaacaaagtatattttttttgtaatgagttgtctctgattcagcaataggagagcgacaaaaatatcacgattttttctagcaacttttccatctccacggaaaaagagtaataatatg

SEQ ID NO: 9967 - DNA, 3000 bp, Unknown
  misc_feature (1)..( 3000): cDNA_ID_3034936_gDNA_ID_2096296_Annot_ID_195566 3000 nt of promoter + ATG
ttaatttatttcacggtagaagatgttttggataaaaaatttaaatttttacgcaaaaattaaaattttagaattatatgactttttatattctacagtaattttttactgctcaaactctctttgacttaatactaaattatgttttcaatgtagaaattataaaaacaaaagaaattgattattttctaaaattttgtgcttttagataaaatatcttatatttagaaacagagggagtactataattttattgatttctcttgttttttatttgatttagtcttttcctttttcccataattttgtctttaatcctgaaaaggatttttgaaataagatgttattacgtataattaaaaaaaatgatttgatgaaaattctcaactgattatgagaccgcaccatttgaaaaaaaaatctcaactaattatgagactttaagatctactttaactattatgcaaatggaatatttgtgtttatcaaacaaacagatctaagtgaatataaaacatactcatacgaggattaatcaaagttatgacatggatatgatttctggataacaagccaaaagtggtaaaatttgaaagagatttagacgaataaaacaaaaaggttacagtgagtttaacgtaaagaagaggtcaatatttaattaggttacgccaaatgtgaaaatgagccaataatgtatagacaaggccatatgggattggttagaaacatgggatttgtccccaaaaattcaaacttgtattcaaacaagacatgattttgaccaaaacatcaatccttcaattttgaatactggaaagtggataaggacatcaattgggttttttgtcctcatctcttttgaacattctcttttgcgttattccaatactttgtacaaagacgagtccactatgaccatttgggtaaagaatattaagaatcaatgtataaaccatgctatatgaatttcatcggctatgaattgtcaactcagtttggtctgattcgagctttgaatatgaaggttatcttggtttaaagtattcaattcagtaaaagacaaaagctgaaccgatctaacatttctaaaaataaagcttaacgtcactaaaataattcttattcaaaaaaaatcttaaaggtttaactattattattttcttagtatatgaaatttctcaaataaatattaagagttagttatttacacccaaaaaaattccacagccaacaaatcgaccttacaatacaaaaatacacatgtctaaagagtgtgtggttggtaaaatattggaatccaaacttcaaggaggctcacgaaattatgatcttttggctaattcatttttgaattgaatcccactttttttttggaggttatatgtgtttgaactttcgaaatttgattccatataaagattcattagttttggactcaacaggaatcatgtatatatattggcataggtcctttatgtattagtttggttgtttcgcattttttatactacataggaaaaatagttcaagtcgtacgtcttgcaccaaatttaagacaaaaaaagttaggcctatataaatttgaaaaaccgtgataaaattttggtaactgttgaaaataaaaacatgttcagggatatatggcctaaaaccaaacttttcggatcatgaaaataagattacaggagatgaacaagaaaaaagttaagaacaaatatttcatagaaaacagaattgtataccaaagtgatccaggtaagatttcatttcagtttgatttattactgcctctctctttttttgtaaaccagaaagataatgtccaagactatttgatggatgtataagacaacgtcgtggactaggtcgtggtcttctcgtggatgctaacctaaacgtgtttccgacgtcactaccacatagtgtcaataattttgttagttttcgagtcgtttcctaaaatcaagcgtgcgaaccttttatttctacgttgacaagtttctaacaatcctaattgtttattggtaataccgtatacgtcaatttcactatacgatatgtcaaccaaaagaaaaacacatctagccgtatgacatgatcaaaattcaaaactacttgattgggctctaaagaaaatgtgatcattagtagcccacaacggcccatttttgtgtaatccattacggccttatattggcttgagcttctgctctctctcccttcccttgttacacacacaaactatcattggagcttgattcggagaataaatttaactcaacctctctcccttttttaagaaaaacaaaacaccaatttagggagtaatcagaaaatgacaagaaataatataattagcaatttagtaaaacgaatataatctgatatgcaatttagtacgtggcgtctgtccagtgggatttccgagcacattcatgaagctgacgtgagtagcttcttctcgcgggaatacactaccactcacttaatgccacgtagataatctttgctataacaagacacgtgtcaaaagcactatctccatttttcgtggtcggtcctattttgccgacacttccctcactacgatatatctatttttctatcttcatcagtattttctaattaaagatctctgacgatgctctcaaatattaaaaaaaattgtaccgaatttatgttacagtttcaaaaattaaaacaagcaattaaaataagcaatgtcttgctaaatatcttgaaagacacacgtcttcataaatgtagtggcacatttactggaccaacgtagctttcatggaaaagactttacacttgttataattttgcctctcatgtaaactaaacgttttaattcgttacacgaattattaaaacctaatcattgattatttattcctgaccttgtttcttctccttccatcacctaattataatcagacctaaactagctaattacaacactccactactactactactacaactcttctgatg

SEQ ID NO: 9968 - DNA, 3000 bp, Unknown
  misc_feature (1)..( 3000): cDNA_ID_2164645_gDNA_ID_2096296_Annot_ID_195572 3000 nt of promoter + ATG
catctacagtttctattttttattctttgttaaaaagatagatatatccagtaacatttagtagagtcgcttgatatttgatgggaatgtatttgcatggtatatgtatttgctctggagtcttttgtttcacgcagaaaatttatataaaatacacagagacaagttgtagatgttatattggtaaagggctgcttactagctttctgttttagttagtgttgttcaatttgattgggtttgtaagaagctaatagcattaaaattataagttatggagtactgttttaatgcttctctagctttctgctctttctcttattattagtgttttcctaattgattgggtcatcaggaaactaataatgataaaaatgatgcagtattattcagaaagttatcctcagggatgttcggacaccaagaatggtggtatagagacacagaagtttttcttaaactgtttatgccttttgttgggccgctttgagggaaagaaatttgagagcatactatcagagtatggaatgaagctcgtgcctattcttctacatcaggtatctttcgctattgtttattgaataggggagtgatgacacactttacctgaagttctcttgtagttatattggttgttctgctagttatgctagaattcatttcttatattggcttttatgacttcctgctcaactcataattttgttctgctcaattgattttatgattctaacatatcgtgagaaaattaatcttgaagggttatatatatacacccatgtgatcatcttagtgcttacattcttcctttgtattcgaagcttcgcagtaacaatgaagagatatcagaaggcgttgtggctatatttaaggcagtcttctttaaattacaatctcagtccggagacagcttctctgatacaatgtgcatggacgttgtgataccatcactgcttcaccttcttgatgaaagggatggcgcggccaaagctgttagtgtcctgctggcagactattgttccaagtatgtctattctctttccttttggtactaaatcatgttagtagctttctagttaccagtgacggtacctagtttgtctctgacttaaagaaacattcaccagaaatgcaggtaatagctgtctcagtgaaattctacaacgccttgcttctggaactactgtgcaaaggctgaattctttggatgtgatatcagaagtaatccttatgtcaaaagattcatttccttctcatataccctggtatgcaatcatttatgtttttcgtcccaattttctatttctagcttttctgtatcttctttatttgcattctcatcccctcagaagtcagaatcattttctgctcttatttcaggaaagagattgcggactgcttgttaaagtgccttgatgacgaggaaacatgtatctgtaaacaaacttcagagttgctgaagtcaatcggttggtcttcttttagcctttatccgctattcatttggaagcttttgtttgtggccattattaatttctggtattggcagtcttatgtctcttatgacctctaaatatggcctttcttcatttgataagatgaattttgctgataataatcagtgttttgttaaaaggaggatttctgttaattattcattattcagatgagaaaaacttataaagatccaatttatggggtccaaaacttgttattccatattgcaatggcagttatagttcatattggataacatttattttctgctttcctatataatgaagccaatcaactgaatgatttttgttatcgttttttcttccagagccatcatttgtgctaccgaatttagtaaacctcatttatgcacccaatggaaaagtacaatcatcagctacagaaaccttgcttggggtcctgaaacaccataaggaggattttgatgttatatgtatgttgctgaccagtcttaggtatcgtgctctgtctctttttctcctttccccattgtatacatagttgtttgtttattcccatttaccctaagtgagatgtgagaatacactggattcttaggtcaagtttgtaaaagtaaacttacgaatgctcatacgtgaaaatattgacctgactacctggtttggtttttaattttggttttgcattgtatcaagctaatattgaaaaaggctttctgcttttgatctccacttttctcttgtagtaatatccaagctttggatactgcagaaagtaatggacattccactgaaggtatttggcttcttatttcattaccataggctacatgcgatacagaatctgtgttaaaatttgtcttatatatgtacaatccgaacgtattatataaaattattacaacacttcaaatttaagctggataagaaataaaattactggaatgtgaaacttaaacgatgtgaaatatgaactagtctggctgaattacatagcggacactatcaagttattcttggtcaaggcatgctcatcatcttcttgtactgttacaggtttaacttttgacagtgatcgagtgctaaagctgatcccagagtgggctagaagtgtaagtacaagaatacgtcatgcttgctttgctatctttgaaatcaatccatttttgtttctaaagtgcatgtataggcaccatttacgaactgttggtgcactactgaatagaaaatggtaactgaactattaactctgaaccttcaacacaaactttttcaggcattggttgtcccttttttcccttccagtactatttccttttatctaattgttttcttgtgtatgtgctgggaaactcttcgcatgggaatgaccaaagtgaccaaagcttgtgccagctataattaggcaattagaatatatttctgcctgttgactgaaatcaaattcttacaggtacaaaactggaactcactgatcggacctttgcttgacaagatgttcttggagccatccaatgccatc

SEQ ID NO: 9969 - DNA, 3000 bp, Unknown
  misc_feature (1)..( 3000): cDNA_ID_3034930_gDNA_ID_2096296_Annot_ID_195568 3000 nt of promoter + ATG
atcttacctggatcactttggtatacaattctgttttctatgaaatatttgttcttaacttttttcttgttcatctcctgtaatcttattttcatgatccgaaaagtttggttttaggccatatatccctgaacatgtttttattttcaacagttaccaaaattttatcacggtttttcaaatttatataggcctaactttttttgtcttaaatttggtgcaagacgtacgacttgaactatttttcctatgtagtataaaaaatgcgaaacaaccaaactaatacataaaggacctatgccaatatatatacatgattcctgttgagtccaaaactaatgaatctttatatggaatcaaatttcgaaagttcaaacacatataacctccaaaaaaaaagtgggattcaattcaaaaatgaattagccaaaagatcataatttcgtgagcctccttgaagtttggattccaatattttaccaaccacacactctttagacatgtgtatttttgtattgtaaggtcgatttgttggctgtggaatttttttgggtgtaaataactaactcttaatatttatttgagaaatttcatatactaagaaaataataatagttaaacctttaagattttttttgaataagaattattttagtgacgttaagctttatttttagaaatgttagatcggttcagcttttgtcttttactgaattgaatactttaaaccaagataaccttcatattcaaagctcgaatcagaccaaactgagttgacaattcatagccgatgaaattcatatagcatggtttatacattgattcttaatattctttacccaaatggtcatagtggactcgtctttgtacaaagtattggaataacgcaaaagagaatgttcaaaagagatgaggacaaaaaacccaattgatgtccttatccactttccagtattcaaaattgaaggattgatgttttggtcaaaatcatgtcttgtttgaatacaagtttgaatttttggggacaaatcccatgtttctaaccaatcccatatggccttgtctatacattattggctcattttcacatttggcgtaacctaattaaatattgacctcttctttacgttaaactcactgtaacctttttgttttattcgtctaaatctctttcaaattttaccacttttggcttgttatccagaaatcatatccatgtcataactttgattaatcctcgtatgagtatgttttatattcacttagatctgtttgtttgataaacacaaatattccatttgcataatagttaaagtagatcttaaagtctcataattagttgagatttttttttcaaatggtgcggtctcataatcagttgagaattttcatcaaatcattttttttaattatacgtaataacatcttatttcaaaaatccttttcaggattaaagacaaaattatgggaaaaaggaaaagactaaatcaaataaaaaacaagagaaatcaataaaattatagtactccctctgtttctaaatataagatattttatctaaaagcacaaaattttagaaaataatcaatttcttttgtttttataatttctacattgaaaacataatttagtattaagtcaaagagagtttgagcagtaaaaaattactgtagaatataaaaagtcatataattctaaaattttaatttttgcgtaaaaatttaaattttttatccaaaacatcttctaccgtgaaataaattaaaatggctaaaaatctcataatataaaacaaaggaaatagtaattatcacagaatacaataataattacacataatttacgacaaatcaaaattaattttctttttaattaaaattattgtaatgcatcaaaattaacaaaaataaagaaaaagatacgatgatttttcttgaagttagcaccacctaaatttcagtttgttttatttattaaaacaaaactgagattgacgtggtgaaaatttcataaaaatcttaaatattagataatgtaatttttttttacatatttatatttttaatcatcgaatataaaaatatttggattgattatgttatgctattagttgaatattatcatttttatttaaaatttatacaaataatgaaatattattttcatttagttaattctataatattaataattaaagttattggttaaaataaataaataactgagctatcattgacttaaaagtaaaataacaaatctatttttaattttaagagaaaaaactaaaaaagtgttgactgagtaaatttctgggttccataaatattgatgttttattgtatttaataaaatgatgtttttcatttatttgttattatcttctcttccatacaaagaaatatatgtgaatttcatcccataaattaaagttttctacttaaattattcgtttttattatattgttttctattgaaaataaacattatattaagaattaaataattgtattaacctataaagaacctccgagatttcctagaggtagctttcctcacacaccgtcacggccgcttgtctccaagttgtcttgggactcgtcgacgatgcacacatagtatatttatatattcttctcctagccgaaccagaaatttccagagagataatcaaattcaattgcataaaaactgaatcttgttgttgaaaaagagctctcacaaaacttgtttctcaattctctcctttggccctttttctcacaatctgcggatataaatacgcttcttctcctccgctaattacccaaattcgatcctaaagctctcgtctttcttcagcgttttccggtgttcatattcgaggtaggaaaaaagggctttgctttgtgctgagatctgttgttcatctttctaaagttttgtgtttttattttgatgaatctgctgcatttgtttgactgttttctgcagaaaaaaggttcaaccttttttttgtttgat

SEQ ID NO: 9970 - DNA, 3000 bp, Unknown
  misc_feature (1)..( 3000): cDNA_ID_2109082_gDNA_ID_2096296_Annot_ID_195565 3000 nt of promoter + ATG
caaacggcgaaggtggctaagattaataataggtttaagagacaagacgccgttattaacggttggttgaatgagcaggttcatagagctaactcttggatgaagaaaatcgaggtgactcatttttttctattttacgaatatcttagttagatccgatcgattaagagaacaagatgacttataacatgcttttcttgaaactgtttgcttttacatgtataacaaaataatttagaaaaactatgtaacgttttcaaattgcaaacgataaacgtggacaagcgttttttacaaattataaaatgcatattttatccaaccaaaaaaaaaaaatcaaaatgtaagaattatgggtttatttgaaaaaaaagcagaaacacaaataaacgatagatccttgaatggtggtgatatatcaaatatttgaaatgtgataaagctatccaaaagactgactaaatagacgtcgatgttgtctttggaataatagattatgcgattgatacatatatgtggatgcagaggaaactggaagataggagagcgaaggcgatggagaaaacacaaaacaaagtggcaaaagctcagaggaaggcggaggagaggagagccacggcggaaggtaaacgagggacggaggttgcgagggttcttgaagttgctaatctcatgagagccgttggacgacctccggccaaacgatcattcttctctctttcctagctaagctattactagttttagttacatccaaatgtctcaatatatataggctaccattttctgttgggaatcaatgtgtatataactatatatagaatgtaagagttttaaaggtactgatatattttgtaattgtatgcttttttctttgtctgcaccacataaaaactaataaaatgttatttgtaagccaagaaaattgtttacatgtattgttttgtcattccatctgctgagactgatacgactaaagagttaaagaaaagaaaaaaaaggttcaagctcttacttagtttccagctctgttcatttaattactctctctaccttggcctgtcactcatgtgtttaagagctttaacaaaaatgtaatttaagacgccacaatttactaattcaggctgcaaagctcgaaaccctacgtatttcaggaatggaatttcgaacccactaaaatcttgctcagacgagtctaaaacctttttgcatacaacttgtatgtatttcttaccacactcttacggtgaacaaaacatagaccttatacacacaagtgcaagaaagagagaagtaaagagattttgagatgggctgattaagaaaggcttattttcggtttttgcttctgccataatgggcctacatacccttttttttttttggtagaaatctacataccctttctttgttaactctcctatttatttgtccatcaatatcatagatatattttgttttggtcgttttaacaaacaagactcagtctttggtaaatgatcaaatactaaagaaaatagagtgtactgtataaaacccctcatttcttgcctaattatatattgcacttaactctcttttttagtaacggtaatctaagtaaacaaattacaaattgaatcattgacttggtaggagtaagacaaacactcgtgtaaggaaaggaatgtccatcaggagctttgatattaatttagaggcatttgataaagtatcttaccacattcatactccgttgactttgctaattattttatatataaactaactctaaagtaaaattttaagtatttatgttacttttaaatacaggtttcgacccaattgcacatatatctgtaatctgaacaattattaaattagttgacaaaaaaataaaaataaatttatttctatatcagttaaattttgataaatcaaaatgcgtttatcgatttgttggtagaagttttatagtgcaaaaccaaaatcatcaacttgacagaaaaagcaaataactttgagtaattacatatgttggttgttttgtatcgaagtcaaaaaaattagttagttgggtccgacgaaagtgattaaaaagagtcaaaatcgccgtgtttgaccttttaattataaaaaaaaaacagaacataaaataaaggtggccgcttatttatgaacccaaacacgagcgtatttacggtttcacccttaacttttttttatttccaaggcgcttagtttaagaacgtgtcacagactccgctttctgtttaatccatgaggtaaaattcctgaaacacccctgtcttcgtaattatttgtatgattcatttcacagatatatatttatttggtgctagaattttgttagacattctataaaaataaagagttttctaaaattaaaatgaacaaaaatattctaaaaataaaaaaaattctgcaggagtttgaaaaaaaacaattggtggacatttaactatttaagccttaattttttttgtcggcatttaagccttaacttaagatcacatatattcaccaaaaataattaaaatcacatataggggtaatattgtcaatagtaatttggtaaagctgaaggcattttgatttcacattagagtaatgtaatagtaagaaacattctttgaaaattaaaaatttaaagtgaaaaaaagaaacagacaaaaaaagaaaaaaaaacaatcatagagcagctggagaagaagggagggaagaagattctcttgaccttccttccatcatcatctctctctctctctctgtaattaatttttcgcaattttaattttcgaacaaatgatttgacgttcttcttggtattcacgcgttgaaaatttccaccctttcatatattgttcttcacctccttcgtttttttctcatccatctcttccagaattctcttaaagtttcctactttcctggaatttcgtcctcaatctctcaagtttcatcggttttgatttgggtttgatcggaaaagtcatg

SEQ ID NO: 9971 - DNA, 3000 bp, Unknown
  misc_feature (1)..( 3000): cDNA_ID_2105059_gDNA_ID_2096296_Annot_ID_195562 3000 nt of promoter + ATG
tagtttcgttctaataatatagtaccttaaaacaaataatttgctcctaaattcctaattaactatttttcggctttcctctcaaatgaaactgtgagtttttttagtgttggccaacctcaagtccccaattagaaatagtcgttgaagtaattatccaaaattaaatcctggttatttggtctatttggaaccaaagcctaatgattttatttttagaatattttttctgataaagagggtaattatatatatatttagaattgttggcgctttacaaatctaaagtcgtcttagccaaacaattcgaaaaccgacactcttacaagttacaatacctaaaaaatcagaagaagttccaggtagagtacgtaatttaaagggtcaatacgaataatgatgacaagtcagttatatgatgatcataaactttttgacgccttacatactattcgcaccaacgaaattaacagatactagtactattatatattttgaacaatgaaatgtgtatggattagtacgtcatcatctcgtctcttcaaacttcattttgttgtacgacaatccatatatgagctaactaatatttgtgttccatattttacttgtttggtgtaaaaaaaacgcatatacgaatattttactctgtttttttcttcatctagctattttttttttgttgatatttttccatggaacgtaacatagtgcaacattaatttcaaaaaattaaaaaaccccaaaacattagttagctcataaatacacgatcaacccaattcgaagcacggaatcccaaagaattcaaacgtacatgtcttttccatctttttcagtgtttaagtttatctttctttgctcttttacctacaccaagtagtaatattttaaaaatgaaatagtgaaatagtgacatccacgaaaacgatgtgcaagttgaatcgtaaccattaattaagaaaaatacaagagataaattcaaagaaggaagcaataactaaggccaagttataacaatgactagataaatttccaaagacatgactctcgaccatacctttaggtctctcaagcaaactacgcacatgcctttaacttctgcctatttttacaccatacgcgcatctacatattaacactagtatatacaaatatttgtattaattaattggtaattacaaaacaattagataaagtataataaggataagtacgtgatcttttgtgcttattaatcgataggaatatatgtatgggcatcaagtcttcaccattgttcatgatgtcccatgcattgtagtatttttgtaggtttctttaagccgcaacccggttggccgctagtttctttgaaattatactaaaagacacctttgaaatcatagaaaacaatgcttgacatggtttcaataacaaaatactaaactttaaataattgacatattagtaaatcataagattcataactaaatttccaaagtaacttggtatttttatttttattttggaagaaaattggtattttcattatgataaattaatgtatggttttaattaactaattaatgaaccatatataccaaatttcacgagacgtgttgtactaactactaaagacttttgagactaatatttttcatcatttgggagttgaatgcaaagttgttcccgataaacttttcagttgattttcaagcaaattagatcttgttggcgttattatttaccataccatttcaatcattacattaggtatttgccgtttacgtatttacacttcttatttgaatttggtactttggcacatttacacttcttacgtatatatcatcctaactttcttcgaaagtaaatgaattttaactatttcaaataagtattgataactgaccatgaccctagttaattaaaagtccacaacatagcaatatgcactttttcgacatgaacttaatgagttcattctaatctcacgagtacgcctaacaatttaatttcggtataccaattcatgttggtttaatgattagtaatttattagaggatggaaatcaggtgtcaaactatttcgttacaattttaatcatgtctggttaaggaattatgattaacattttagatagcaaaaatattcagattttcacatatccaagacaataatccagataagtcctctgtctttttttttcttaaactctcatgttagttacaacttacaagtctatgacgtcgtttgtgggaacttttgaaaaataatgagaaacgcatgtagtttaatactcgatgctcggaactatgtgagttttaaaataaacatgccaattttcaaagaaaaatatgagatttaatatgcgaaatgcgatacaaagaaatatgatgaatacagtatattgttttctgcagattttcctaaacgatgatatcatcagagcctcatagacacagacaaaaacagaagaaccaagaaataacaaaaggaacccaaaactttgagagacacaggacacaacgacgttttcttgtcacttttgctgatttttgttttctattcttttctaacttttgatataatacatcacgcattgcttagctcagtaattacacatgatgaaatgttactgtgaatagtatatgatgatgaaaattaactctttttctaatttacagaaaaaaatacgtaactaattaaactgtgaaactctcaatgtaaaattaaaacaattaaaaaaaaaataggggggagaggaggtaaggcttgaagcttaaagtgatgttttcgtatcaatctcaatttctctccatacctccaagtacgccattaaaactttaataaacctaacttttttcctccttcaattcgtctataaatacttacaccctcccacttcttcaatttcatattacacaatcccaaacaagacaggcaaacattctcatctcactcacaagaaaacagcacacattcttttttctgcaaaaccgatcaaaatcgaaatg

SEQ ID NO: 9972 - DNA, 3000 bp, Unknown
  misc_feature (1)..( 3000): cDNA_ID_3034944_gDNA_ID_2096296_Annot_ID_195558 3000 nt of promoter + ATG
caaattcagtagttgatttgaatctagactaatcgtcatttcgaaagaattagatgctaaatgattgaaaagattcatttgttttatctgaatccggagaggaagcttatatcaaatcttttgaactttttttttgaaaatttattgaaggtgtattgtctggatcatcgtagctatatgaaacacgattgtccaaaaggaaacagaggagatgtcactgtggttatttgtccattatgtgctaaaggagttagattaaaccctgacgaagatcccaacatcacctgggagaaacatgttaatacagactgtgatccatctaactacgaaaaagctgtcaagaagaagaaatgtcctgttcctagatgcagagaactcttgacattctccaatactattaaatgtcgagattgtagcatcgatcattgtttgaaacatcggtttggacctgatcatagttgttctggacccaagaagcctgaatcgagtttctcattcatgggtttcttgagtacaaacacaaaagaagctcctgcatcatcatcatcttcttcgagatggtctagtcttttcgcttctgcggaagcaagtattagtagactcggtaacgatataagccagaagttacagtttgcgagtggcaatgatggcaattcagagaaaacgcaagagaggaatggaaaacagaattgtggcaaagttacggttgatgtttgtcccaaatgtagtagagggtttcgtgatccggtggatctattgaagcatatcgataaggatcatcgtggcacttctaaagcctagaagaaaggaagtggttttatatttgtgtgatttgtatcattctttgtaacacagccaggaagaaagaaatttccatattcttttgagctcggtttttgttttgtcgaattggttttcctggtctaggagataactgaatttggaaaatccctctcaaatcttaattaagaaaatataatttcttttaaaataaataattgattggataatacttcgaagtatgtgttgggcttcgggccgaaaataacgggacttggaaggcacacaatctgagaatttgctatataagagggcgagacaggtagggtttggagcacagctttgcttttgagttcgggaaccactttgccctgacctgtcaggttctctctctttaataaattttgattgtgtagattcttcctttggacttgatatattttgctctttctctctgtttagcatatattatcatccgatttaggtattgactataatatatgtttatgtttattcttttcgtaagagcagttaattacagttagaaatccagtcatggtggtgggtgcggtagcaagatatgtgaaatcgatgtggtcaactcccgagggtgttacagatctaatcatggcaatgggattaccattcgtaggtttgattatttacgaacaggaaaagcaacttgctatcatcagagagcacaagaaggttttaggacgatttttgggaggaatggtcatagttagagaggagtgatcggtcctagataatccaaaaaagggtgtttttcttttactaaaggtttttatattattctccataaatgtttccatgaaacaagataactcttttgtataaagagattaattgattttaatttaagagatgatttatgtctacaagatactcaaagatatcctatggataggatttatctgtttcaaaatttctatgattcactgtttgttttaataaactatttgacaaccaaaagtagaacaatattggcttcatcggccacaaagtacctaaactcaagacagatatagaagtgtgtaaaatccttcaatttatggcttctcaccaaaaagtagctttgaccccggaatcaatgtcgtaaattaaatacacataatctattatcactttgctgattgatctggatttaagcaagggtttttgaaagcataagtaaccattggttaaatccatagaatctgacaagtgataatagtgatctcgcaagctaacctaataatcaaaaccacttcttaggctgttcttgttgccaaaaaaaacaaaacgtctatgcccatatcgtgctaccttcaacgcagaattagcaatttcctaaaaatttgggaaacattgtactattatagctccttgcatgttttgactgtaaaaagacaaaccaaaacaaacatgtgctgtgacaaaaagaattaccaaattaaatagagatgatgatcactgaccttcggaatcaaccttgtggagaagaagcccgagagagtttgtaggttaaataaaagttacagtgcatcggacgatattaattacccatgaaaataaagttagggtttagaagttagagaaaaagtgtctctctgtatctttgacttacgatgatatacagtagagggactgcactaacattcgacacttacgatgtcgacaaatagaaaccagttgttactgatgccttcaaaagtacatagaatatgacaagtgataatagtcgcttcactaattagcctaataatcaaattatcaaaagcattcctgaatagtaatccatataacacattcatcttaatataaaaactaatatcttcacatccttctaaaattaattaatctctattttagtatttagtttcattgaatatatccggatgtgatctttacaaattacaattatcaaatggcattgaccacgtgggctaagttttgttgatgctgcgttatgacccgttggatcacactggataatttctgtgagcgaagacttgacttttctcaccgttggatcttacctaggatagacacacggttgataaatagttctgcgtagactgtacctcactggataagttatactcagctccattgttcctgcttgcttcttcttagcaaaaaaagaaaaagaaagacgttagtagagacattcataagagctaagcctacgaaacaatcctaagtaatcgaacggagatg

SEQ ID NO: 9973 - DNA, 3000 bp, Unknown
  misc_feature (1)..( 3000): cDNA_ID_3034956_gDNA_ID_2096296_Annot_ID_195553 3000 nt of promoter + ATG
aatttggcaactgatgtggctgtcggaagcgctttagttgacatgtacgcaaaatgcgggtgcctacagatgtcgagaaaagtgtttgatcagattccacaaaaaaatgttattacttggaatgtgattataatggcttacgggatgcatggaaacggtcaagaagccatagatctgctaagaatgatgatggttcagggagtaaaaccaaacgaggttacattcatctcagtatttgcagcttgtagccactcaggcatggtggatgaaggattaaggatattctatgttatgaaacccgactacggggttgaaccaagctcagatcattatgcttgtgttgtagatttgcttggaagggctggtagaattaaagaagcatatcaactcatgaatatgatgcctcgtgatttcaacaaagctggagcatggagtagcctccttggtgccagtcggattcacaataacctagaaattggagaaattgctgctcaaaatctcattcaactggaaccaaatgtagctagtcactatgtgttacttgccaatatttattcatcagcaggcctctgggataaagcaacagaggtaagaagaaatatgaaagagcaaggcgtgagaaaagaacctggatgtagctggattgagcatggcgatgaagtacataaatttgtagccggtgactcatctcacccgcaaagcgaaaagctcagtggatatctcgagacattgtgggagagaatgagaaaagaaggatatgtacctgacacatcttgtgtactccacaatgtagaggaagatgaaaaagagattctgctttgtggacacagtgagaagctagcaattgcgtttgggatacttaacacatcacccggtacaattattagggtggctaaaaacctcagggtttgtaatgattgtcatcttgcaaccaagtttatctcaaagattgttgatagagaaatcatcttgagagatgttaggaggtttcatcgtttcaagaatggaacttgctcctgtggagactattggtgaaagataagctccataaaactctcttttttcttcattgtatatcttgtaagtgttgattcttgtataagttatacagtataacacacagttgaacacactgatcttaacaaaattattagtattaaatgtacttattggtctctgtagtcattaagaaaataaattagataatttaataaactaatcagcctttagttaatatgtaccttttccatcatgtgatggtttctctggtcctacagatctgctctttagttgttgtctctttgtacatagaaggatagatgagtgatgtgggcattgttgtagtgtttcagtaatcaaaacgtaaagaacaaacaaaggaaaaaaaaaaaattactaagaaattcccaaaagaggaagacattgacctcgcagctcaacgaacgacttcgctttcgcagtttgcattgaattgaagcataagcaacctccaaattccgacaacaaccgatttcctgcagagagagtctctctttgtttgccctggataggaaacctacactactctttgtgatttgattttgttatctgaattcagagtcttgcttctgggttttggtctgggttttggaggtttagtgcttgaatctgatgttggttcaagatcgtgtggctcctaagccaccaaaatctcggatcagagaacttcctagtcgggaccgattcgctgaacccaaaatcctagatttctcttcatgggtttccgacaatgtctacagaatcgtaatcatcttcctcttcatcgtcaccgtcgctgctttcttcttcctctacaacaccaccgacactgcttctctcctctgtttccaatcccaatcaactcaatctcttcaatctctcactcgccctcaaatcaactggaactcgatccaaatcgtctccgacaaaacctcaccttacgctagtttccgtacagagaaatggatcgttgtgtcggtgacaaagcacccaacagaggagctcaaaggtttggtcaagattaaaggatggcaagttctagcgatcggaaactctttaacacctaaagattggaatctcaaaggtgcgatttttctatctctagatgctcaagctgagcttaattaccggattttggatcatttgccttatgattccttcgtacgcaaaagtgtcggttacttgtttgcgatccagcatggtgcaaagaagatctttgatgcagatgatcgtggtgaagtgattgatggagatcttgggaaacattttgatgtagagttagttggagaagacgctaggcaagaaccaatcttacagtatagtcacgaaaacccgaatcgaactgtggtgaatccgtatatccatttcgggcaacgatcggtttggcctagaggtttgccattagagaatgtaggtgagatcaatcatgaagagtattacactgaggtttttggtggtaaacagtttattcagcaagggatttccaacggtttgccggatgttgattccgtgtattattccactaggaagacgactttcgaaccgtttgatatcagattcgatgagcattctcctaaagtggcgttgcctcaaggtatgatggtgcctgtgaattcgtttaacacattgtaccattcctctgcgttttgggggttaatgcttcctgtttcggttagttccatggcttcagatgtgattagaggttactggggacaaaggcttttatgggagcttggtggttatgttgctgtttatccaccaactgttcaccggtatgatagagtcgaagcttaccctttctctgatgagaaagatctccatatcaatgtcggtcgtttgatcaaattcttgcttgcttggagatcaaataagcataggttcttcgagacgattcttgatttgagctttgttatggctgaacaagggttttggactgagctagatgtgaaattcacagctgcttggctccaggatttgcttatg

SEQ ID NO: 9974 - DNA, 3000 bp, Unknown
  misc_feature (1)..( 3000): cDNA_ID_3034948_gDNA_ID_2096296_Annot_ID_195557 3000 nt of promoter + ATG
tcttatgcgtttcttgtaagacaagttaaaatatgttattctgaagaacgaaataaaactagagtaaggtgataagccttcgtagtttgttattatatcagaaaactgtttatcaactgtacttctatgtttcagcttattatgctcaggttgctggtcttcactatagattaagtctttcggacaatggttttgaggtgtgttttgtacaaggatgctgacgtttccttgtgtaattttctcaatgagtttcatgtttgactaacagtttctcatttccagctctctcttgttggctttagtcaaaaattgaggatagagaaactagatgctctttcttttttgaaagctgaagacttggcgaatttcgtcccaatgttgttgtcgaggacatttgttgagtgctatattgcaggtgtcaacattattcctgttgtagatatatacacaaacacaacattcatataccaaaacgacattttatacttgaatctgtattagaaaacagagttttatcgtttaagctctgttgattgtagcttttgtctgacaaagatattgataaagactttttacctacttcaattgtcaaattgtggaattgttgaacctaacagatctttttggctcagttgttgaattgtgaaatctattacaattttgtttaatcatagcaaatcagttcttgagtattatttgtttaaccgttgtgacagagtgaagatgctgttagctccagaatctttgggtgtggttcaacgaatgataggtttgtgctctaattgttgatatgttcttaagaatcccactcttataataaaagatcctatccacatcaaagtatcgatcatatggatataaatcatctcctagattttttaaaagagtttaatggaacacatttatggagaataatataaaaacctagtaaaagaaaaacatccctttagagcacccacattggtcatttttttgtgggtgtctttaaatataaaactagtaaaaaaatataaaacaaatgaagagtatctttaatttttgatttgtgtttctaggaagacatttgagacaccaaaaagaagagatgtctttgattttattattaatctatactaaagacacatatcaaaagctatgctatgaggatgctcttagaataatctaggtccgattactcctctctcagtataatcattcctcccaaaaattgtcctaaaaccttgttgtgctctctgataataaatagcaagttgctatttaagatcatccgcattgcataactaacaaaaatgtcctcccatattaattcaattattaaaatgtgcagggtgattttaaatgagagacccctttcccaaaatgtctcaattgaaacaaatttagacattttgaaaaggatgtctctcatttaaaaacatccaaacatttgaataattatattttggagggaagacatctaccctaaaatatccaatgtggatggtgtaaagccacctccattgcacaagtaatatgagtgtttatagatattaaatgaataaaataaaaaggtctgtgtctttaaattgaagacatcctcttatatctatgtaatgtagatgctctaacacccgcacgagttgaccacaacgatttcacatatcttgctaccgcaaccaccatgactgaatctctaattgtaattaactgctcttacgaaaaaaataaacatatataatcaattcctaaatcggatgataatatgctaaacacacagagatcaaagaatatcagttccaaaggaagaatcttcataagaaaatcataatattgatctctttatagtcaatccctaaatcggatgttaaatatgctagacagaaagagagagataaagaaacgaacaattgcaataaaatcactaatcaccaacacaatttttctctactcttacgtgttattaggctactgcttcagaacaatttattgggccaatactttaagtaaggaaaataaagtaaagaaacccaaaaaggtcattttcattcattttttctatcacacaatttagaatacatgcacaggagacttggagttattgaatcacagattcacagtacttatattcaatagtatcagcatgtataagtaaactgtggaaaaactaaactggagttttcatagatatatacacacaatcatataccaaaatatgaacttttattcatctggtttgttagaaaatagagcttttaagatatttaattataaataaatcgtggaaccaaatttacacaattttttaaatccatccagaaagaccatatattaaaattttaaatatggaagtttaataaacaatatagagattacacatatttaacgaggaatcgatacaaacaaatatattagatcacttcatgaaaacaaatacaagatagactagagtttctatataagttttactaagagatcaacacaacacaaccttaacacctatgatataaaatcacatagagaaaaaaaagagagagtcaaattaccactttattaagacttttcaaggaaaacattatgacaaatttgcaatttgtaattaataaaaagaataatcaaatcataactgaaatgagattcttagaattaaggattctacaattattatgtgatgaaaacttatggcataaattgaagtctaaatctgtatgattttattttgtcaaaaaaaaaaagtataaaccaacgttggcattgaccacgtgggtcaacaagtcttggacatatgcgagcgaagacccagcggagacttcagctatcgccgttggatctgtatcagtatcacttggggaaatatagaccgttgataatgagtcagacgtagacttatataacacaccagtaatttcttgtcagctcccctccctctcccttagtccctttctgaagtttagaaaaagaaaaagaaagacgttatttggattatatagcaaaagattcagctaaagtaatccaacagcgatg

SEQ ID NO: 9975 - DNA, 3000 bp, Unknown
  misc_feature (1)..( 3000): cDNA_ID_2186672_gDNA_ID_2096298_Annot_ID_195588 3000 nt of promoter + ATG
gcgttggttagtggaacaatggtgtctttaagtacaagtaaagttaacacccaatttctttatagggtcatttttccatatattttcatgtttttttttgtttttttctttcttctgtatctctctatatataatttcttttgatttatctttagacattgactatacttctaagtttagatatataaatacgttgtaaaaaaatatgataacatgcatatttcatactactttgattctcacccatataaatttatattcaaaaagggctcaattatggagtttgtagaaataaatgacattattcttaatttcttaattttgaaaagaaatctaatagcaatacatatttaaaaaaacagaatcagaatatatttctaaagaattttttttttttggtacgattaaatttatgaaccccgtaacaaatatttcttgttccaccaatgctaatgatctgctgtccaattggtcactaagtgatttaaaaaactatacagaatactttctagagatagttgatcaaaataatcatacatgagaataaaatattataagttatccatcaattattatcataaataatcatttcactaccgtcaaatttgtaaaattgagcctcacgcaacaaggagttcaattgtatcaatttaaagtaatgtatgtggccgtgaaaacgtttataatatactataagaattttaatgtaatttttctgaatttatatgattaatctttattctccagagttaaaaagtaaaattttaaaacttgatgagttagatggttcttttgtacaaaaccctagaatcatcgttatattaccacatttttggtcttaagacgcatattttgcggaaaatctcaattccacatttttgcaaaaaaaaaacaagattctgtagttttagtgaaaaattacagcataaaacacagaattacacaacttttttgagaaaatattattctacaattttcaggccaaaacataaaatttacaatatggctgaaatctcacaactttaggtagaagatgcaaattcaagattcgtttattttgttgtaagacaatcttataatttccgctagctatagaaacgctataaacatatctcaataatgtggatacataccttcttgatcttcttcagcttgaacaaggttagaaatagcgaaagttgcaataattagtacgaccaacaaaaccgaatggggaaactccatatcctcttactttccaagcaaaatcaagaaagacacggtcccaagttctgaaccataaatgaagtttatataagcaatggcgccacacaattcctttagacatttcaagtaaaagccgtaccaagacaataatcctcaaaaaaacgtgaggacatgtcagtttctacaaatagaagtttaactgtagatttaagtttcttggaaagtttctaatgggaaatatattttttatttattagtttattagtcagaaaatgttcaacttgttcattaaatttaaagaccctatcaatggagaggatagtcgattttaccaaccaacacggctagtgccgaaatatttaaagtgagatatgccttccgttgacttgaattgttccgatcgatgtttaaatctgtctagactctagagggtgtccactccgatttcactttggttcaagattgaagttaacttgtttatgaattaggatgttagcatgcgacatccagatgatattcattttaactggtttaacatatatatgcatttgaatgttgcacttggattcgaaattaattgttttgagagtgattttctgcctaccaaacgagaccactacaacacatcaatcaagaaaattggccgagatttttctatagaaagatggcaaaatcctcggcctcccgaaaatacaaatatgccgtctgtttcggcggctcggcccgtataatagtgttttcgggagacaagtcctagaaccacttctcataaccttccaatagagagaccacttccaaatcaccagaagcagacaaagtaatttaatctacttgtacggagtaacggggggatgtccgcatcataaacatgcggagcacgccctctcgaccaaggtgatatccagtcagagaccaaacatattgcccaggccccaatacagtcagatcacttcactatactgctaactaaaagcactttgtaatcgttgacctaggtcctacgacaagtcgacaagatgtaatggcatcaacctaggccaggtaacgcttctctaaaaaatattcctctcgccatatcaaagagcttagaaagggtaaccaaatccttggaggatgatcgaatcaaaagagaatgattatgggatctaggattggaatcccattcaaaaactgttttctaattgaatgtgtagactatttgatcgatttcggataacaacttgacgcacacctttgcataaaaatcacaaaaaaacttttacatgtttgaaaatggtatatattcaagtctatgaccacccgaaagtcaactccctcttaacgtttcttcatgcgtcatggttatgaatattaaacctcaaaatattttgcagattgacaagttcaatggaaaagagtctagttaagcaagttgtgttttgtaaattaaggaattagcaaatccatttgattgtgccaatcaaaatctctactcaaggttgtgataagacctggtcgtatacgcatgtacggcatgcatgaagacttttcgcgtacttttaaaatatattaatcttgtgacgttggatgtttcactagaagacatcattgctcactccttcatttggttttcttgaaacaactattaactccatattcactcattttctcatatcgttgactttagcttggtttaattggtgtccatattagagaagcttaatttgtgtgtccttacatttagtatataagtgaaacgtaagtatataattgtgtcgatccttttctgcgtgtattgtgatcggaggaatcatg

SEQ ID NO: 9976 - DNA, 3000 bp, Unknown
  misc_feature (1)..( 3000): cDNA_ID_2186712_gDNA_ID_2096298_Annot_ID_195603 3000 nt of promoter + ATG
ctttctttttttgttttaaattttaaaacagaaagtaattactatttttaaaaatattaattaattagatgctaaatatgttaattattgacgtggcagcttccgattggttgtcttaaaaaatgataattaattagatgctaaatatgttaattattgatgttgcagctcccgattggtgttctaaatcctatgtggatggctttaaaaacaaatagtttcaacttttatatagtataaattgagcaaattttaataaaatatttatttttattctaaatatttaacggactcaatatttattttccctataaaaactgtcacatatcatcacttgtacacaaagttgagttgtagctcgatttgtttctccacaaaaacaaaatttcaactctatttaacacgcgaaacttcgaaatatcaaaacacaccgaatcacgaaatcagtatttttattcgttaaccatctaacccggtaacaaacaatctaaaccaacactaaactaaattaaagattgaaaacaaaaaaaaaaacaaattaaagaactcaaaaatttggaggtcggattaaattccatcgcattaaaccgacactactacactcactaaaacgatccatattttgtgtgaatgcaaaattaactctttttgttaatgatgtgttctatctttaatattagtcggccactttgaacaaaaataatatttcgcaattctattggctggaagcgaaaaaagtaaagaagacacgtccgtagcagatccctccactcccatgtgttcccttgatgaacaatgaaacatcgatgcttaccaaaaaaaaaaaaaaaatccccagtttccatcttttttgaaccttctcgatataaagctctctattcaattcccatctctatcttcttcctcttcatcttcctcttctctcagatcactggaagctctagctcgatttctcacaatccgccatgaactcacaagcttgtcttcttcttcagaaacagcttaaaggtacacacaaacactcgcgaatctcaacgaatctgtttcttctacgaatttggtgttgaattctctcttattgaatccgatttgattttttggtttcagatctttgtaagcatcctgtagatggattctctgctggtttagttgatgagaagaatatattcgaatggagcgtaactattattggacctcctgatactctctagtacgttccttttgatccatgagatttcatcagcttccattgagatttcgctataatctatgttccggatttgatgattcatgtggatttgagcttagaatggatcgatttgtcggttttgaagcgaattggttaatgctggattagattggagtagtgttcttgtggaattgaaatgaattgctttgtttatatggagatttacttagtcttgtcacattaacaaaaggattaagcataagttatggaactttgtaaatgcagtgaaggaggatttttctatgccattatgtcattcccacaaaactatcctaatagcccacctacggtgcggtttacttcagatatttggcatcctaacggttagttctttctctcggttatgcgctcattagctcattgatcttgtttgagtagctaaggttttgtgaaaatgttcgtcttgtggtctgcagtttatcccgatggccgcgtttgtatatctattctacatcctcctggtgatgatccaagtggatatgagcttgcaagtgagcgttggacgcctgttcacacagtacgttttacaatgatccaacattctccttgtatgatatctgagaagcttcttcttataaccaagaatgatgtcaattagatttgatgagtggaaataacattgctgatttcaggttgagagtatcatgttgagtattatatcaatgctctctggtcccaacgacgaatctccagcaaacgttgaggctgctgtgagtgttttctattgattagctatgaactcatcagattaacactgtctcattggatttacatatagtttatgtaccagagcttgctcgttaaccattctccttgtggggtttcctcttgcagaaagaatggagagagaagagagatgagttcaagaagaaagtgagccgttgtgtcagaaagtctcaagaaatgttttgatcaaagaaacactttcacactccaacaccatcttctatggagttcaaaagctcatttatcttatcgaaaaaaattccctttgaaaaactgtccaaacactacttgtaataaacccgtcttgcatcttttaatcgcgttcctcaacgtgaaatgaagtgtttggtcgaaaaaaatgttgttcttgaaaaaaactgacattaaaagttatactattcttcatagaagctttgtttttgtctgtcgaagctttgtttttcagtgtgtttacttccttgatttggacgctaaaactccacgccgttcctacgttctcctcagaaacttcgtacagttttcggcttctagtaaaaatatttaaacaaacagcatgatgtttgtttcttgggtccacgtatttaaaaggcccgtgacgttgtcgctcctggaccgttgatttacctatcaatcgctatcaaaacagttgggagagtacacgtgtccaacaccgtgttgttcttgtttcctttttttctgtttcgctttatgaacttcggagagaagacgaaatctcgctcgctttcgccgccgtgaaatttgattctccgatcactacaacgattccgatctgtcctccgttgatttcgatcctggttcgttttgttcatagctttataagaattctctgattccgtttatccgttctcttatatatgcaaattttgtttgcagattttgatattgtttcgacatgaaattggtgtgatctcgtttcgagtttcgtggcgtatttgcttattttaagtgtgtggaatcgatttttaatgggggataattctggtagaagtagaaactctatgatg

SEQ ID NO: 9977 - DNA, 3000 bp, Unknown
  misc_feature (1)..( 3000): cDNA_ID_3035010_gDNA_ID_2096298_Annot_ID_195590 3000 nt of promoter + ATG
aagaaaatagaaaatcttaaaaaagtaaacaaatttacatatactaatttatatatctatatatttataaacaattaacatttattcaacaaaaggaaaattaacaaatttgtctttaactaatgtaatcataagtgaaaatagaacattttgagagaaatagcttagcttataagatttaacttttcaattatttttaatgagaatattttcatttattaattttaactcatttaatattaatttgcttgatgtaaaattaacttacgagattacggcatatataaaacatatattttcaacaatgtttggtttctaaatatttttgtagatttctatttttttattaattattagccctaggcgtttgggtattcgggtcgggtatttcgggttcgggttttcgggcttagaagtttagaacccgttcgggtaatttaagatttcgggtcgggttcggttcgggttcgagtttatttatatattgaaatatcaaattttgtctgcaaatctattaaattacttgaaaattttaaaaattcccaaaacaacacgagtagttttgcttgaatatatcttaaaatacacaaaaatatctaaaatatccaaaaaatcctaatattttctatatataagtataaatataactaatatatatttatatttgagatatgtttggatacttattcgggtttgggttcgggtttttcgggttttgaagtttagacctgttcgggtatttgaaaattttgggttcgggttcggatcgggttttttggatcggttcttcggttttgggtattatgcctaggcctattaattatgttttgttaattgttaattatttttaatactaactaggatatagatttgatgtcataaatattatattgatatgaaaatgttatcactcaatatgaagtgtgtagaatttaaatcgagtttattatgatgacatagatagttaaattgtattacaaaattgaatggtgtaagatagaaatttattttttctttttcttttctagatactaaattaaatatagaataatggtcgcttactttttagaattcaaatatcattgataagattgagtgtatataattaaaatagaatgcataagactgaaattttgtttaaaccaataattattaaattaaatatcaaaaaaatatatagattgctatacaatattcaaatactatcgataaaaatttatttttgtatcttatacccgcctaaacaggcgggccttatctagttgtatatatttgcaaagaagtcttgtttatgtggatgctgtacttgtgctttttgttttgttcttttgtgagacaagtgctccaatttttattactattgtgatctcgtaaatttgaatttattgtttcaaatttggtgttaccttccacatttttgggctacttcttctttagcctcaaaaaaagaaaaactaataatgttattcattagttaatcaactgccgcacaattgtaaatttggacctccgataagtattacacttgggaatcaaatcacatacctaatgtagaagttttaatgaaatcatggtcaaccactagaccaaggagacttccacaaatatttctgttatgtgacaaatagttgactatttttgtaaggaaatgaaagaaaggttaaattgtcatgttatatgccatattgacttttcctagatgctaataacctaaaaatggaaattaaaaaaaaaatctttacagtgtttcctttttcttgacttcttgacccaaacaaacagtcaaatcattcaaaactattagagattatattattgtacattttttaatgaattggtatgtctaaccaggctatgctcagcctgccagagtaggtcttgagtcgtcatactgcacaagacccaaacccttcatataagtttccggccatttagtattagagtgtgggattccaacctaaaaccaattggcaataggtggagaagtccatatcttatatataccacttaagatcctactcaacttccgatgtgggacattgtccctaatacgccccctcgagatgatggctcttctagccattgatttcgatatgtttgggcatggatcggcgggccaagtattgggccggaccgatgtggatcgggttgagtatgtgcggatcgggctttgataccatattagagtgtgggcttccaacctaaaaccaattggcaataggtggagaggcccatatcttatatataccacttaagatcctacgcaacttccgatgtgggacattgtccctaatatttagtggcatgacatgcgggttgtgtcatctttaattttttcttaaagaactcgatcgagttctctcaggtaactcaagtgtcgtaaaagttaatagtgtgggactagatcttatgctgaatattgttaatttgttctcatgatgacttagcacgtctttcaacttccgctgggaggccgttctcatgaaagattggagagtggagaccctgtctcaattgtttgctgagactgttaaactgtcacccacatgtcagttagtgataggtggatacaacattgcttccaatgaacattattttcttttgctaaaatgaaatttctgactagtggaaagcacataaaagcaaatttttgatatttgcaatatcgtcctgacctaaaacattttctagtgaccatgtgtttaaaaataatcaaagacaagttggatgataaaagaaaatttttaaagacaagttgaatatttttggccaagaaactagcaaatatttaaagacaagtcgaaaacatctttactcattcgtcaaattgaatttctttttgtagaaattaggacatctcctcacgatttcagaggattgacatgttaaggtgttttacttgagaagtccaaaggagttttgtggcctaattgcttataaacttcgtttatggttcaggaaattgggtcagtttttatttcgtttgggaaataagaaaat

SEQ ID NO: 9978 - DNA, 3000 bp, Unknown
  misc_feature (1)..( 3000): cDNA_ID_3035006_gDNA_ID_2096298_Annot_ID_195591 3000 nt of promoter + ATG
tttaattatctgctagtagttgtatcgactaacattgttaccatttaaactcgtagtctattgtttgtgaacttttttaaaaacgttaactaaaatgatatagtatttagccgaaacgagattatcctgatactaatggtagcggatagaagcttatcgcgatacgggttgttaccaaaaagtgtttattagttttgattctttgtgtaaaacagaagaagacaacttgtggtatcgtcgttattatttttcttatctaatagaagttatatcgactaacattgttaccatttaaattcataggctattgtttgcggattagttataaaaagctacaaacaaatatgctcgcgtttaggggataagagattttcgtgatttattattataacgtgttactagctttgattcttgttgtaaaacacaaagggacaacatgtggcatcgtagttattatcttaattatctactagtagttatatcgactaatattgttactatttaaactcgtagtctattgattgtggactttctttataaagttaacggaaatatcatcgtgtttagtagatacgagattatcgcgagaccacatagtttctatttaaactcatggtttattgtttgaggattatttttaaaggccatacatatcaataatgattacaatatctttatatttttaatgtcggcgggagatatcttccaggatatctttaccatgcaacatctatgctataactatattttggttttataggggaattttcgtcagaaattatgttggagaaaagagatgattaattactcagttttaataataaaaataattttaaagttttttttgaattttttgttggtcaacgccggagtcaattaatcgatttaccggaattgtatgtcaatcgtgttaaccacatgacgttgtatagtttatatatgtggccatacaatatatttatttcatgtagctgagtatacaatagtgtagttgaaatgtgtgaatatgcattctcctatacttcatgtagttagcaaactttttttctagatattaatatagctcaaaatatatatatgtatatataatatgtctcacacatggcccatatcgtgacaagttctatagtaactatttacacttattttcctttttatttttgagcaatattatttttcttttgggcctattcaagtggttgactagtaatcaacgagaaatagttacatatatgttgcccacaaatagtagttacaaaaaagtgtctgcgaagatcattttgtgtgagtgactatgaacaaattgtccatgagcaataattgtagacaaattgtctacaatgttcatttgtaggctagatgtctaagattaatagttagggtaatattaatagatagccaaataaaacatacaaattaagaaagtagcagagagaaagttttatgttgcaaaataaccatagacccacgttgtcggaagaaatgaaataacaaagctacccttcatttgttgtaagatgaacagtaaacgaaacacatctgtgtaatttttcaaaatagcatgtaacattaaaattttacatgttatatttagtttaaaaacatgctatttcaaaaaacgtcatgaatgtttaagaaaaaacattgttatgaaatttttttacatgaacagaatcttaaaaaaaaaaattatatgtgattttaataaaaaccatgtattactaaaaaataagaatatatttttaaagaaatcacgtgtgatcttaataaaaaacgtgtattactagaaaatatcatgataagaaaatatattaaactgaatagaatgttttttccaaaaaataccatgtgtttttatgagtactatataataagagaaaataacaagataaaaagaggatattatgttatcgcatgtatttcagaaaaaaccatgttacaaagaatatttatgtaataacatgtgttctccaacatatttccgataaggtattgtgactcaaggttattttgtacattctttttgaatccatagtcatttattataaattctctagtagttattgataagtttaccacaagtggataagttgtagacttgtagcctcgtaggcaacaccgaggactagtggacaagttattcaccacatatcttctcagtatgttgtttcgacaatggacaacacttcaagtccgccaaatttattttcaatatgttgtttcgaatatagacaataatgacatattgtatacgagtagcaattgtagactaattatctacgaatattagttgtccaccgtaaatgcaacccaacatgtcctcaaatattttcttaaaaactaatactacaattatataaagcaaaaaggcatcaacgaggagaatgacataatgtcgagggtatttttgtcttcttatacaattcttaaaattatgtttggcatattaaaaaggagaatcaatttggcatgtgatattttccgcaaatgttacgttgtagttaaagttgcattttaaaccaaatttcctaatttgtatctaaatccgaaaccttttggagactatttcatcatttgactttgcttacatgaaatgatgcaaactattggagtacctactgacccaagggcttctgacacctttttgaacgacttaaatatcggaaccataagtcaatgaccaatagaacggccacttccgtctctctttcttataatttcttcacccgtcaagttgataagttctttaaataaacaagacaagttgaatatttctgaccaaaagaataacaaatagaaagtgttgccaactaaaaaccgtatttttctcatttgtgaactgactttcctttgtagtacaaaaacatgttctcacgttttcacatttccgagacgtgacttggtaagctctttttcttgaaatgtccaaatgagttttgtgcggacaatgcttataaactccggttagggttcatatttttcttgtgaatttaagaaaat

SEQ ID NO: 9979 - DNA, 3000 bp, Unknown
  misc_feature (1)..( 3000): cDNA_ID_3034994_gDNA_ID_2096298_Annot_ID_195597 3000 nt of promoter + ATG
tttaattttggacgcctgataaatcaacctttctgctcattcgtaatcagaatcattttggtccttttataatatggctctaaaccattgtccaatttttctaagcgatgtgggacattgtacacatattatttcttcatcggttgaataatatatgttcgtttaaaaaaatttgaattacattatatgcagaaaaaatataatattttattaactataaattataacatgttatatatttataaaaaaaaatatttataagtataacaaaataaataaagtagaagatcaaataaaagtgaaagaagaattatatatttatgtttaaattaggtaaaaatattttaggaaattagttaaggtaaataacaaatatgcttagtttagagatattatttattttaaatttggtaattaaatcattaatttcgtttttgaattattagttcttaggtaacttttccaaaaattaatgttatccaagatccgaacagaattaaacatgttatccaggatccgaacagagttaaacctggtaaaacccacccatttgaattaattgttgaattatggctcaaatcttcaacattatcttcaaaaaactgctacaaaaatgtatatatagatacggaaaaacggtctatttctccacgagaactatgacatcatgccagatagagcccgatctatgaccacgatccagatgaccccgaaaagataattctcgatctatatctccatgaatctatagttcaaaacctatatcaaccccataagcataattttcacctatttacccacaaccattggttttgttcggtttactatttctataaccaactaatgaaaacactaaaccagaataaacctaatttaaccgagtatcactaaataaataaacaaattaattaattaattgaattattatgaaacagtaacaacacgatgacgttcttcttcctttcaatggtgatggtgatggtgatgttggctccagtgatggtggctatagatatattttccagtttttccccttttcttcttatccctcatctccgctcagatctgctgcttaagcaaagcttcatcgactttgattaaactcgaattgagaccttcccacattattccacccattgaaatcacttgcttcattttgtagaagattaataacgttgaatcagccattgtcgacttgatggtttgtgttgattgttttctgttttttgtaattaccagattgattttaagatgagcaattgaaagaacagtaatagaattggataaaacttatttaataattgagatgttgattttgtttaattgggttgttcttttgtgaattgtaaaattcatgcggaagctcacctcgatcttctctttcttagccatattcttagcaacgattccagttttcaggtcaatgtcgatgttaacgttattagcaatgagaatgcgtttaaaatgctttgttgaatatctcttcattagttacgacaaatttgtatgtggattcaaaataaatctaacacccatcgtaacaatcaaagagagataaactattttttcaaataaacataatctggaattttatagggaagaagagagaagacaagacgacagcaattttgttatttctttttttattattaatttttttttttaagaaggtttgacatataaagtggtttggtatcggtttgagtggatttttatcgggtttggtcagcaaaccgattaaacccaaatatatggggaaatagatgaaaactatcaattttggggagataaaagatcgagaagtatctgttcggggacatctggattgtggtcatagttcgggctctatctagcatgatgtcatagttatcgtgggaaaataccgtttttccatagattatcagggggaatgttatgaataatagatattatatggatgttcattaagagcccattagaatattctagaaatctttacattatttggttaccctaatatgtatctcctatatatatcctcttgttactcatgaataatacacaacaacaattcctaaacctaattgttctataacattgagtacttttagtaagaaaaaaaagaagagattatttgtgtcagattgacttatgctagatactaattaattcaccttacaacttaattttaacgtcaaaaagtgttattcttgctaatttcacttaagatttttaagtttatcattgtttgcaacatatttttttttgttaaagggttttaattgtctgcagcatattgaaattataagttgcaaaatcggaaagtagaaagaattcaaagtgtatgttaaggaaaaaaaagaaaaaacatcgcaagtgttacactagattaaattcatctcatttggagaaaagatcctaacgaacggcgaacccagtatctccacctaagatatttatcactagaccaaaaccacgttggttgactcgacaaacaatcaaacttgtctcaaattggatattacatagaaggtcaggaggattaccaatctgaagaaatgaaggagatgattcggtcacgaatgggacaacaattattcataaatatccaggtaagagtttcatgctttggtatactagtttatactaatgaaccagtggctttgaaactctggtttgattgtaaatttgactggactataagcatttttgtgttgataactagtacgaataaacaaggcaagttgaataaaaaatactgcccactagcaattaggaaacatatttattcatcagtcaattgcatttcctttgtagaacaaatccattatttgataatcgcataggtgtgacctgttttacatgatttcaagaggcttgactttatttttttaaagagaaaagctgaggcatgacttggcaattagctctttcacttaaaatgtccaaatgagttttgtctacacaatacttataagctttttgttagtgttcagatttttcttgggaatttaagagtaa

SEQ ID NO: 9980 - DNA, 3000 bp, Unknown
  misc_feature (1)..( 3000): cDNA_ID_3035002_gDNA_ID_2096298_Annot_ID_195592 3000 nt of promoter + ATG
caaagacacacacagattgaatagaacctcctggcaaggagatccatgcgtccctcaactgttttcgtgggccggtctaagttgcattgacacgaatgtatctaccccaccaagaatcatttccctgtaagacctctataacacaatcactctttagacttgtgagaaaaacttgtctaactaaacttatacttgtttatttttcttcttgtttggacttatacacagaaacttgtcttcaagtgggttaacaggaaacatagcaactggaattcaaaatctgaccaaactgcaaaagctgtaagtatgaccatttaaagaaaaatgttatatacgtccgttacctttcttattgatttcttacaaacttcagggacttgtcaaataacaatttgacaggagtagtgcccgaatttctagctaacatgaaatcgttgctgttcatgtaagtttcccaaaaggttttggtggtttttttcccatggatcatcttcacctaagtatgtagatttctctggttttaacagagacttgaggaagaacaaactgaatggttcaataccaaagactctacttgatagaaaaaagaaaggactacaattattgtaagaaggaaattcatccacgcacattttaattcaagatccattgccttgttaaattcatcaaaacactaaaagatcgatatattatttttgtagtgttgatggcgatgatgataagggcgatgataataagtgtttatccggttcatgtgtcccaaaaatgaaattcccattgatgattgttgcattagcggtttctgcggttgtggtcattgcagtggtaatgattctcatttttctgttcagaaagaaaaagaaatcaagtttaggtatttgcatagactcaccaaatattaactaacaaactatacaatataaattaaaatgtcactgatattgttgtttctctacatatatctatccccttttcttgttatgccacaaataggtattacgtcagctgctatatctgaagaatcgattgagacgaaaaggagaaggtttacctattctgaagttgtggaaatgacaaaaaacttccaaaaaactctaggtgaaggagggttcggaaccgtgtattatggtaatttgaatggttcagagcaagtagcggttaaagtactctcgcaatcatcatcacagggctataaacacttcaaggcagaggtatgatatgccataaatcgtctatagaatcgcacaaaatttaaaagaaatcatgatctatatagatatatatttagcatcacgttaagcaaacatattttgtcattgttggtctataggtcgaacttcttttaagagttcaccacataaatttggtgagtcttgttggatattgcgatgaaagaaatcacttggccctcatctacgaatgcatgtccaatggagacttaaaagatcatttgtcaggtgaaagatgtatatatgcaaatataaatatatatatatatatatatatatatatatatatatatatatattatataaaattcataggacggttaattttgacaatctaatacaggaaaaaagggtaacgctgttttgaaatggagtactagactacgaatagctgtcgatgctgcgctaggttcgtactaactcaaaacagttccagtgacttgtcattttatatcaattagttactaattgtatgcatttgatacatctgttacaaacttctcatgatgaattatttccatcaatttttactcactggaatttctgacatgatcaactaacaacatgaatgagtctcctgcacaggattggaatacttgcattatggatgtcgaccatcgatagtgcatagagatgtcaaaagtaccaatatactgctggatgatcagctcatggccaaaattgctgattttgggctttcaagatcattcaaactcggagaagaatcacaggcttccacggttgttgctggtactcttggataccttgatcccgagtaagtactattagttcactcccatgataaatatgtgtgtaatttatgtctacattcatcttcatcgtttatatagaggtatacatataaatcctacttcatctctttgttttccagatattatagaacatgtcggttggctgagatgagtgatgtatacagtttcggtattttactactagagataatcacaaaccaaaatgtgattgaccatgcccgcgaaaaggctcacattacagaatgggtaggacttgtgcttaagggaggagatgttactaggattgttgatcctaaccttgacggtgaatataactctcgttcagtttggagagctcttgaattggctatgtcatgcgccaacccttcttcagaacatcgaccaatcatgtcccaggttgttatcgatctaaaagagtgtttaaatactgaaaactcaatgaaaataaagaaaaatgacacggacaatgatggttctctggaactgagctcgagtgatactgaggcggtcccttgtgcaaggtagtatttacatagacgctttgcctacgttgatgtgtttctgttggaagtgatcaagtcatgcatcatcttactttattgttttagaagagtcatatattatatagttaagtaactgattaatgtatattcgtatcacacatcgaagagatacgaatataattgttaactacaaaacaattacatgtgtgtatgtgtctctacattacgttgtcttctagagacgtgttccttagtgaaagtgtgtcatataaacctataaatacagtttgtatatctaataaaagtgtgtggttttcgttttataaaaacaaagtgaaatatagagtaagacaaaacagagtaaaatctgtgttgaccgatccttaacaactttgagagttcaaagttctacatggtatcagagctatggagacaacaatgcagcaagttattccaatcttcaatggtgaatcgtatggcttttgaaaaatcaag

SEQ ID NO: 9981 - DNA, 3000 bp, Unknown
  misc_feature (1)..( 3000): cDNA_ID_3035014_gDNA_ID_2096298_Annot_ID_195589 3000 nt of promoter + ATG
tggatctccgagaagtgcatgtacaagtagatttgatcatcaggattctccaaacgccaaaccattgtcagtgctgcatcaagatttgtaggcgttgcggccatcttaagagcaacttgtggtggatcatagtgatttttattggacacatttgaagttgttgaaatttgattccattcgggttgaatatatggaacccacgaacgatcataaacatctttcgggtacctatcacaactcacaaattttctcttagtattggtaacaataaattctttatcatttaaatgcatagatcatgtacatataatattttaagatatatagactagttatgatttgaagttgaatacgtaccgaagaagaacggtggcattgctaagatacatgcgaaaataatatttcaaggaaccagatttagcgatgtaagtatcattcgccaaaggtcgtaattccaaagctgatatcattggtatagttgcccctgtcttaacaagacaaatttgcaaagagtttgatcttggaatgtgaatgatctccttcactgtaccatctggcactatttgcaaatctattgttgtccacttattaggaccgatatgcatatcgaattcagggctaacattaagcccgtcaaaatttccatagaaaaatgtagctctaataaggtagttcctcccttcttccacccttagatcatagcagtttcgtattccatctggaaagtatcgtagggttgcatactgttttaaattttccgattcaagatttttcgggattctaccggtctttccactttggatgaaattctcgtctgatgagaactgtattccggtttccgattctatgtaaggtggctcatttagaggtaagccacaatctaaactgataaaacctgttcagaatgaaacatatgagtggtggtcatgcgtgggtgtatagccgggggaaagagtaacgtacggtaaaataaaagtggtaagacttactatggccggctctatagagatgcctaacgaaaactttctaaaaagtgatgttactaagtttgttcgggcgaactaaaaatcatgttgtattctcctgagttatcttatagtttactaataatctttctatagaaacttagacgtacataccttcttgattttgtccttcagcaaaacgaatgatgaggaaaactccaaaccaaaacagcgacagaaaaacccaacaaagattcttcatgattcctccgatcacaatacacgcagaaaaggatcgacacaattatatacttacgtttcacttatatactaaatgtaaggacacacaaattaagcttctctaatatggacaccaattaaaccaagctaaagtcaacgatatgagaaaatgagtgaatatggagttaatagttgtttcaagaaaaccaaatgaaggagtgagcaatgatgtcttctagtgaaacatccaacgtcacaagattaatatattttaaaagtacgcgaaaagtcttcatgcatgccgtacatgcgtatacgaccaggtcttatcacaaccttgagtagagattttgattggcacaatcaaatggatttgctaattccttaatttacaaaacacaacttgcttaactagactcttttccattgaacttgtcaatctgcaaaatattttgaggtttaatattcataaccatgacgcatgaagaaacgttaagagggagttgactttcgggtggtcatagacttgaatatataccattttcaaacatgtaaaagtttttttgtgatttttatgcaaaggtgtgcgtcaagttgttatccgaaatcgatcaaatagtctacacattcaattagaaaacagtttttgaatgggattccaatcctagatcccataatcattctcttttgattcgatcatcctccaaggatttggttaccctttctaagctctttgatatggcgagaggaatattttttagagaagcgttacctggcctaggttgatgccattacatcttgtcgacttgtcgtaggacctaggtcaacgattacaaagtgcttttagttagcagtatagtgaagtgatctgactgtattggggcctgggcaatatgtttggtctctgactggatatcaccttggtcgagagggcgtgctccgcatgtttatgatgcggacatccccccgttactccgtacaagtagattaaattactttgtctgcttctggtgatttggaagtggtctctctattggaaggttatgagaagtggttctaggacttgtctcccgaaaacactattatacgggccgagccgccgaaacagacggcatatttgtattttcgggaggccgaggattttgccatctttctatagaaaaatctcggccaattttcttgattgatgtgttgtagtggtctcgtttggtaggcagaaaatcactctcaaaacaattaatttcgaatccaagtgcaacattcaaatgcatatatatgttaaaccagttaaaatgaatatcatctggatgtcgcatgctaacatcctaattcataaacaagttaacttcaatcttgaaccaaagtgaaatcggagtggacaccctctagagtctagacagatttaaacatcgatcggaacaattcaagtcaacggaaggcatatctcactttaaatatttcggcactagccgtgttggttggtaaaatcgactatcctctccattgatagggtctttaaatttaatgaacaagttgaacattttctgactaataaactaataaataaaaaatatatttcccattagaaactttccaagaaacttaaatctacagttaaacttctatttgtagaaactgacatgtcctcacgtttttttgaggattattgtcttggtacggcttttacttgaaatgtctaaaggaattgtgtggcgccattgcttatataaacttcatttatggttcagaacttgggaccgtgtctttcttgattttgcttggaaagtaagaggat

SEQ ID NO: 9982 - DNA, 3000 bp, Unknown
  misc_feature (1)..( 3000): cDNA_ID_2186749_gDNA_ID_2096299_Annot_ID_195618 3000 nt of promoter + ATG
ttgcgagaacatgttttgttaagttgtgttttgatcttagggtttagttgagtaatgagctttgtgagattgattagattgagaaaatgtctgaattgattctttgttttagtctcgtgttgtgttggtctttggtctttgatattttgatgttctttgcagccacaatctattgcaatgtgtttgaagagccttgtcgtctaggtctctactctacttgttgtttgcgagaacaactgcttgtggctgcaaagtatcgtgtctgtcattgtgtaagtttagttctagatctttgcagccacaatctatgttctgctctatatgatctgtttgtactttgcagccacaatttatgttttgctagtctttggtctgatatttagatattttctgccatataataactgcttgtttttcttgtgtttggaggtttactcgggacacaaactcacgacttgttaggaatatcactagagtgtttacaaacaagtttgatggtccctactacagctggacatgtgtgcctcaagagagacaagagaaatacttcctcgagtttgctgttaactgttctttcagcccttcttttatatagttgattacacttcttttttttactgacattaccttttctatttgtagaaaacacaccattgggatcctttgatcacagggactgttcagttttacttcaacgagatctgtttaaggcgaatgaaaggcatggttagcactgtaagaactagtcgaaagaaacctaaatggattgggaaaactctatggaaggaaatgactgcgtactgggacactgaagaagctcaggaaagaagtcaaatctattcaaatgcccgtatgtctgaccgtaatggtctaggtcctcacatacacttcttagggtctaagtcatatcatcaaatccgggacgaattggcaagtcttctctctgtttactcctttgcaactttaactcgatgtttcaatgtacttttctatgacttgttttttttttcattacaggaagaccaattgggcaaaactgtcagtattggtgacgttttcatcaaaacacatacaaaacctgatgggacgtatgttgatcgaaaggcagagaagatttcagagttatatcagaagaatttgcagctgaggcagtctgagctcgaggctgaagcttctgctgtttcagatggcacttcgcgggtacgggagctcacagctgaggaatgtacaaccatatttcttcaggtaacgttttatgtttcccaatttagtgtttttgagttgtctttttcagtctctaatctcagcttttatcatactatgcagtccactgagagggattcgagaggcgttccttatggagtaggaagcctcaaagagtctcttgtcaatggcaagcggaagcaagcaggtgactcaacttcttttgtggctttgcaagaacaattacttgaagctcaacgcaagatagaagagcaggtctcttgcattcagaggcgtgaagctgagaattcccaagctgcagatgagcagaagaagaagcttgagcacttgtccttagaggagaagtttttgcgcgaaaatgatcctcggttcctcaatttcctcgaatctcattcagctaaggagacaaccacagatcctatctcaccctctccagctgcctctccctcttcatctgcttcataggtctgaatcttaactccttcctcaagactcaatatcaaggctcaaagtttttatatgtgtacttgtgttgcttgtgcttatgctgaacaaaattctaagttgtagtgaatcgaacatgtttctgtaatttgggttttgtacttttctgaaatgacaataaatttgttttcatgcttcttgtatgtgtttatgcttattgtaaagttttgttttctcaggaaggtttcaatctttataacaatcatatagatgttctaataacaacaatagtcgcaaatttagtcatcaaaaatgtaaccaagcagtcgtttatttataacaattcagtcacaaaaatttccgactaagtgctattttagtcgcaaatcagtcttaaaaatagtgacaacgtagtcgtaaattttaacgactaattaccaacaacgactaaataaccctcaagttaatcgttaatttgtcgtctaatagtcgctaaatttagtgacaacgtagtcgtaaattttaacgactaattgcctacaacgactaaataaccctcaagttattcgttaatttgtcgtctaatagtcgcgaaatttaacgactaaaatgtctctaaaaaagcgattacccaaacttagtcgtaactttgtcgctcttttgcgactaaaatacgattacgttatttagcgactctcgattagcgactaattttaatagtcgtttatttgtcgtaaataggagtttaacgactacagagtaactaatactgtagtcggtaaatgacaattttcttgtagtgactggattatcagccactgtaaatgcgggttactattagtttataagaattatgttttgggtttttatgtgtgtttaaactatatttgagctagttagacttacttaactctttagcattttcgctatccttaaagtgtgtcaataagaaaagaaaacttattaaagcaatatttttacaagttatacctatcaaattttggagtgcatgcaaatgagatttcgaagataggattcgatcggtcagttgcatatgtgatcgtaatataatgatggccattggccaacggacccgacaacgtgacctgtttttacattattgatcctttctctctagttttcgaataaaaaaaagactagtattaatttgatattttccaattgaacattaagaacgtggagccaagtggctgtggttaatacatatatgtatgattatatggtagtggcatcgcttactataagataagctaaacaaagaaaaaacttttatatttcctatccaaagaaagactagagagtggtagagaa

SEQ ID NO: 9983 - DNA, 3000 bp, Unknown
  misc_feature (1)..( 3000): cDNA_ID_3035045_gDNA_ID_2096299_Annot_ID_195643 3000 nt of promoter + ATG
gattctctccggcttaattttgctacgacgatacaaaaccaccgcaaactgccgcatctgagtctggttagctgaaaaccgataaaggagggatcttggaggaagacgaagagaaaaaaaccaatacaatagatttctctaactgaatgtcccggtttttattaaaccgtttcttcggatttccagtttagattaaccagcgcgtgtcttccggttcgaattggaaatgtcagtttctcttcattcagttgaaaagttcattagctaatgaacaaagtcacaaacacaattgcttaggaatatttatttgtatacaaagatataataaacataaacagtcccaaattcgatgattttctctattaacttgatcgctgttctctgatttaactgatccatcaaaccaatatcaaattctgacttaactttcatatgtaaccgatccaacaattggtatcagaaacaacaacactagcattttcttttgctgaagaaccacactagcatgatatcttctagattttctacgtggagaagaacaatcattcatgtagccacttatcaggaatcttttgtgtttggagactacaaagtaaagcctcttcacatattaattattatctaaatctcaaaacaaaacctacctaatgtagctaaaattaccaactcttatgtgagccaatacaaaacaaacagagaaacaagtttttctttgagtgttatttgagttaatgtcactttcttctcgaccatatatatttctcattagcaagcgaaaatgaacgatactacgttgtacataaaactatgattcttaaatcgtataccaaccctttgatgcaataatttcaccaagatggagaatcatacgtgttgcaacttttgaaggaaatctatagtaagtcaataccaactctttggactttgatgcaataaccaagattggaaaaccacttttgaagaaatttgttatatttggagactacaagtataatcccaactcttatatatgtgagataaaaaaacaaaccagctacaagaaacacgtttttattgaagttactgtcactttcttcctactaccaaatgtcacataaaacaaagaaatgggatttaaataataattttgggtctgttaataagagatgtttcgagatgaaaggagagaaagagagagagattaagcaatggagaagaaaatggaagcaaagagaaggatagtgttagttccaattccagcacaaggtcatgtaactccactgatgcaacttgggaaagtacttaactcgaagggcttctcaattacagttgttgagggacatttcaatcaagtaagctcttcttctcaacacttccctggttttcagtttgtcaccataaaagaaagcttaccagagtctgaattcgagaaactcggaggaatcgagtctatgataacgctcaacaaaacaagcgaggcaagcttcaaggactgtataagtcagttgttgctacaacaaggcaatgatattgcatgtatcatttacgacgagtacatgtacttctgtggagctgcagctaaggagttcagcattcctagtgtcatattcagcactcaaagtgctgcaaattacgtttcacgttgtgtaattagctaactcaatgcagacaagttcttgcttgacatggaaggtaaccaaaacaagcttaataaccaatcttgaaatgatcactcttttaacttaaccttggtatttgtttttttcaactttgcagatcctgatatgcaagacaaggtggtggaaaatttgtatccattacgatacaaagacctaccgacttcaggaatggggccactagatcgattttttgagctctgtagggaagtagccaacaaaagaacagcttcagctgttatcatcaacacggtgagctgtctagagagctcgtctctgtcatggctggaacaaaaagtaggaatttctgtgtatccattaggccctcttcacatgacagattcatcaccttctagtttacttgaagaggacaggagctgcattgaatggctgaacaagcagaaaccaaagtcagtgatatacataagcataggaacacttggtcaaatggaaaccaaggaagttttggagatgtcttgggggttgtgtaatagcaaccaaccatttctatgggttatccgagcgggttctatccttggcactaacggaatagagtcattgccagaggatgtcaataaaatggtctctgaaagaggatacattgtgaaacgagcaccgcagatagaagtacttggacatcctgcagtgggaggcttctggagccactgtggatggaactcaatactcgagagcattggagaaggagttccaatgatttgcaagccctttcatggcgagcaaaagttgaatgcaatgtatatagaaagtgtttggagaatagggtttcaggtggaaggtaaagtggatagaggagaggttgagagagctgtgaagaggttgatcgtggatgacgaaggtgcggggatgcgagagagagcccttgttctgaaagagaagatcaaagcctctgtcagtagtggaggcgcctcatacaacgcattggaagatattgtcaattacttgaagacaaagcaaagatgttgaacttcatgtaatattaattgaattgttgcaaaatttgcaaagtgtggtttcttttgtatcactcttggcagtttgctcaatatagaattgttgcatcacaataaacatcttttcttttgtctttgattactactctctctaacaaaataaagagatgtaactacttgcgtacaccatcgaccacatgcttcacatgtgcgcaaagagagctaacaaaacattatacggatgaattagtgtccacaagcgagaatctgatatttatatatataaaacgttcaaagaagatgagaagcagagtaatctataagcccggagcttagagagctacttattagttttcttgtaggttttggaaatg

SEQ ID NO: 9984 - DNA, 3000 bp, Unknown
  misc_feature (1)..( 3000): cDNA_ID_2186844_gDNA_ID_2096299_Annot_ID_195647 3000 nt of promoter + ATG
agtgataggtaaattttgtcaaagagaaattgaaagcctccgtaagaagtggagtctgagtgaaaacacggtgctaaactttgctaaagacagaataaatcaaatgaacttcatgtaacatataaaaacataagtaatagaccagctttgatttttatagatcaagcttgttcttgcaaaaattacaaaagtagatgctttgctatgcaaataaaaagctttcactttaattctcatacaaagagaaaatacgtaatggtttgagagttgttgatgtagcttgtgactttatcttcattaccacgtaattgatgtgtcaacctttatcttaacagctaaagtagttgacttgttggcatttaaaatctcttttagaagattatgttgaatagtcattggcgtgcgattattcttgctttgaaaaatgaacagttgactatagaaaatggtctcatttggaagattgtgggattttagttattacttggatcacgtataggattcagagacaagagaagagaaaagaggagagaaatggagaaaagggtagagaagagaaggattgtgttagttccggttgctgcacaaggacatgtaaccccaatgatgcagcttgggaaagcccttcaatcaaagggcttcttaattactgttgctcagagacagttcaatcaaataggctcatcattgcaacactttcctggttttgactttgtcaccataccagaaagcttacctcagtctgaatctaagaaactaggaccagctgagtatcttatgaatctcaacaaaacaagcgaggcaagcttcaaggagtgtataagtcagttatcgatgcaacaaggcaatgatatagcatgtatcatctatgacaagcttatgtacttctgtgaagcagcagctaaggagtttaagattcctagtgttatcttcagcactagcagtgctacaattcaagtttgctactgtgttttaagtgaactcagtgccgagaagttcttgatcgacatgaaaggttcccaaaatagcttaatgacccatttcgaaagcagtcggttcactcattacataatttttgttttcttactttgcagatcctgaaaagcaagataaggtgttggaaggtttgcatcctttaaggtacaaagacctaccaacttcaggatttggaccattagagccacttttggagatgtgtagggaagtagttaacaaaagaacagcttccgctgttatcatcaacacggcgagctgtctagagagcttgtctctgtcatggctgcaacaagaacttggaattccagtgtatccattaggccctcttcacattacagcttcatcgccgggacctagtttactgcaagaggacatgagctgcattgaatggctgaacaagcagaaaccaaggtcagtcatatacataagcttgggaaccaaagctcacatggagaccaaggagatgttagagatggcctggggattgttgaatagcaaccaacctttcttatgggtcatccgacctggctctgttgcaggcttcgagtggatagagttattaccagaggaagtcattaagatggtaacagaaagaggatacatagcgaaatgggcaccgcagatagaagtacttggacatcctgcagtgggaggattctggagccactgtggatggaactcaacactcgagagtattgtggaaggagtcccaatgatttgcaggcctttacaaggcgaacaaaagttaaatgcgatgtatatagaaagtgtttggaaaatagggattcaacttgaaggtgaagtggaaagggaaggtgtagagagagctgtgaagaggttgatcatagatgaagaaggtgcagccatgagggagagggctcttgatttaaaagagaagctcaatgcctcggtaagaagtggaggctcctcatacaacgcactggatgagcttgtcaagttcttgaatacagagtgaagatgcttaacttcatatattacaaaagaacttcgattataagaaaactccaatagaaatgtttacattctttggaatattaatttttgtcttccgttaaagttcataattatcaaaatttaaaacttgaacaatttttgtgttttatgaaaactagaaaacagtctttccacattaaattcacaatattctaatttgtgtgattcaaactagagatgaattttgtatggatatatgtctttgaatttgttgttttgaagaaggacacgaaattgaatacttcctctgtttcatattagttgtaatttaagatttttacacacatattaagaaatcataaaaatctcatttaatctacctcttttatataaaaacatcatttattataaccaattcaaccaataaaaaaatatataattaaatataattagttaaatggtattaaataaataaaaacccttaaactacatttatatagaaacagagggagtatcaatttttttttttaaatgtcgattcaaaatctttagtagactacaaaattgtttagtagactacaatttttagataactttgtctatcattttcccacttgtttagtataggagcatttttgtcagttcaaaccacattaattcaaaattatgacagtttggaaaaaaataaaaatttatggcattattggtaagtttattggtcaaagtggcaaccaaaacttttggtcaagtgacatttttggtaagttttttggtcaaagtggcaaccaaaaatattattcaacatgcaacccaaacttttgaagaaaatttattatatatggagactacaagtaaaaagcctcaagacaaaacctacccaacgtggttaaaaccaccaactcttatatgagacaaaagagaaacacacttttcttggagtgtttccactttattacttcattcagaaagactagttgtcacacaaggaacacgagagtcgagagagtaatatatatatagagagatagagcttaagcaatggagaaaatg

SEQ ID NO: 9985 - DNA, 2516 bp, Unknown
  misc_feature (1)..( 2516): cDNA_ID_2687434_gDNA_ID_2096299_Annot_ID_195648 3000 nt of promoter + ATG
cgagtaaactcttcgcagaagttccctggttttcaatttatcaccataccagattctgaactcgaggcaaatggaccagtcgggtctctaacacagctcaacaaaattatggaggcaagcttcaaggactgtataaggcagttgttgaaacaacaaggcaatgatattgcatgtatcatctacgacgagttcatgtatttttgtggagccgtagctgaggagttgaagcttcccaatttcatcttcagtactcaaactgctacacataaagtttgctgcaatgttttaagcaaacttaatgccaagaagtacttgatcgacatggaaggtatacaaaaactagcttattacccattatgcttactctccttatgttcaacataattttgttttgactttgcagagcatgacgtgcaaaacaaggtagtggaaaatatgcatccattaagatacaaagacttaccaactgcaacatttggagaactagaaccttttttggagctctgtagagatgtagtcaacaaaagaacagcctctgctgttatcatcaacaccgtgacctgtctagagagctcgtctctcacaaggctgcaacaagaactccaaattccggtgtatccattaggccctcttcacattacagattcatcgacaggatttactgtgctgcaagaggataggagctgcgttgaatggctgaacaagcagaaaccaaggtctgtcatatacataagtttaggaagcatggttctcatggaaaccaaggagatgttagagatggcttggggaatgttgaatagcaaccaacctttcttatgggtcatccgacctggatctgtctcaggctccgaggggatagagtcattgccagaggaagtcagtaagatggttttagagaaaggatacattgtgaaatgggcaccacaaatagaagtactaggacatccctcagtgggaggcttttggagccactgtggatggaactcaacactcgagagcattgtggaaggagttccaatgatttgcaggccttatcaaggcgagcagatgttaaatgcaatatatctagagagtgtatggagaatagggattcaggtaggaggtgaactggaaagaggagccgtcgagagagctgtgaagaggttgattgtggataaagaaggtgcaagcatgagggagagaacccttgttttaaaagagaagctcaaagcctctattagaggtggaggctcctcatgcaatgcattagatgagcttgtcaagcacttgaagacagagtgaagaattagaatgcaatgatttttttgttaaatggtttttttaaagagttaatgatgcatatttttcaaagtagatgattttctatgcgcaaataaaaaagttattggaaccagaggaaagatccaagcttttcaaattcaaggaacgtcattgttctaattcgtatttaacattcccaattatgtatagatcatcacaaaaattctatattgaccaaaatatgcgtttactctttcgaaaatgttagcttcttccttcgttgaaagttattgctttcaaaagatatatgaagaatacttaaaatggtatagcaaccctttgatgcaataattgaaaccaagattggagaaccatgcatttagccacttttgagaaaattttattatatttggagactagaaagtaaaacctcttagcatttttgttattattatctaaatctcaagacaaaacctacccaatggtgctcaaaaccaccaactcctatatctatctatatgagacaaaacaaaataaaacaagtttttcttggaattaatgtcatactctcagtaaatataaatgggattttaaccaaaaaaatactttttagtcaacagatttttaataataatttagatcacttatttagagttgttcagcaatgatgttatactaaccaataatcatggatgatgaagatgcaggtatgacttatgagtgataggtaaattttgtcaaagagaaattgaaagcctccgtaagaagtggagtctgagtgaaaacacggtgctaaactttgctaaagacagaataaatcaaatgaacttcatgtaacatataaaaacataagtaatagaccagctttgatttttatagatcaagcttgttcttgcaaaaattacaaaagtagatgctttgctatgcaaataaaaagctttcactttaattctcatacaaagagaaaatacgtaatggtttgagagttgttgatgtagcttgtgactttatcttcattaccacgtaattgatgtgtcaacctttatcttaacagctaaagtagttgacttgttggcatttaaaatctcttttagaagattatgttgaatagtcattggcgtgcgattattcttgctttgaaaaatgaacagttgactatagaaaatggtctcatttggaagattgtgggattttagttattacttggatcacgtataggattcagagacaagagaagagaaaagaggagagaaatg

SEQ ID NO: 9986 - DNA, 3000 bp, Unknown
  misc_feature (1)..( 3000): cDNA_ID_2186836_gDNA_ID_2096299_Annot_ID_195645 3000 nt of promoter + ATG
aaacgtcattttcagcaccacaagtgccacggcttttgtttgccgctctgcattcgacaaactttatgcaaacagtatcctgactcccttgaaaggtactcttgaattctctgtcttctattcttgctggtttctataatctgtaacagcatggttcttgacctttttgcagaacccaaaggacaacaaaacgagctagtgccagagtttcatcccctgagatgcaaagactttccggtttcacattgggcatcattagaaagcatgatggagctgtataggaatacagttgacaaacggacagcttcctcggtgataatcaacacagcgagctgtctagagagctcatctctgtctcgtctgcagcaacagctacaaattccagtttatcctataggccctcttcacctggtggcatcagcttctacgagtcttcttgaagagaacaagagctgtattgaatggttgaacaaacaaaagaaaaactctgtgatattcgtaagcttgggaagcttagctttgatggaaatcaatgaggtgatagaaactgctttgggattggatagtagcaagcaacagttcttgtgggtcattcggccagggtcagtacgtggttcggaatggatagagaacttgcctaaggagtttagtaagataatttcgggtcgaggttacattgtgaaatgggctccacagaaggaagtactttctcatcctgcagtaggaggattttggagccattgcggatggaactcgacactagagagcatcggggaaggagttccaatgatttgcaagccgttttccagtgatcaaatggtgaatgcgagatacttggagtgtgtatggaaaattgggattcaagttgagggtgatctagacagaggagcggtcgagagagctgtgaggaggttaatggtggaggaagaaggggaggggatgaggaagagagctatcagtttgaaagagcaacttagagcctctgttataagtggaggttcttcacacaactcgctagaggagtttgtacactacatgaggactctatgaagacttttgtctttactaaaacaccaaaacttcaagattcctctttcaactattccaagttgtttttagagaaagtatcatatcctaaaatatctaagtgatgccaagatgtatttggataaatgaatgaacaaagccatttcattgtgttcgctaacatcaacaacttgaatcaccataaatctcattaccagaaaaatgaccataacgtcttgtctaactctagaaactaataagatatataaacataaaagaacaaaagaaatggatcaactcacttctttaatatgctttgaaatctgttgccaaatcaaccatcttccccgaatcacaacttgccagaactttgccatgccattgcagaagatagtgaggaatctcctctcgaaaaatctctgtactttacagtatctttgctgtaacagaaaatttcaaatggtcatttttgatgctcactttctcccaaccacataatgtttagagtaagatctaactaatgtaaattaaacaatgtactaattcacataccggctcatactacactcctacggtaagtcttcccatcttgcttacaagccatgcactctttttctgaattgtggagttaaaagatcattgttgtgaacaaaagtaaacaaatggaaattgcagaggagctccaggtgcttaccaatgagaagaagaccagaatctctaagcggtaaattggtttatccatatctcaaatccatgattccatcttcactacagaatcaaaatatcatcatgttcacattgttacattatatgaaaacatcaaatctaagtacaatgatagacgacaacacagttcctgcaaccatggaactcaaattgaatatgcaatgactcttggttaaagacagagcctttgggatattacatacataaacatataacttaagcactaattcatgaatttacatgttatatatgtatgatgacgaagttccaattccaagaaagatcaaaaactacaaagttacctcttttacttctggcggagtcgttgacggagattcactccggctcgttcttgctgcgacggtcgaaaaccacagaaaattgtcgcaggtgggtctggttagtgtaaaaaccgataaaggagggattttgacattttgttttggaggaggaagacgaggagatttcttgaaccgaatgtcccggtttttctaaaaccacttctcagactcccggttcatattaaccagcgcgtgcgtgtcgtctggttttcatcatgaccaacggtcaagatcaaaaggatcgccttttttagtagatggtgttcgatgaaatgctcgttagagacgttaaagttgtagtgacaacaaattagtgtttatcattttcagaatcggtataatggaaatgtcagtttcttcattcatttgaaattgtgacaagatccaactccatcatttcaccacgcaataactaaactgttagggacaaaacgcaacatgaatgaatcaatgtacacaagtgtgagaacctgatattcctatcattgaattgtatggaacatgccaaacttagagagtaaagtgtacgtgttctattttgtaatgcaaatatgatgcaattcaaatcaaacacgagtttatctcctttggcacgtttctcaatatagattgctgcaccagaaaaagacaattttttctgtttgaagcctcttttgacatgaagcgaaatgcggcaagagaaccaagaagacaatagcatttttgcttttctttggttaccactctctaacaagataaagaaatgtaacaccatccaccacatgattcacatgttgtgacgaagagagccaacaaaacgttcgagagtcagatactttatatatcggttaccgaagtgatcgaaaccgcgaaccacgaagctgagcaggatacttttaattagtagttcatgcaggttttgggaatg

SEQ ID NO: 9987 - DNA, 3000 bp, Unknown
  misc_feature (1)..( 3000): cDNA_ID_1442222_gDNA_ID_2096299_Annot_ID_195641 3000 nt of promoter + ATG
tggctgaaacctatgtcagcaagaaacattggaaagacttttgcttttgttaaaatgtcactttcttccttttgttggacgttcattggtatgtggctctccaatcactcgtaaggtcatcatatgaggaatacttgattgtattaaaatggcttcttctgaaacatttgattggtttataaatttttaaaataaagtttgtgtctgacgccatctctcacagaaataaacaattcactctcttgattaccactttaagaagtctgcagacaaataaaacaaagggacttacctcttacaagatagaaaaatgagtatatgaaatttgtctgcagtcttctcttggtttagcttctacatgatactttgtatgatcctctcctgaacagatgcaatttgggactttgcggtggaaaactccgcaaaagataagaaattttgtagacaccaagaacctgtaacaacaatcaaatatgatcaagacctgcaaaagatgcagaacccaaacataaaagagaaactgctcattctacctaaaagcttgcacaggtaatatcttgtctagatcaaaaaacatcacaagactttcccaatgaggaaaccaaaaccaaaataacatgacactatcacttctgcaaaaagagtacacaagaaaatgtcgagccacatgacacatatgctctcttggatttgacataactcacagtgttagttacctagtcccgaagagaaaattaaacacatggttttcaaaaccaccatataattccgaagatgaatcaaacatgatctggattacattaagtctcaagtcacatgagagcaattttgatacttaattctcaataacatttcaacatagcacaagaatctcaaaatcaaattcaacttagttgattatattaactctgtcaacatcaccaaacaagtgattattaagactttattgtataccatttatagtaaaagacagaaacttgatgaaaatttcgatcaaatcgagtaagaattataactgtactgtacttaaaaaaacagaaacttgacaataattatcagttccacgagcaataacaagctcacctatctcttcctcccccattgaatccatctatagactctttttaattctcatttgcgcttccacctccaacagaaggataagaagccatggatccaaacttattctgctgcatcatataaggatttgactcaaacgcaccatttccaccagctccatgatgatgacgatgattctgatgataaggatcatgattatgattttgatgatgatatccttgcatacccatatgatgtgcataaactggcatctgcatcatctgttgcgttccatacgcccccggaatcggcactccaacattaccgctgctaccgccaccgccaccgatatcttggaagctctgtggaggaacaggtgttgaagagaagagcttatccgaagcagagggaccttcattagtcaatccctgcatccttttgaggtaaagcctatacttttgaagatgagacgcaacgttctcacgagttaatccttcaacgttcatcagctgcataatcgtcttcggaacagcgtttttgatccctaagtgagctacaacgtcaacgaatctcttgtgtagctgcggtgtccacactaaacgcggtcgtttaagtgttttcccagatagatcttcagttcctgaatctccttcttccgccgccatcgccgaatccggatccacaccgccaccgtcatctccatcaccgtttgatgtcttttgcttcttcgaatccgatccaggactgctagatccaactcgatcttcctcctccacgttattattcgacgacgaggtatttggacctgaagatccaccacgtagcgacgagagcgtcgtctccgatgcacgattcacatcctgaatcgtacggcttctctccggtgtgatactaaacgccatcgccaaattcggtggaatcagagagtaagaaagagatgctagatcttcgtcgcttggtaatcccatctcccattcagaaaccctatctccgtcgccggaaacatcgtaatcgctcatttgtacttcctctcccatttcaaactctctaatttctcgaaattcagttagagattgagctcttcgaagctcaaaatcgataaaaattcaaatctgagatcggagaagaagagaagtttggtttgtgaagatgatgagcaaacaatttttttttttttttttttcagaagtgaaacaatttcgaaaaagagaagattatcacttgttttatatttttcttttccaggaaaaagcgcaatattttaattccaacgtggacgagttagctagatattttagatcttctaaatatcttttcaaaccgacctaaccaatctcttttcaacacgtcatcagttcacattatgtatcaatagttacgatctaggtgattgaaattgaaattaccaaactaggcacgtaagatggagccacgtggagtgaaaagagccaagtcagctatttgtgagggtttttcagtaaattactaccgacttagcaagttgtgtttgcgggcctagagagaaagtgggcaaaaccggtgggttcggccagctggagagtgaaaagaggagaaagattcggtgatgagtatctacagtactgacacgcaatgtgatctttccaccgttggattgttgttttagatatttatagaagcatataaagatcaatctaacggcacagattggctggcacctaacttttaagaaaatgaaaataattattgtggaaaggctcagagaggtttagttactctgtttagcttcttcaacgtcacgggttcgatgccccaacttcacaaactgacgaaacgttatcttcttctcaaatttctgattctctgagatttccccaatttttcatcttcttcgagtgattagtacagattagggttttattcgttattattgtctatattactccttgattgtggtcgatg

SEQ ID NO: 9988 - DNA, 3000 bp, Unknown
  misc_feature (1)..( 3000): cDNA_ID_2186763_gDNA_ID_2096299_Annot_ID_195622 3000 nt of promoter + ATG
cagaacttcaggacaccggaaacgctctgccccgatggttatcacttgaccgtctggcagctcgaagctcttctccacagatgagctggttttggaagtctcaagctcttgctcatagtccaaggcaatgtacgagagcttctccttcatgtctctgacaatctcacgctcagcagttgtggtgaatgagtaaccacgctctgtcaggattttcatgaggtggtcggttaggtcacgacctgcaagatcaagacgcaggattgcgtgtggaagtgcataaccctcgtagattggtaccgtgtggctcacaccatctccagagtccaaaacaatacctaaccaacaaaataaaaacaatgagagcaaatgaaatcgaaccaaagtgaactttatttaaaccaaacggtaaaatttgagtgtagtaatgtactgaccagtagtacggccactagcatagagggagagaacagcttgaatggcaacatacatagcaggagtgttgaatgtttcaaacatgatctgtgtcatcttctcacggttagccttcggattaagcggcgcttcggttagcaaaaccggatgctcttccggggcaacacgcagctcattgtagaaagtgtgatgccaaatcttctccatatcatcccagttgttgacaataccatgctcaattggatacttgagagtcaagataccacgtttcgactgtgcctcgtctccgacgtatgcatccttttgtcccattccaaccatcactcccgtgtgacgtggacggccaacgatacttgggaatacagctctaggagcatcatcacctgcaaaaccagcctacacgcacatagttgaattgcttaacttatggcacataataacattcacaaatcttgtttctctaaagctttttgattaccttgaccattccagtcccgttatcgcaaacgagcggctgaatatcttcaccgtccgccatttttcaatctctagctgattacatcaacataagaaacatagcaaattcaaaggaaacaccaataattaatgccaatctcataactaaatctaaaacaataaaatgtaaccattaaatctaattcgttacgtataccataatcaaacgcattagcgttacatttatattggttttgcctccttgtgatcaaaattttgacatcaaataaacaaaaaaaataacatgtacctgatgaatttacgtagatctagaagaaaagaaagaggttgtggaatcgtgccctgaaattgggtttcaaaaatttctggaaaacagaagcaactttggcccttaatatcgttcatacacgggtctgagccgttagttttcttcattgagaccaatatctcagcctctatagacacgtgtccatctatttttaggttggagaattaagaaaacaccagcctaacctgaaaatacggtttaggctctgttttaccggaagaatcgggtcaccgaacaagcatgagtggtaatgagcccatttgggcctaagaaaaaggttaaaaggccattttctttagattattcaattttagacaatcagtgaaatttcagtaacatttccttctagtttctagtaatttatgtgttcaaccgaaatttcagtgctatgtaaaagagtgctatccaaactataattaagaaaaagggtaaaagatcttagtgggtgaggtatggaaattgctgaaaaagttctgggaagaatgagagtaatgatgataacggtaattgacaaatgtgataatgatgatagggatatgtgcaagtaaaataatcaagcatgtgcataagattcattatttgacatgagactttattatgtgtttttgcttattatagtttcttacaaaacaaatgaagaaagtagtgaacaacatacaacaatactaaataacagtgtgattgttgaagaaatagtttccatttaatatttaaaactaggcttccaaggccttgacaaatttcattagagaaggatttatttttaattagtggaatatatgatcaagaaaataaattgacattttggtatagattagggacattggagacagaggggttgattttgagattgaattttgacttttctgtgtatttagcttttagccaccaattaaagcaaacattcattcattttgtcatgttgatcgctgcacttatctaactagagtattattcccttttcgaggtacccagaggattaagcattttttttaaaaaaagagcctaatactttacctaataacaagaaacatgtagagtagaaacaagtaaaaaaaagtttaaaagaagaaggattagatcaaaagaaataactattttaggataatttcgttgtccagttgaactatttttaatttttctttttaaaatattttcttgcatgattagagagatagaggtataaaacctttttaattcttcaattatcactaaatccaaaattataaatgcattaacaattttgttcttctatgacaccccaaaaatgtcaccaactacagcaaaaaagtgaccactatatccgtaaaaattcgtatattcaatccgtgaaaatataatagttgaaaaatattcaaaatttcacaagaaaattagtaattttatagagaaataatttaaatgataatataatatattaatgtaaaaaataaaacaaacacaatcgtaaccggtcccgcggcttcgtggtcgaatttacctttgttccggtttagttcttaagccgagagaatcgtacaagttgcaataagctaaagccgtcagctaaacgacgccgttttcgaaaagtcctcgtcttctctctcacacaatctctctttctcagaaatctctctctttcgcactttctgcaaatggttctcttcttcctttaagctcaatctcgccactggagtctcaatcgggaaagatctccatcttctccggaggaaaaacggatccgtaaatcgtgaatttttaaacagagaagaatcaattcaatg

SEQ ID NO: 9989 - DNA, 3000 bp, Unknown
  misc_feature (1)..( 3000): cDNA_ID_2109031_gDNA_ID_2096299_Annot_ID_195631 3000 nt of promoter + ATG
taatctataaattagaagttgaagagcttacattaattatttagtggacatagggcaaatgttaaagtgatgatgtgtcaatcatatggaaagagttggccaactttcatatatatgattggagtgaatcgaatctacatcattcatcaaccaaaaaataatctagaaaaatatatatcataatttctaactaaactaaacaaaaacgctcgttgttatattttagctttttaaatataataaagctcgtattgacaaagctaacggataaacccttattattttgactggttaattgttatctcaaagaaaaagtatttaacatcctgactttaaatttagaaaagttcatcgactatttgtgatgtcccttcaaaaagattaaaaaaccataacaaaagttaaatgtttctctgggttgtacaaatgttagatgttaactggaccagatcacatataatataagaaaatgaacctgattaattctctttactgagctaaattttttactgacaagtctatcaaattttaccatcatacttaaatcctcaaaaacacataaactatacagtacttttttcttattacgtatttactattctatgcatgaaattgcgtaaatgtttggttgtatgcatattagaatattctttttatttttctctccaacagatttaatattgaacggtggtgttcgtatgatataaattcaaaaccacccaccttttatcctttcgaactttttcgagataggataagatgacataattattttatttgtaatttaggaaaaggggtaggcctttttttttttctttcaaattaatgattgtggggctaaaaaaaataatttgtgtccaacacaggatataatattttgaaacttgaacgtaaatgttgacttttgatttttttttcttctcagcttttgttaaatttaaactcgttcccttatcagatttattaaaatggtgagtgacgaaaaaaaaaaaaatggtgagtgaaacgttagagaaatcgacgtatgaaatgaaattatgagagtgtacagagaaatatttgaacaatacttagagctgacaacaaattcaaacactgaattagttcttgaagacaaactcgctctttgctatagttgaggagaagaatcccacatactcaattatagatcgagaacgaatctttacgttttagttttcttgtcacatttactatgtaaaatggttcatattattattaaattttcatttattttcaaaataaattttttacaaatatatatatattttaatatgatgttaaaggtttttgtacataaattaccttttaattttgtttggtttatttagaaatcaaaatgtaatttattatctacctaaaaacacggttctttcagtataaaaatttacagaatataaatcattaaaagcaaataactaattagtattgtattaaaaattaaacacttatctaataatacaaaacttttgttctaaaacatgaaaacggaagaagtatgtttcttttaaaactatgaaattcatataccatattcagttttatttaatatcatttaatatgaatcgactacctcataattatacaatatagcaaactagggaccatcttatcttttacgtgattcctaaaacataaatatttatgggaatgttgcccaaaaaaaaaaatatatatatatatatatttatgggaattttatcattttcttcctattaagaaaaacctcaaaaataaaaatattaaaatacaaaaggaaaacataaaagcacaaacgaatattccaaatataaactaaaaataatactcataaacccaaaaatacatttttcctttcccgaaattcttttttttgttaatattattatcatgacaagacgaaatttactcaaaaggctacgaaccaaagccatgtgatgactacatcagtaccacgtgtcaagatctaaggacttaacgagttacgagtgtgtcgtgggccatcgaccatggaaaagcaacgagtctttaggtgaatgttttacttgctataaccggtaacaacgggtctggtaataccggtagctccggtggttggttgagttatatggctatgggggtttaagcaagaaagacgtggtcgtgttcttcttataagggtttttgtttataatttggtaatcgaaaaagagagatttgataaaatcctttgtgttgaaggaaaaaaaaatcatataggtaacgtttgatacaagtaaaaaaaaaaaatttccatcactttcttgggtaaaaaaaacatgggttagaggaaaaactggggaaaagattttagattaagtgcgtaaagaattctgattccttcgtctccgatctctcatttttctggagaaattgtcaaaaatttcagatatctatattgtcttggaactgaagattcatcgaaaggtgagaaagatttaaactttttttgatggtttttgtgttctcgattttgtcaaaagtttttgtgtttgtttgatcatcgagaaacttagtaaaaattcattttttatgtgaatttagatttggaattttcaaattcaagttcttttggtttggatcttaaaagggtttttgttatctttttgaacttatcatcatcttcgattgaaatttttcgttttcttatatgatcagaatcatctcattcatcgatctgtgaactccgatctgagaatttgaaagtgtctctctttttgttctaagttgatctgtttatcctttaattcaaagatcgaagcttttttataattgaattacgttttgtgttcttcaattcggatcttgtgtttattagggttttagaatggtttatcagatttgatttgatattaccgatctgtgattcttgaattgaattgagtcttcttatggttcttgtttcttatatactacagattggtgagttttattcgctgcttatcgcttgtggcaatcacatcatctgtgttatgcatccaagta

SEQ ID NO: 9990 - DNA, 3000 bp, Unknown
  misc_feature (1)..( 3000): cDNA_ID_3035052_gDNA_ID_2096299_Annot_ID_195633 3000 nt of
tctgtgtgtctgtccatgcgagtcttaattactttctagcaaatctgtcggttagtgatgaatgtaacatgatatgtgaagattcgattaaattatattagcaactttgcaatccctctaaactaacaacaaaaacgatcaaatatagccttaaattaatttctttaattattactagtgagttttgttctccaacaactattatattcttctatattacttttcacttgaacaaatatactataggttgcctgatttttcagtcaaacacttattgcattctcaaaatttctcccaaacttttttgctctgaaaattcaccatcaacttacatttttcataaaattcctacatgtacttttggattcattcctacaactacgcctccaattaaatcggtgattaaaccatacttaaccatataatcgcgtttaggcaaccacgtttaagattgcccatataatcactcagcaacccattaccaaaacgacgtcgtatttgtcctgcaattgatttgggcttaaccgaatcaaaatcgatttgggcctgaatcaaaacagcccaaaggcaaaaccacgtcgtttcattcttcttctaatttaactcaatggattcgcgatttggggattttgagaactagggttcttgagagaaatttgtgttcgagttcaaattatgtcttactggtttgagaattcaaataaagatatgcaggttagtgagttactgtatcagagcgatttggatgatcctgatttcaccgttccagagagtgagagcaatgtcgacggaggaagttgtagcggggatgagggaaacgacgataatgattatacgaattttaagaaaaatgtaagttgatggtgaaattttcagagcagaaaagtttgggggggggggggaggggaacaaggctgaaaatcaggcaatccatataactttagttttaaaaaaattggtaatgttaaattagaaattcaaagaaaaatcgtttttacacaatgtgcaatgtttgtatagaaatgtttgaaaattttaaaatttagaaagaaacttcagactcttccgcctctagctccttgatgcaaaccaaatttgaaagcaattgtcgtaacgccggtctccgcttgcttggattgaggagagcttgtttctgatgtgctttatatctatagcatccaaaacttttgtttaaaaaactagactacatgaagattgttgtgatctttgatgatataaaatacaattatatttctctttacattgatatatagaagaatatattagttgcatcatatatatatatatatatatatatatattgtacgtaaaaaaaaattgaaatttgtaataaaaattgaatttttttaatactttgacataagtcatctttttaccaatcggttaaaacttttttgatatacatgtctattaatttatgtttgaaattttaccaaccctaagtgttatttggatcatgaacataaaaaatattgattgttgttgtttgaatatttgaaccatatatagacagattaaattgatatttattgcatctaaaacttttgttcattgtgatttgaagatattaaatacaattacttctctttacattgaaattactctttttgacatatcactatgtttcttccttctactttgagattgtccaaggacaagatggaaaaggaacatgctaaacagggggaaaatacgaaggatccatatgaacaatgtggtcaatggtcatctaacaataatttagttggatcaaagacatgtatataaagagacaataaattttgggaccaatgacaaatacctaaagaacatttaatgttttatgaaagaaaaaaaaaacactttggaccaatttcatatccacatgtgagcatgtgagttcttacaagacatggcctatgaagacttctcagttcccactactcacattcatcttagtacacctatcactgtccattcaactatatgaaaacttagttttacgaaaagtattacaatttctgttttagttaaagatatatattggaaaacccaaaaagaaaaactaaagagaatggactactttgcacacgatgcacgaccagagatagttttcttttcctatattattgaagattttttaatatctcaacgtttattcaaatttgagacatgatgttaagtaagttaacagagcatgttaacaaagttaattttcttttaacagacctgtgaattgaaaacgatagcatttcctctcacaataaacaacatcgttttgtcgtaattgttcaataaaatcccgagtgtcaaattatatgaaaatttaggatcatggattttgctcgatttagagatataagattgaatttaaggatttcgttcatccgttacgacaaaaagacgtcattttgttattatagaaaacaatgtcgttttcagttaacatgtatattgacaaaaaattaacttcgttaacgggatatgttaacctatttaaccaacgaaagtttgttatttttgaaaaatagaagtttgatatttatttcgtttcatcgagagttaaagatccaaatcaactttttcaataagttggggattttaattacatttttcatttctaaaaaacaattaatttagcaattttttaatttgtagaaaaggctttttaaatctcatgcttaattgaggcccataagcccaatagtattttattttcagttttcacataaagaaaagaagacaaaaattctatcttcttcttcgcggctctgaatccgccattgaagttattttcaagccctcctcaattttcgtttttgttcaatattaatttgtaagagatctttacgcttcagtttctgaaagaactttgcgcttctgattttgcaaaattggaagagagtgcttccgttgcgcttttgaagcgtgaaatcgtgtgtcttttgacgcttccatgctacataacgctagttgtgagattgtgtttggaaaaagatg

SEQ ID NO: 9991 - DNA, 3000 bp, Unknown
  misc_feature (1)..( 3000): cDNA_ID_2186752_gDNA_ID_2096299_Annot_ID_195619 3000 nt of promoter + ATG
agtgcatgcaaatgagatttcgaagataggattcgatcggtcagttgcatatgtgatcgtaatataatgatggccattggccaacggacccgacaacgtgacctgtttttacattattgatcctttctctctagttttcgaataaaaaaaagactagtattaatttgatattttccaattgaacattaagaacgtggagccaagtggctgtggttaatacatatatgtatgattatatggtagtggcatcgcttactataagataagctaaacaaagaaaaaacttttatatttcctatccaaagaaagactagagagtggtagagaaatggagaataaaactgaggaagaggtatcaatcatcaaagtttcttcccttacttgcatcgatctcgacaactctgatcttcatcaatcagctgttttactcaagcaggtctacgtccatttatttttcttaaaactgattacagtatgaacattataccttccgcgaaaaaacattattaattcggtcattatgtgttatatatatattcttgttccaggcatgtctcgatagtggatttttctatgtcataaatcatggtataagtgaggaactcaaggatgaggctttcgagcacagcaagaagttcttcgctcttcctttggaagagaagatgaaagtcttgagaaacgaaaagtatcgaggctatgcaccattccatgattctctcttagaccctgaaaaccaagtccgaggtctgtcagatcagctttcgcttgcttaggctaaaagttttgttgttcatgtatatctcactcttgttgtaatgtgatggggtttaggggactacaaagagggttttaccattgggttcgaaggtagcaaagatggtccccattgggataaaccattccatagccccaatatttggcctaaccctggttagtttttaccgtctcattgtttgttaatttatgctttgatctttaaataaactctaatgttttttgtagacgttttgcccggatggcgggagaccatggagaaatattatcaagaagcattgtaagtgtcatgtttgtttagaaaatatttaaatagggaaatcaagtgggaaaatttgctaatgacttaaaggataaaaatttagttggaaattaggtggaaagtttgatttaaaacaacttgactctttttctcccaatgaatgtgacatctctctctccacattagttataaacaaaaatattccacatatagaattccctcagagcatccacattggacatacctttgtaggtgtttcaaaagtaaattaagattaaatttaaagacatcttctattttgggggtctgaaatgtctttctaaatactctattacacatttaaagacacaccttcttgtttcttctattatttttaactagatgaattctcacggtacgcgtgggtttgttttaaaaattgttaataaaaatatgttaattgttttaatcgctaatttatgtttatttttttgtttattattgtataactaatagaattagactcataatagtatttacgtttcgacagttgttccaaataccaccacctcagtgataatttaagtgagtgtatatttaatgttatgtatatcgatattgtgaacttgagttgtatctaatgttttcattttttaatttccgtataggttatacatgatgatggttttgtatcctatttatggtacttgtcccttggtaaacatttactgatgttgtttgaaacacatataaaaataaattggttatgatgttgtcccgtggtaaacaatgtctgtttgaatatttatagagcttatagtagtgaaagcttgtaatcccataagctgggagtgtgaatatgttttagtgaaataaattgtgcatctatttaaaagacagttacagctgcttgttccttgattcagttctgtgtagcttctactgtggcatccattctggcagttacaaggtataaaacgttttttctaaataaatatgatgtacagaaagggagactacattgttggatttagaagcattaagccatcattgaaatggggccgacctattagtattgcactctaatagattctaaaacacatatggcccatctggcatgagctattttgtttactctatttgacacttataattagaagctgatgtgtaaaaaataaaagctgaatcatattaatgaaatgtttttattggaagattagaaagctgatgtgtcatctccagaaaagcttaaaatgctgacgtggcaaaatgatggagagagttgagcttctttcatatatatgatttaaagacatcttcatacaatctccattgcacataaaaatgagggtatttaatttgaaataagattataaaaagaaaacaatagacatttttagttagagagagtctagatagagacatttgaatactctctctcttgtatggttcttcccgtgtcaactttttatttgtttttaaattttaaataattaaactaaataaaaagtattattattaaattttaaagatacacttatcattagttaaccaatgcagatgctctcaaagtatcaccaatgaagatggtctaaacgacttcagttacttttggtctaaattttttgttatattgcttttttggtcacaaatatcagaccattaattaaggggatggtaaaaaaaaatatcatagcattgagtaacaatgatatatcactaattttcctttattcgtcattgtatttatagttaaaacttaaatacgaaaaaaagaaaaacgttaggcaaatatttagaattctgaactctagtatcatgtcaaaacttatggatatgcatcttaaaattaattgacaatactatactaggtgccatacatatattttctgtggaactcttaaggaacaaagtttttcaaactgtatacttatgatgagcccttctacatgatcaggagggtttgtaagtctattgcgaaaata

SEQ ID NO: 9992 - DNA, 3000 bp, Unknown
  misc_feature (1)..( 3000): cDNA_ID_2186993_gDNA_ID_2096300_Annot_ID_195663 3000 nt of promoter + ATG
tcacaaatagaatttgtgtcacaaaatacgtacatgctatatagtgttcataacccaaactcataccagttagatatttaatttgatgtcaagtttggtttcaaattattttatatagtactcataatccaaattatttttgttggataatttgttttgaatgaaaaatgtattagtttacattatttcaaaagtttgttcaataatatattatggatttatttaaaaaaaaatcaggttgaaaaaaagaaaaaagaaaaccaaaatatttcaaaataagtatgtacaatttattgtttatatatttctaaatgtaaagcataattataattattttaaattaatcagaatttatttaaaaatactaacaatcaatagtatttttgtaatattttacccttcgtaaggttgtttattttcaatgattcccaattaatagtatagatgtttaagaactacaacacgaaatttgttcaccaaaacaaaaaatatgcaacattaggactttcaaaaaattattcatcctaatactattttcgtctaaatatactttgctttcctaaaataattgtctacaataaaaaagttataaattaatatttaataaattctaattttatatgcggctattataatatttgacgttactccataaaacaaaaagaattcaaaatatgctatgtatatatattggaaagaaaaagaacactagaaagagaaaaacaaatatagttagagagatcaaatttgtatgtattgacttaaaattaggctaagtagaccaagttgatcatttcagaataatgtctctttagattctattttatgacttaagcatgtgttttacttgccttatagatgacctgaacatgttaagaaactatttctcatatatttagggttttgtacatcaacatatttatataagaataagagacgagactctagtttttttcaattaagacattacctaaaacagagtaatcaaatattatgagataaatgtgaatcgtaatcgtatcactaacacgccccctcaagatggagaggcttgtgacactccaatcatcaacacatctgctaattggtcctttgtgttgatatgaactactcggagagcaccttgttgaacttaaccacggatgaaatgataatctatagcaatatgcttcatctttgagtgtaagaccggattagcacaaaggaagatatttttgacgttgtcgcagtacacaacaagtggtgtgttgaaagtaattccaagttatgtgaaaatattacatatatacccaacttagttcagaggccgtgtttgcgacaaccctatactctacttctatagatgatcttgccaccccttccgtttcttggttgtccaagatattgggtttcgtcgtcctaggtagatgtgaaattccggatgaaccaagaatcgtattccccaaactaagaaccactgagtatcactttattagaaatctgattaagaagtttacaactaccttaattggttttacacaagatctaaactactatatcttgtcacctgagatttctctaaacacacaagagtatatcacaagaacacactctttgatctctctagaattccaatcagactaaaccttagtctctaacaatgaaaagcgttgcactagctttttcactcacaatcatggccaactctagcaagcaccttagcacctctatttatatcatcgaggtctttggtcttctaggttagtcttcaagatcttggatcactccagatctttgcgtgaatatcttctttccaaaccgaactcattctgttgtgatctccacgtcattcgttcatttggcggtatatccacgtcagcatcaattacttgatcttcactttaatcttctgaaacagcttccagtttgttccagcaatcaacactccttctggtttgacctgactgaaggtgcactaacaagatgtacgagtacataatcgtctgaatctcaccgcaatctgcatttgaatatgcatgaagaatgagtttgttgtttgccgagaaaaagaggccatgagtgggtgtcccatcaaggtagctagcttagaattcttttagcagcatgtcaatgatcttccgttggacgatgcataatttgtgataaacgattgaccgcataggcaatatcaaatttggtgaaggcaatgtactgcaagcttccaattaattactgcaacgaatgtcacaaagctctcataccatgtaaaaaatgtctttctaatatatttagggttatgtacatcaacatatttatacaagaataagaataagagaggagactctagattattctaattacaagcattacattaaacagagcaatcaaatattatgcgatcaatgtgaatcgtgattgtatcactaacattatatatgacttttgtaatgactagttgtgttgttggtttatatctgattcaaaatctgaagttggtttggttaagtcaattgaagattgaagcagtcggttatctctggttaagggatttctgattaaaccggaaattgaagaagagaagtcaaagactctaactgcagtggagggtttgactattatataaagagtaacagagtctgttacgattatcatcttcttcatctgttttcttctttgaagttttcttgtatcgagagagagagaacttgagagaatcaccattgttgtaagctcggtttgagctgtactcttcataaagcttagtggatttgccggattgattcggctccggatgtaggcttgatcacactgatcttgctgaaccgggtaaacaaatcgtgtgtctttgttcttcgttttctgttctctgatcttgcataagttgagatcgatcattcgcaacatcatttcgatcgttcttaacgctgaattgaatctaatcggagctcaatttcgtaacaaagtggtatcagagccttggtttctgaattgaggaggtttgatgcttcgatagcgttaatg

SEQ ID NO: 9993 - DNA, 3000 bp, Unknown
  misc_feature (1)..( 3000): cDNA_ID_3035102_gDNA_ID_2096300_Annot_ID_195687 3000 nt of promoter + ATG
ctacaatgtgatcaagaaatctctctcagaggttcttgttcattactaccctgtcgccggaaggctgacgatcagtccggaagggaagatcgccgtcaattgcaccggagaaggtgtagtggttgtggaagctgaggctaactgtgggatagatacgatcaaagaggccatctcagagaatagaatggagacgctcgagaaacttgtttacgacgttccaggtgcccggaatattcttgagattccaccggtagtagttcaggtgaggttttgatcgatctcttgcgtactaattactatatttttcgattagcttttacataaacttaggttttgcgggaaaataatgtatttacaatgacggcgacatgcttatagacagcagcaaactagagtagcaaatatcctacataatgttcgggagtaatttgcttattttagccacttgataattgatataaatgatcgcatttaatgtcagaaatgagtttaactttttgagtatcaatcacatgtgattgtccaaaatgtagatttatgggagttttgcttgagaaattcaattatacttatttatatgatatatgacaaaatacttttttgtttgtaatagtaaaatcttaatataaaaaaaaaaatcttaatataaaaatataatccaaaaaaatacaactatatatgtaaatatctaaatcatagtttattttaataacaatctccctgaatatcattgggaaaaatgtcaaaaaaatcacgaactttcaaatttgggatgatttaatcttgaactccacggaagacaaataaatcgtaaagtttttgttgactttcaaaataaataacaaagtttttgttgacttgccatttgagtcatgtcgttaaataggttaacagaattattttacggcgttaatatctcgtgtatctgctctgttagaacaaaacgacatcgtttattgcagagacaaaggaacgtcgttttgtttgttgaaacaaatttaaaccctaaatccccaaatcgatttattatctgcgattttgaggtcaaggtgggtctgtgattttgagataatgaaatcgatttggggatttagggtttaaatttgtttcaagacaaaacgacgatgttttgtctctgcaataaacgacgttgttttgttctaacagagcaaataaacgagacattaacgccgtaaattttttctgttaacctatttaacgacatgactcaaatggcaagtcaacaaacactttgtcatttatttcgaaagtcaacaaaaactttacgatttatttatcttccgtgaagttcaaaattaaatcgtcccaaatttgaaagacatttttcccgaatatcatttatgaattatgatacaatgttactaaaaaaatcatttttatgtctcatgcatgtagtaacgaacacacactaatatagtaacaaatgatcagacgttactcttaaaaactagagtggtcatcatgttcaaactttaaggtacattagaccatctaattagaaccatgcgtaattagtattgttaagtaaccaaaagaaataacgacgatcaatagtaagttttttttttttgtgtgtgtaaccaataggtagtacttaagttaaatgtatattatttcattcctatttctttaaattggtatcgattcattctaaaatgttgcatggattttttttaacatctttagataaagttttatgttccgttttttttttcaggtgacaaatttcaaatgtgggggttttgtcctaggactaggcatgagccacaacatgttcgatggagtcgccgctgcggagttcctcaactcgtggtgcgagatggccaagggtcttcctttatccgtcccaccattcttggaccgtacgattctccggtcacgaaaccctcccaaaatcgagttcccacacaatgaattcgacgaaattgaagatatttccgacaccggaaaaatctacgatgaagaaaaactcatctacaaatcatttcttttcgaacccgaaaagcttgagaagctcaagatcatggcgattgaagaaaataacaataataaggtatcaacatttcaagccttaaccgggtttctttggaaatcaagatgcgaagctctacggtttaaaccggaccaacgggttaagcttctgtttgcggcggatggacggtcaagattcatcccacgtctcccgcaaggatattgcgggaacgggattgtgttaaccggtttggtgacatcatcgggagaattagttgggaaccctctttctcactcggtgggtttggtcaagagactggtggagctggttacggacggcttcatgcggtcggctatggactacttcgaggtgaaccggacacggccgagtatgaacgcgacacttttgattacatcctggtcaaaattgacattgcataaactggatttcggttggggagaaccggttttctctggaccggttggtttaccagggagggaagtgatcttgttcttaccaagtggtgatgatatgaagagtatcaatgtgtttcttggccttcctacttcagctatggaagtgtttgaagagcttatgaagatctgaaaaagaacatacattttcataatcaaattatgatatattctaccaaattataagcaaaggaaaattataatctagtcattatttatacatgttatatttgaattcacgtttgtatccattacaaaaatttatgtaattcgcagaaaatatatatatgtcaaattaagttatcggaccggatcgggtcaaagaaaccggattggttaacaaagtcaaacaaacaaatattgacttgagtttcagattccagtaaaatcaaaccggatcgggtctgaatttaaaccaccgggtcggctccatctaaaatctgaagatcatctccgccttatcttgttgactatctctgtactacttacgagcgcaagtgagagagtaacagagaaacgtagagatatagcaaa

SEQ ID NO: 9994 - DNA, 3000 bp, Unknown
  misc_feature (1)..( 3000): cDNA_ID_2187026_gDNA_ID_2096300_Annot_ID_195674 3000 nt of promoter + ATG
agcaagaaaccagtatgaaagataagtaacgtcgacaagttagtgcaaaaatggccgtgtggttttcctaggctagaaacagaaatgagtctcttacatgagaaagaccttggtcagtagcctttgcaaaccgggattcttgctttaaaactaccatactgtcatgggtatttccactgcatagcagagaattctacacatgtaaatatcagttttatgctagagcttaaggaaacaaattaagggaagcgagatccaatatcacctgcatgttataggaaatccgtccagatctctgatatcgcccgtccgtcatcgttaatcggacgcacatgctgcaccaatggaaaataatactctttttcaccaaagcaaaaaacagcaaagagaaaaatattgtactacaatgtctgaagaaggtaatgtccgggtacctcaaactttacgctggttgtgctgctccattttgaactcgctggctcactcaagtctaaaccaacagccaatttagaaagatttacacctccactccctgaccgagaaaagttgtcaactggggtgccatgaacccctatctctggcgaaagagaatgctgtaccaggttgaaaaaaattgaatgtatttaacatagcataatttggaaaattcactttctaagatagcttcaccgatcagttgagtacctgtatgaagaagcactgttgcggacgccattcaggtctaggtctcctaaaagccaccagtacattggaatcatacaaccctttatcccatgaaacatcaagcttctcgcttcctcgaaacaaatttggatgtttgatacagaggctgcaacaaacagacccaaatgaacactcaaacagaaaagaaagatatgaccatttcagttctgcagattatatgaacaccaacactattaagtcacaaaacttgcctgccaatcactaaagaaagaggactgctagtgactgaatatgtgtttcatatggtggcggcgtggcgcctccagcaaatataattgcttcttcgattgctaaatgcagtggcgtagccaaattcactatgttctttttgttaaaaaaagtttagctccgaagatgtgaacgctgatcataatgcaaatcataaacttagcaaaaaaaaaaaagttataatataccttcgattcaaaacctttgtaattcagtactatgggtgagagagattaaatatatttttagaatgggttagaagacaaacttaaaaagcttatgttcaattgacaaatatatactatgaatgtgttcacacgaccaaatctagttggttgcatgaggtatcagttcacttactcacgagcccagtggtgaacttgtggtggggggcgattctttccagtctcttgtttttgtcttctatttttttggcttcactctttttcttgatatcatttttcctacacatttttccttttgttttgtaataaggtcttgattaagagcgaagaaatgaaattgttcctcaacatctttctaatgcgtttttacgtaattatttaatttacaaaaaattcgaaataatttcgttattccgttgttttgtgaatcacaaaataaactatatatggtaaactaacaatttttagagcatgcacatagttgatacactatgagtatcattaacaatattttaatattaattttaatgtttatttattatttgagattttttatgatactggtaataaattgtttccagtggtgataccgatattggtatcattaaaaaaaaaaatatttgcaaaatcaaaaaataaatttataaaaatatagagttacaaaattactgtaaaattatgtcgcataatcacgaaaagttggcaaaattactcacttgcggaaaatgtagctacttagctaaaacagtagaaagactatcggagagaaaaatgtttttttttttccagaaaaaaacgaatttcacagacgaatcataagcctccacgtcatccgatactgggtatcaaaagaatcactgcactgatacagtatcaggcctaaatctattgtttgatatattaaaaattattttgtgactcttgatactctaattatatcacctatgtacatggtctaaaaacactaaacttgaggcagaaaaactaaaaatactaaagaaatttggagaatgaaaaagcactaagcattggttcttcctttaactcccaaattccaattattttttcctaatggaagatcagtggggcaccttagacaaaagtaactaccatgatgatgatttattgttcaattattttaagtatattaatactactttccgatactcttggtacagagaatttatacaatactccttaaaaaaaactcagatataaagttataaacatttgtatggattgtggatccaatttatgtttttaaagttatgatatacatttgtcaagatctctcacaactagtaaactatttagaactctaggaatccacttgtaacactaaaatctacaagaaaacaacatcaaccctgaggtcatctacgtggttttctcaagaccaactcttcacgacttcacgtgcatatatatttccaagttttataatatagctacaaataataaaatcagccaaaattcaagaatttcattgaccgagtaaatctctgcgtttttagttactttttctcagtgagaacagaatcttcttctacatatcgagcccacctaaatcaaagcagtagtagtggaaacaaataaagcagtaaatagacaccacagcttttttgttcttgctctctacacttcacatttacccaaaatctttataatactatatatttaaaactttttatctttttgtattttggttacaaagagacaattatctctccactgtctttatgttcttctttcatgtaaccaatctaaggcaaaacaaaaccacagacacaaattctacaccaaaagcttaaccagatttttcccaagaaaaaacccatccatg

SEQ ID NO: 9995 - DNA, 3000 bp, Unknown
  misc_feature (1)..( 3000): cDNA_ID_2187047_gDNA_ID_2096300_Annot_ID_195680 3000 nt of promoter + ATG
gaatacaatcgtcacaaattttatttgtaagaaaaacatcataaaaattgaatcaaatatatctattaaccattttcgttacaaatagttaaaacaaaaaaaaaagtttaaaaaaaactctcaataacagactaacatcgtcataatttgtgactaacatatcgacttaattttagtaactcattattacataactacagtctcaaatggtcacaagtgatgactaaaaatttgttgcatattcgtaacaatattactcaaaactaatggtattttgtgactatcataatgctccaattccatcacccactataatatattagtttcaaatagtcccaaactattactaaaaaaaatcatcggatatggttaaaattataaactaaaaacataacctcaaaacactattctttattaaattattgtcataaacatacatatttcttataataatatatatcttagttataaattataattcatctccattcttacaacacaatcacaaatttgacgataactagcagagaatgtaaggatttgacgattactctcatatgataacctctatacagatgatttcaggctctctggaaaggtaagattcaattattatttttctgtaaacgtgattataaaagggtaaagccctgttcttttcattgtcgctgcatcagcgatcggcgaccaagaattataactgagttgagacacgtgtctatggtgagtaacaccggcaacaccattaaaacagtcgcagcgactccttttcaccattccaactgtcgctcatttttccagcgacaacggcgatacccgtggaagtgatcgcatcgactcttttttaattattctccatttatgtggaaattctggtcgcttaaagctatcgcagcgattttaaaccgaacagggcctaagccgtttttctagaaaacggttcaaatagcttgacaaaatgctaattgtgtatcacacctatactcgtgataatttatataaaaataatttcattcatatgttaatataaatgacatgtttacttagtctatatcaaaattatagaacaaatttcgagaaacagaagaagagaagaagccatgaagctaactagtacagtcacaaaaggacgacaccgtttcgaaattgggccagagacaaaactaaactggatcttaaatcagcccaagccgttaactataaatttgttacattagtcacggactcacgtgtcacgtccttcgaaaacaacgtatccgcacgtgacatcgccaccggcctttttttttttttttcacaccgcacgaggaagtttaggtttcttcaaaatcacaaaaccaaacaacaacaaccaaaaaaaaaaaactcaaaccattttctctctaacttctctgtcatttctctctctagtggcaaagtatggcggattggggacctgttgtagtcgctgtgatactgttcgtgcttttgactccgggacttctctttcagattccggcgagaggtcgtgttgttgaatttggtaatatgcagactagtggagcgtcgattctcgtccacaccatcattttcttcggtcttataaccatcttcaccatcgccattcgtctccatatctataccggttaatttcaccgtaccggattcgtaacttcccccggttgtctagttttatggtttgttttggattttgtttcttctctgtgtcttgtcaaaacgttatgaatttgtgaatctgaatatgcattaagttaatttcaaaattcgctatgtttgattctcggtttggtttaaatctggttatggcgttgatttgaatttgatggtaggcactaggcagttagccttagtttggtttattggtattcgagttcaaattggaattgagtactaaaatgctctgttactcatttctgcatcttgagttcttatggatttgcttacgaaatgttcaattttgtttggtctggttcggttcgttctgaaacgaatgtcgagagtcttttgcttgactcgaaacttgccttgtgtcagcgtgtaggggtttgtaagaataaaatgggctttaaaattaagttattaatgggccaacacatgatccaccaagaagaagtgatccggttgcatcttagattctcatgtgatgtgattgaacgttgaaagtgcacagaagtagacctgtttaaagatgtttcacactttcactgcgtactatgtaactagtggagtcagtcccgtcatgcgtatgagtaaagcgcgtcgataccacgggaacacacaaaaacatgtcaccctagtaaaaactgtgttcgttagctcattgtaaattgcagtatatggcataaacaattgtttctacaaattccaagaatgtaagaatcaagacaataaaatgtgactatatcaagaacttaactaaagtttcatccacttaaatgaaaaagttgatttggatagaacaaaagacgtaatattcgatgtgttctctctctctcccatctttacttttattgactttttattttcactttaatgtgtgatgtaaaaataaaaagtaattatttgttcaaccctaggtgaaataaaggacgacccaaaacaagtgacgagagagcagagagagcttcttcttccggacactgaacagtgagagcacccatctccaacctcttcctgtaagtttccccaactactctgtttcttaaatgttctgcgttctttaaaacaaagtatagaagatttaggttgtaagatcgatctcgtttgatttcaaactcactatctgaaactctttgattacaaacccatcttcataatctctgtaaaaatcaaacatgcaattcacttaatggtgcaaaaaccccagaagagggaaaaaggaatcaaatttagtttataaaagcagtggaattgagttgcattgttgaaatattcaaaagcaagatcagatttttgataaagaatttcacttttgattgcaacttataatcaaggaacaag

SEQ ID NO: 9996 - DNA, 3000 bp, Unknown
  misc_feature (1)..( 3000): cDNA_ID_3035110_gDNA_ID_2096300_Annot_ID_195682 3000 nt of promoter + ATG
gaggaaacaggaattgcttgtgcagaacctgagacaacttgtagaagagaagaaaaaagacatgaaggagattgaggagctttgttcagttaagtcagaggaacttaatcagttgatggaagagaaggagaagaatcagcaaaagcattaccgtgagctgaatgctatacaagaaagaacaatgagtcacattcaaaagatagttgatgatcatgagaaattgaagaggctgttggagtcagagaggaagaaactcgaaatcaaatgtaatgagttggcaaagcgcgaagtgcacaatggaaccgagagaatgaaattgtctgaagatcttgaacaggtatccatttactctctgtatctctcttttcaagatatatgttcaagaaataattggtttttttctcttatcagaatgcatctaagaatagctctcttgaactagctgccatggaacaacaaaaggcagacgaggaagttaaaaaacttgctgaagaccaaagggttagtgactttcttcttctttgtaaaaatggttgggcttattttcgtgattactgagaaaattctgtacctaacagaggcaaaaggaggagcttcatgagaaaatcataagactagaaagacagagagatcagaaacaagcgattgagctagaagttgagcagttgaaaggacagctcaatgtgatgaagcacatggcatcagatggcgatgctgaagttgtgaaagaggtggacatcatcttcaaagatttaggtgagaaggaagcacaactcgcagatctcgataaatttaaccaaactcttatccttagagagcgcaggaccaacgatgagcttcaagaagctcataaagaattggtaaacgtatgtatcattcaaagtgttgttcttttcaatcacatcgaaaagctatgagaaagcttgacattttactaaaatcttggttttgtttgtttcatgtgccttcatagattatgaaagaatggaacacaaatatcggtgttaagagaatgggagagctcgtgacgaaaccattcgtggatgcaatgcagcagaagtattgtcagcaagatgtggaggaccgagcagttgaagttctccaactttgggaacactatctcaaagattcagattggcatccattcaagcgggtcaagctcgaaaatgaagatagagaagtggtaagaccgccttcttgactctgtttgttatgttgaatctctctgaaagattaaaaagcttttttggtgttgttgttaattgtgtttaggaagtgatagatgatagagacgaaaagctgagggagctaaaggcagatttgggagatggtccttacaatgcggtcacgaaagctttgttggagataaacgagtataacccgagtggaaggtatattacaacagagctatggaacttcaaagcagataagaaggctacacttgaagaaggtgtcacttgtttacttgatcaatgggaaaaggcgaaacgcaagcgtggaatggcttagaggtttaaccatttttgataaccgaacaaaaatatgttttcatttgcaattgttatttgctaatataggatttcgattgatggtttgcagctgcaagatgatggacatgggactgaataaaaagccgatgcggtttttagttgcagagaaatgtgtttggtttgaccaaactttggtggattctgtttgtttttcttctcagaacttagtgaataattgacacaactttgatgtcttgcatcggttcttttcattgtaacatttgtaggagtttggccgctttggacaataagaaataaaaatatcattgtaatataattcacatgtaaaacaactagatttggcctctcttctgtctcatatcttaagcatgtcatttagaaccttttattgtaaaaacaaactttgtcatgagttactttttgtagtcaaatttgatattgaccccttccttattatgctaacactgttttcatcttataaccctataaatctaagtttcgtgaatatagccaaaatcatctacatcattgcaaagaaccttaaaggagaaagaagaaaaccggcttgagagagatggaaaacaactcaggagctattctctttgtgatcttagctatgaccattgttcttcaagtgaggccagggttctctcaagcactccctacgatccccggacttttcccaccgggtcttcctattgatatcataaaatgttggtcatctctctttaacgtccaaggatgtgtacaagaaatctacaaatcgatattttctggtcagtttgctagcattgaagccccatgttgtaaaacgttttcagctatagatacaaactgttggccacatatgtttccattgaacccattcttccctcctattctcaagaacaactgcgagcgtattgctacgactccatcatcaacacacaagtgaaggctacacacaaatgttgcgagccagttgttagcttcgaggtttaagaagttcttttatcgatttgagagatcacaatgcccaataatccaaaattctccttgcagtaatttttttttttttgtaatctttagcttaaaataaacaaagctaagctttttgatgtactcgtatgtgtttgccatgtagtttgttaaaagagtggttataacataaacaaaattttgtttgcgtttatatatgaaaatattgttcttacactatggaataaaacatatttcagcatttaaaatttgtaaaaacgacgaacacgaacgcatatcaataccataccaaaaagattatatcgtacatgaaacttgttgcagacaatggcatgactaatgggcctctattaacttagcccataaggcccaataaaactttccaaatagtttcatttttcagattttgaagaatctcccgacgactcctctctgtctcctcctccgggaagctttctgtctctctctctctctctctacacaagaccttgaagaatccgattccataaca

SEQ ID NO: 9997 - DNA, 3000 bp, Unknown
  misc_feature (1)..( 3000): cDNA_ID_2187067_gDNA_ID_2096300_Annot_ID_195686 3000 nt of promoter + ATG
caatcccgaaagaaaggtaaaaaagaacccacaagaaaagaactgcatgtagtggtgaccaaaattctgaaggaagtagacttcaatacggtgagacttcaaaagtttgagaatttacagattataaagcgtatacaaaacctttgaactcaaagacattttgaattttgtttccaaacaggcaactctatctgatattctacggaagcttggtatgtttctgtaaagcttttctcttattctcaatccataatagttatcgtcttccaaatcttcaggaaacgtttatcattgaaacattcttttcctgcttgtgataatactagggagccattttggaattgatcttatgcatagaaaagcagaggtgaaggatatcattacagatgccattaacgaaatgagtgatgatgatgatgagaaagaggaagacacagaggatgaaggtgagaaagagggaaaggactagttttgtctttcttctctttcctacaataagaaaaagaaaacataaccgaagagacggtttaacttaaccttccatgtgtgaatcataggattgtttgtatgtttggtgtaatgtgtaatctgttaggctcatgtagtatcaggtaatgtggttggatactttctggattagaattaatttgagatgtatttgtaaggacttgcaatctttcttcactttagcagcacacaagtgacatggataaatattgttgtgtttcaaaagaggaaaagaagggtcgtccaagagatcagctccaagtcgatcagagagccaataattcctctcaagacacgcccacgaatgaattcacaagtaatctctcgtgttatgggatctattgcacttatttttgattttaagagtcatgttaacttttgtgtcatgtttattttaccaccctataattagcatgttcgtttcgtcaccactggcggttgcggcagcacaccattgacggttcagcaaaacgtttatcataaacattttatttagctcctcaagaagttaaaacgtttatcatgaacatttcagtccctgatcttcttctccatctccaacccatgtttggaaaccatgtgtgcggttctctcaagcttagttctgcactcttctcacgcatttaaaaagttaaaacttcttgaggagctaaataacacaataaaaccacacaatcgacggttcagcagcacaaacaaatagttgaagcgtatgtgacaacaaatatgcttcatatagtgtgcatggtttggttttattgtgttacttattattatacccttattgaacacccgtattttttttttattaataattttgaattgtaacgcttatatctttaagattcttatttttatcatttatacagttttatattatcactttaaataaatctaaataatttttatgtaagttttgaattgatttgagttggagtcgaacaaaaaatcatttgtattaattaaacaaactttattaagtcaattctgaacatttacaaataagccccagttttatagtttgtcatattacctgatgcaattttggtgatgaactaaatgcacgataataagcttttcaccatgaatttttatttttattttagtactttaattgtgtttttaatttattaatcatgtttaaattttatattttatcagatgattattgtgttacttgatttacaagatatttattagtttagaatgccaaagttttttaaattgttttaataattattaatttatgattcataattaatcttatggtcatcattcaataatttgtcttgaaccacatgttttttttacaccgatcaacattatcttgaaccgtttgtaagtttagcgtcttcctatttgtgtagctgttaagtttccaacttttcttaatatatactaattgtacgactggatactttttggatttgagttcatttttgtagatgtctttgtaaggatttttgagcttgcttcttttttggggtctctctatactagtttacaattccacttaaaagagacacaatgatagaaagtaaacagagaagacagtttatcctgcatggaaagtaaacaatgacaacaaacaaaattggatgaaaccactgatttatattatgagatcatctaaaaataaagaaactattttgacccaaaaaaaagttctactaaaattgtaattcatacttataagtgagatcacctgatgtcattgtttccagctatgcttacccgtgtttcaccttcattgtttctagctttgatttccaagtgaatcacctgatgtcatttacagatcccgagtctttctttatactctaccctgcaagtgcaaatctcacacatataatatattaccaattgaaacttcatactccgacgtccgaatatgtgatcaaattattagaggaatgatcaaaaaatgatttttgaacctaatattaaaatttctcttacatatagaaaacatccaactttgacaaatccatgtaatggacccgtaggccgtaacatcaaatatggttagatatcactcttatcgatcaaccaaccaattaccccataaatatatgtatttattcaatcagccgtccataccggtcttaaagtattgaagtagccagttctttagtggtccttattatgttttcgatcacctccttatctctgtagctacataatcttcccttgttaaatacctaaaccctattctccacttaacctccctaaagaacctatatttcacgttatattcttggctctttcacttttcccataaattctgtgcaaaaactcgagtgggccttaagctttatctaccttatctctccagctatacacttgctactcaagataccgctaaccctaatctctactagacccccttaggacttaaaaccctatatatcaaggtctactctctgttttctcgctttctttattcgagccattccatacgtttttcgatttctttcattgaaaaccattgaa

SEQ ID NO: 9998 - DNA, 3000 bp, Unknown
  misc_feature (1)..( 3000): cDNA_ID_2187036_gDNA_ID_2096300_Annot_ID_195677 3000 nt of promoter + ATG
aagtcaaatgttgaacgtggtggtttttgctttcgctacgtatttctcgacggtattgactaaattcaaagtattgttggtactctcaaaatagagatcaatcacagactttatgtctttgttcttcgagaaatcataattgctttctttaatgatcttgaccacatcttggcttgagacagctaaaaagtcgatgatcttaatgattgagtcctccttggatggttttccagtcttgcttcctcgaccggtgaccgtttaatttccatcaatttgtccattcgttcgcgaagcgcagaaatataggatctgagctttggatcttctttgcaagcggatttgcaagaactcaggacacgatcagagataaattcaaccaacgccgccattgatattatgctggagctagcctggaaaggaagaaaattaaagacaaagatttcagaatattttgcatacaccaagtgtaagtaaatatcactgaaaattagcagcttaacaagggtccatttgttaagactaattcaattccgtgaatataaccttgtgaatacttaaatacaaggaagatataacaaatatcaaaatgagatgacgttgaagaaagagaaattacttgaacttggttacgaatcttgctcaagacaggagaatgttgtgtctctgatctacaactattacgtaatatataagcaaaaaaaaaaaaaacctaaagtcagtcaaccttgaaagtacgtggagaaaacagttgattttatcaacgcggacagaaaattcaacggtttacgattttattagaattcaacattgtaaataaatgtgtggcatagactcaatcttgttgtcacatcggtttagaagcatcataaagagcatgtttatcaatgaacttcataaaatatcattagcattagttatttaataatttaaactttgagaaattaacggtgtcaaatagatcactgagtgatccaaatcaaagaaaaatgatccccaaaattaactttttaattgatttaagtctatgatactttataatatcatgggtaaacatgctctcttgaatcgaatcttccatgacgacagaataagaaacaactttgtttttggctgttatatatatatatatttatcgataaattaaatttaagaaataatttgccaaataacaataattggaacaataataaaacaagtaaccaaaacctcgaagatttaatcttggaaattacaaggaaaaacatttgattttgtatggacagaaaatgcaatatggagcagaaactgcgaggattcacttggaaattacgaggagaaacatccgattttgtatcgacagaaaatgcaatgtggttaaggttgtaacctcaaatcagaagtcaagccaaccttgtaagttgtaaatgtctgggaaataatcacaatcttctagcaaatcgaatctttcttcttcttttaatcttacagtatttagaaagaaaaaaagaaaacaacaacaactctgtttttggtcgttagtttcatttttgtcgcggtaataaaacggttagtttctattatttagtttattttttgtagttaaaaagtttatcttattactggataaaaaaaaagtttatcttattcacaaaacgaatagacttcctttttttttgaaatttttataaatactctaaattttattaaaaatttgaaaactacattcactgttatactattttgaaaactacattcaataaccataataatctttttatttatttataaattatttaaataaattaactaaaaataaattaaataattgataacttaactaaaattcgtaattatttaatttaataataaataattaacaaaattaatatactatatttaaagtaatcactatctcgtttaattttttttatataagttgataatagtatttagatttattaattattcaagaataagtaattcaaaattatataatttatatttattaaagtaaaaatctgtgtacatatatttttgatattttttgttagtcttattttattctatatagatttatttttaaggttgatattttgaactatcgaattatttttcacttttgttgatttaatttttgtctccgtcgactagatttaaaacagttgacttatgttatggccagttgatttataacatagtaaatcttttgaactgttgacttacttttttttgtttatcaatttttaatttaatgtgtagacttgtttattcaccgtagacttactttattctacgttgtcttatcataaaatctatttataaaatgtcgagttaaattttatttttgtcaattaaatttatttcttttgatttattttaaaatagtctacttatattttgttaattgtttttttatgtagtcaaatttttgaaagtgtttacttatttttttgtttgttgaattataattttttttcgtcgatttttttattcttagtaaacttatttcatctaaaatagcaacaaaactgattctttgccaaacatttacaaggtccacttgactattggatttaagtacatttatactcataccaatattaaattttcttctccacattatgagacgtgacaagatctacattatttccgcgttgcttcaaggttgactgacttttcattttgttgctatataacgattatccagtagctaatacttgtagatcggtgacacaacattctctaatcttgagcaagattcttatccaaagttgagctaatttttctattccttcaacccaatctcaacttgatcatctcatggaccttgcctttaaatattattactatgttatattcacacggtattataataaatctcaaacaacttaagcttgattgctaatttttatgatgctaactttaaacttgatgtatgcaaaaactatcttgcctttaaattttcttgattttgttttgttttgttttcctttctagattagctccaatataatatcaatg

SEQ ID NO: 9999 - DNA, 3000 bp, Unknown
  misc_feature (1)..( 3000): cDNA_ID_1397812_gDNA_ID_2096300_Annot_ID_195671 3000 nt of promoter + ATG
acgaatacagaacaaacaaaactcatgggacgaatagatataataaagatacaaggagacagaagcgtgtcgatagcagaagcaatggagacagcaaagcactaatcttttgagacaataagccaaaaaaaaaaactagctgaaattcatcctaaagtcttccactatctgatctataaccaatctacttctatatccaccaatatgattacaaattattgaggaatgaaccaagaatgtggtctagtcaaaatgatctttaaaggaattaacagaactattgaatcaatgactatatgtcaagtaacataaccaaaatgtagatatataatgcgagatcaattacctcgtaaagaaagtactacactaagaagatccaacgatgatgttgttgattgggatgaaaacgagcttcacgaagaatccaacgaatcccatcaccacaaatccaatcgccgtacgcacagctactttcgtgaattctgataaccaattcaattacaaatgatatcaaaatttcagaaaaccctaatctacagatcaaaaatcggaaatgagatttttttgagaaaaggcgttacccttgcgatcgggtttgtgacagcgctggacgagacgaacactgctcttagcgaaatctctgagaggatcgattgcggaatcaatggcttccatgacttctttttagatcggaattggtaatcgaaattagggtttcagcaggttcgtttaaggatgaaaattgggttttatttttgacatttggttttatactttagttccgttgactttcgcctccaccataatttctccaattcagatttgattcggtctgaacacaaagtccggtttggtttcttatttgtcttaatatcgattactttccatctataaaatatttttctacaacatcttaagaattataattgagtgatgttgatgctactattttaagtttagaaaataaacactaaaaagacaaatgtctcactcatcaaagtaaaactcttgaaaagtgcaagagctctgaaatttgagaacgaagacaagactccttgtttttttttgtttttttttgctaaaaatttaaatattcattattacaatgaaaatttcggttacataataaatggtaaccaaatcatggttccatgacaaaaaaggataaaaagcatggaagcataccaagactccttgttactacgtcaatctcttttatacgttttcagccaagattccggattatgaaagaatcttgggattctaacactttttctttttttgcttgaaagaggtttacaaattttaacactttttttttgttgaggattttagagtgaaacacatgttttgaactgtcttcaactgaacaattcatgttaggcgtctatataaccgtcggttattcacgaggtaactacacatgaacatgataaatttactctctcttttcattaaaaaaaagttgtacaacttaattacttatgtcatgaaaatagtatatacgtaaaagtagattatttttgtggttttccttttttttactataacaataaataattctatgttacctaaattttcttaggtagtataatggatcaaattgatatggagtaaacaaaagaaaaacttaaataatctggtctataatttgaagcgcttcaagccttcaacatcaatccgagtacgaacaataatatgagatttcatcaaaatattatcctggaaacgatttttcatttatatgcgattatattgttaatgaaagttggaaatacataatctagacacgtaaatgtcgtattgatcatgttgtgaaatgagctgtcgccttggtggcactttttggcattctctatttctctttccacatttaccacaatgtatccaaataggcaaatatataagcttagagagttggctgcacgtttttgctaaacttgataaatgagtcaatacaaccaatatagccaccatccatatctacaaatctacacttatcatctaaacttgaagaatatttgttattttatcactaaccacaaaagacaagactcgttacttaagttaaatgatagtgacatgattaagagaatattagctattaggtcggaaataagagaaataagactggtagtggtatggttatgtaaattatcagtacatgtatataacacttgtccaaataatggctttcacattacaagtcattctttccctgagactactgcaagaaacaaacacggaattctcgtgataaacggattagtacgaaggaaaaagtaaaatgcagtaaccaatttttatatttcaaaaaacaaggcattttggatgcaatgaaatatttagatatataaatttgactagtgacaacaatttaaagttgttagatttctcaaatccaaaaaaaaggaaataaataaataaatagtttatggctattcaaattgtgtattattttttctattggttaaaatctataaaagattttttttttattacttcttaaatttatgtttatagccaaaacatctaataaaatgggacagagaataataactaggaattcaaacacattatcaatgattagcagaataaaagtttggaacatctaaacctaatgactttatacttcccctttttagagtttactttgtatggaaaactttgtaagctaacaaacaaaagtattgaaatcgtgaaaaatagtaaagctttttgagctgcaatatttgatgcgttgaaacgagttggaaacagctttcactacactaaaaacaaacttaatctcaaaatttagatggattaaactcaaaactttttaattaattgaataggattttaggatgatgcagtgaatatagactatttggtgaaaaaatacaacgtaacgtacgtggctgctctaagcctatataacatagcccaagagagtcgtgttctaatgtgattaagtaaagtgagggagaagcaacgagagatagagatagagagatcaag

SEQ ID NO: 10000 - DNA, 3000 bp, Unknown
  misc_feature (1)..( 3000): cDNA_ID_2714365_gDNA_ID_2213359_Annot_ID_131816 3000 nt of promoter + ATG
aaatgtgcagtttcggttatgtgtttagctgtgaagaaagaacaagttgttcaaagcgtggagagtgttaacgggacgatttttccgaagaaatcaaaaaatcttatcatgagcgaaggaagagatgaagatgaggactatgggaagattatttgtccaggttgtgggatttttatgcaggacaatgatccagatttacccggatattatcagaagagaaaggtcattgcgaataacttggaaggtgatgaacatgtggaaaatgatgagcttgctgggtttgaaatggttgatgatgatgctgatgaggaggaggaaggggaagatgatgaaatggatgatgagatcaagaatgcaatagaaggtagcaactctgaaagtgagagtgggtttgaatgggaatcagatgagtgggaagaaaagaaggaagtgaatgatgttgaattggatgttttgctccggctggtgttggatatggtaatgtcactgaggagaaggagaagaagaaacgggtttccaaaacagagaggaagaagatagctagagaggaggcaaagaaagacaattatgatgatgtgactgtgtgtgctcgttgccattctctgaggaattatggccaggtgaagaatcaggctgcagagaatctcttacccgattttgatttcgataggttgatctcaactagactgatcaaaccgatgagtaactccagcactacagttgtagtcatggttgttgattgtgtagactttgatggttcgtttcccaaacgagctgccaagtctctgtttcaagtgcttcaaaaagctgaaaatgatcctaagggtagcaaaaacctcccaaaacttgtacttgttgcaacaaaagtagacttacttcctacacagatttcaccagctcggttagaccgatgggtgcgccaccgtgccaaggctggaggagcacctaagctaagtggggtttatatggttagtgctcgcaaagatattggtgttaagaatctgttagcttacattaaagagttggctggtccaagaggaaatgtgtgggttattggagctcagaacgcggggaaatctactttgattaatgccttatccaagaaagatggtgcaaaggtcacgaggctcacggaagctccagttcctggaacaactcttggaatattgaaaattggcggaatattgtctgcaaaggctaagatgtatgacactcccggccttttgcatccctaccttatgtccctgagattgaattcagaggagcggaaaatggtagagataaggaaggaagttcaacctcggagttacagagtcaaggcaagctatgtcttacttatttttaagcctttggttttggaattgatgacttaatctctaatgttctaaaccctggagcttctttttaccagtacactgttccaagaagaatttacttgaactgttatacagcttcaagtagaagaatttcttattgcaagaagtaagctgattttgttgaatctttcatttgcaggcaggacagtctgttcacattggtggcctggtcaggctagacctcgtttctgcttcagttgaaacaatatacattacaatatgggcatcacatagtgtttcattgcatctaggaaaaacagagaatgccgaagaaatattcaagggccattccggtttacgccttcaggtaagtaaagcttgtttcttgcgcatctcctcttttccgcaacatcagaatgtaacggagaacccattttacttttatgtatagccaccaattggagagaacagagcgtctgaattgggaacatgggaagagaaggagattcaggtgtcgggaaatagctgggacgtgaaaagcatagacatttcagtggctggtcttggctggttatccctgggcctcaaaggtgcagcaacactagcattgtggacttatcaggggattgatgtaaccttgagagaaccattggttattgaccgcgcaccatatcttgagcggcctggcttctggttgccaaaagccatcaccgaagtgcttggaacacattctagtaagcttgttgatgctcgtaggaggaagaagcaacaagacagcacagattttctctctgatagtgttgcttagtataacctgtatcgacttattattagctttcatcagtgtagtcattttggaaagtttatattggtttatgtattttaaaacaattttaaatccacatcgactatttatttatttcaattcattttaaaaaattcatatgattttagtggattatcaaataagcaaagtacttttaagattttgtgtgtttgtatgttttaactaagaaatcttcaagcatttaataacatcctcagcttttttccaaagtacagtattaataaaaatctattttagaaataaattctacagtttatttctagacatagttgagaatttagacaaatccactatattgtaacaaaaagaacaaagtgtgtagtgttggttgaattcaaatttgtttaatccagtgaacctcgttattaagaaaagcccggcccatagtgaaaaatatctatctcttccccttgtcgccgttggtctcgtcgccggaatgtatctttcttccggttgcagaaccaagtttcgactctagacttccttctctcctgaaacacgaggttcgtcttttcgtgattagatttaagttgaattgaagaatttctagggttcagatttgtgttatgaatctcggttcatctttccgatcgccaattgccttgtagaagttgatactactcatcgtctcttcttcgatgcgagtatttttctggggttttactttacttacatagttctctagttcacatttgaagttgtgtcttcttagatcgataaattactctcttttattttggaattttctcgtattatgttcactttttcaaattcttgttgatatgttgttctctttcgtttggcattttgggaattgtgtggcagagagctgaaatg

SEQ ID NO: 10001 - DNA, 3000 bp, Unknown
  misc_feature (1)..( 3000): cDNA_ID_3033147_gDNA_ID_2213359_Annot_ID_180736 3000 nt of promoter + ATG
cgaacacacttttaagcaatactgatctctccattgtcaccaccgagcacaagaatggttctttcgatgattccttgtcccttaatcttggaaattcgtcaaaacctcgcttggatccagtctctatagccaccgccaagctgatgaatgggtcctccaatgatttcttgtcccttggaacttcacagaattcagagacgattactgcttcttccgatgaattcttgttctctgatcttggacatttgcagaaatttagcttcgatcccctctcaatggcctccaccaagccgaataaagctctgtccatcgtctccatcgaagctatttccaatgggtaccgttttttcttttcttagtagacaagaagcttctttttcaaagaagttttttaaatatcgcttcatccattattacaggttgaaacttcctgcgacaatcaaggtaattaagcctttcgttcgtctctggaggtatagttagtaacttagtatacacagataagtttgaattggtgtgtttcttgatctgcagggtcaggctaatgagatctttaaggtagtggagagttatgccagaggaaaggaacgaaacgtcctttttgctgcttgtatctacattgcttgtcgagacaatgatatgactcggactatgcgtggtatatatatttgaaacctgaaagattcttgttcctttcttggtgtagcttctgccattgtagctgaatcagctttttcaaaaccatttgtgtagaaatatctagatttgccaataaagcctcaatttcggatattagtgagacagttgggttcatagctgagaaactggagatcaacaaaaattggtatatgagtatcgaaactgcgaactttatagtgagtttgtgcattaagcttttgttgcattgaacaaatagtcagtagctctagtttactgacattgtattcatctgcagaagcggttttgttctatatttagattggataaagaagcagttgaagctgctctagaagctgcggaaagttatgattatatgactaatgggtaacttacattatctgagcagttcctggaatttagtggatgagtaagctctaagcagatgtatgatgcagcagacttaaaacccatatatttctacttattgcagttgcagccgtagggctcctgtatcagttgcagcaggaatcgtatatgtcattgctcgactttcttatgagaagcatctgctcaaaggtcacatttaaatctcaatctatatagcagcccttaaagcaaagtctgatcagctcttctctttctctaacatattgacacataatgagttgcaggtctaatagaagccactggagttgcagaaaacacgataaaaggaacatacggggacttgtatccaaatctgccaacaatagtacccacgtggtttgccaatgcaaatgacctgaaaaaccttggagctccttagatctttatgtgcgaggatacaaacaatctcactcaaagaagctttcgtctttccctttttcttttttcctgagcccttataagattcttcctagaaccctttacacataatacctcatgaatacgcatcatcaaagttactccaagtgtatgtaaactctcagtttgattcgactttttcaaaagaatacaagatcattccggttttttgttacattttatgataagacagggaggtctatagaactgaaggaaaagaaactggcacggccctgagcgatatgacagaatgttaatggtgcagctatgcgcttttgcaggactttaatatcttctttgcttggtggagagtccctgttaaagaatatgagtatatttagtaagacgcatagtgaaaaacttgcattcatagtcgaacttcaaactaacaaaaacgcttaccccgagaagcaagccacaaagcttggttcaccaggagaagacttcttgaaccggctgtttggtagatacacgtcaaacaccgcttttgcatcacaaatctgcatatctcccaagagtttagttacagtatcattgtctgcaggacattcaccagcacaagctgactcttcttcaccattcggtcttgcagcatcctttaacgtccaagaaactccatgcctacctaggatgtaacctagacccttcaagtatctataaacctcgtagttttcccaagagcaacgcttttctcctctgcaattttctcatacaagtccttcaatgggatcactatgtcatcctcattacctaagatctgtaactctccaatttcactcaaatacctgcaaagggaagaagaataaacgaaaaaggaagagactttcatcagatctttggtaaagactgatctaaaaaacttgtaaaatatttagtttgccacatacagagcctcttctatgaagcaatatgtctttccactacgaatgattccagttgtcgtccaaagttttccccttttaacctcaacttccgccattcctagttcagtaatccaacgagccttggaagatcctactctacattttgcaaacacaaaaaacaaaaagagaaactgagtctaagattagttgacttagcagtttatgatttgggcaaaagtaaatctaaattcacctgaactgtaacttgggcactgaaccaccagaatgaaactcttcgtcatcatcgtttggaaaaccaccttcgttttcgctcgaagaagaagcttcccagtctttttcctccataagcttaaagtatgagatgttcaaggaggcaattcgtcgaacagttggtgtacagctaaataggtcgtgccgtgtcgtgtgtcttctttctcttttcctttggttttgaattttattgtaccgaatcgacaaataaggaatcaagacccgaaccaattaaaccggtttgagtaagtggagaaaaaaactgattttaaaatgttcgaatcctaaacccttgacattcttctgctgagttctcctgaagctcaaactctcaataagtatg

SEQ ID NO: 10002 - DNA, 3000 bp, Unknown
  misc_feature (1)..( 3000): cDNA_ID_2714310_gDNA_ID_2213359_Annot_ID_180734 3000 nt of promoter + ATG
agatccaggcgattttgcagatcctggttcgtctgatttgttgttgttaagctcagatacgagatcatcgatcgggagatttggatcaagacgacgagctttagccaggaatttcaaagcgcgaggtcgatctccagcttccatagcacttttgcagattttcaagcacttcaacgcatcgtctttgtttccatccatgttcaccctcacgaaatcagaacaagcgagccctagaaaacaagagattgagagaagaatcaggaggagtgaaaacagagagtgtagaagacgcaaatctcaatcatgagactgtacgaaattagggtttctgctcaccgatcggatttcagattcgaagaatttacaagatgactaatgggaaggtaacaacaattttgttgttagagagataagacacaattccgattaaatctgggattagcgtaccaatgtcggtacgacgtaaacgacaaatactagttccggttctggaaaattgtttgagcaatttggtctggttttgttccggttacaaacttgttaatgcatataatcaaaccggtcccgattcggttcagtaatttatgggaaattgttacaaatcgattgttgtggagagatgaggtcttgacgagccctaatgcatctttcagattctaggtcattagcaaaacttttgtcttaaagctgtatagtctacactctgttggtaatttgtatgataagtcattaggtagttttaggtttcatcattccttacctacaagatgcattgaagtaattacttaatatcaagtgggactattgaagacctaaccaactttcttatgtactatattgtatcaagaaggcccaagatcaatagtacacaagcttgagagtctttaaagctgtgagttgtttactccatgtgctcttatcttcttctcattttttttccttctgcaatcataatgtagtgaaatgatcataatctgcttagagaatttaatgccatgactcagatgagaagtagaaagattgtttcatctttcattagttattttgcgctaacatttgatatcttcatattcattttcgaaatccgcacatctggacagaaatatgtattatcttataaatggttatgaaatagttgtcaacgtaaaagaattgttagaatgctacctaaataacgttgtgcttcttgattgtgtcaactgttaaacactaacaaacaactaatcacgattgcgttttttaaattatgaatagagtggtgaggtttttttttttgtttgtgggctggaaaacccataaaattaaaaggctagtttctattcttgtaatattaagacttggcttatagttttccttgttgttaaataaagacttttgctcatgaggagacactgggtcaaacatgggtgacaagtgaagccaatgggcagctagggattccctattaatatattaaatgcatgtttctgaccatggagccaaccttttattacattaataatttaagttcacatcatataacgtcatatatgtatatgttatactcggttgatcaaaaaaaaaaaagtatgtgttataattgaccagctttctgaattctctatagtttattatatataagagcatgattgttcacaagtctaaagatgtgtctgtatggatctataattcttcttaatgtgaattctttaaaggctaccagatttgtgatcaacatgtattctttttggtcaacttgtttaaaccgcatttatacataaagctaggtttaaacttttccgaatagtaaaccaatagattaaaggctctcaacaatgttttttttggctatctagcatttgtttaatagcaaataaatcattttaaaatggatttgcatacaaagaaacaaaaagtctttgaatatttggtgaggaaaggtgtaataattaatattattaagagttgataatgggattaattaatactattagaaggcagcgcagcctcataaagtggcgataccttaaaacagagcaacttggatggcttttgctatttgtggatccacgcacattcgaatcaacgatgtacatactttatacgttttattgttagtgttttttttgttaaatactttataagattatgtcttataatcttttcagattagacactagatttcgttaatcttttgttacaactgcaacgaaaaatcccggtctacctctacatatttataacattgctatatttgtaaatttgattaacattacagaaacaactataacattaacagtcatgtaacactaattgtaaaatacatgtaacatttgcatggaaatgaagagagcataaacttaggtaaataaacacaaaattatgtaggaaaaaagtagctaagaacattaatcatacatgctaaaaataccgtttcattgaaatatatgtgtaattctgcgattagtatagtatttacaatcttgtaattaatgtcacatgctctgcgaattagtaacactacataaaaattacgaaaaacagaaatacagaaaaatatatcaaaaggtatatttatttatagaaaacttgatacaacaaaacctaataaaattaggcagatttatcgggtcggatctttgaacatggattaaattctcttaaataccacaacaacaaaacaatacgtacatacgaaaacccacgaaaagaggacgcaagacaagactttcttcaaagttggattgcgtcaaaataatcaaaaaacgaaccaacagatgcgaaaaggcggcccggcccgataacccgagtaaaccgggtttggagttttgtaacactacataaaaattgctcagcaacctcacacacaacaacaaactcccacgtttgacagagaatagaggacgaaggagccttcactctcctctctctctcttcaccttccttcgcgccggcgaagattattattctctgttttttaagagaaaagtaaacggagagagagattttttgaaagtaatg

SEQ ID NO: 10003 - DNA, 3000 bp, Unknown
  misc_feature (1)..( 3000): cDNA_ID_2714316_gDNA_ID_2213359_Annot_ID_180731 3000 nt of promoter + ATG
aatgctgatttggttggaaaatgttccaatctgtggatccaacatttcaaatagaacaactccataataatctttttcaaagtaaaaggtgaactcagagcaagaaaaagaaaataattccagtcaaccgaaggtgagttttatcaaggaaaggcttccacagcaaaattttgactagcgagttgcttgcgcctgtgtgtgttccaagagctgattcactaacttgtatgttcgtcctgataagcctttggtgtggtttatcaactgctcatgcctgcataaagcggaaacaagattagattgtagaatacgaatgatatcatagatttaagcttattctacttacacgttgggctgagtaggctccatgattacagttcctgactcagaatcaatcttggcatcaagctttgaggtgcggattaggttcacaatccatctctcggcctcctcatagttcagattcaatttttcagcaagtaccctgacaagggaaatataggctcgacatgagtacaaagttaaaccacaagaccgcaacaattcttctcaacttaaatagctggatatggcaattttcatgtgttgggaaagataaggaatagagaaaattccaaacattgagcaatccggagagcagagttatgtgtaaacatatacaaccaaatgtgagaacttaccccatgtcaatcctttgatgaattttgcaataggtttcaaagacgaataggcgggcattttcaagaaattcatctctcagtggtacagttgaaaagtttccatcctcaactcgcttgccaaggaatggatcattcacaatgacctacatcatgttaaaatgtcagagtattgattgcacagttctgcacaaacaaaaatatctatacatgtggatgagttacctcttcacactctttcatcttcttttgagccccatcaaagtcataattgacaaacacacatgccaggaactcgataattggatctttgtaggagtagtgctcttgctgaatgaccttaatgaattctttcaattgtggtcttctccttttgttgacaatgaaagcagttgccaagtagcgcagcaagtgtggagcactagtttggatggcattcagatacctgaaaaagtaaatcaaattagtatacagaactgcagcatgaaaacaaagtgaattatttttcagcaaatgcccatacacaaagcacaatcttaagaataggtctggatgaaaagaaggagaagactctaaaactagtgactgctaattacttgtaggcacatcaggactaacattaactataaacaaagttctacacacaaacaccacctatacataacttcatcgcatctagatcatgcttatcttaaaacgcaaggaaatagatggtgatgaaaggtataaagaagagatgcagataacagagaggtagaggcttacttgtcttggttaaaaagatcaatgatctgtgtccttccattatcatggttaaaaaagatatacagaccccaatgcatcaaccaaatcctgttctgcacctggtttaacggcgatgaaaaactctgaaaaaacaaatggtagttagcatatatactctcacatctatattgatttcaaaggtcgcaaactagaagaagttttaaatactaacctttgagtcaataatctctttgagacggttaagctcttcaagagcaatatcccagttttgcatcaatatttcagatgcgagctttccccacaaggcactcaaactcctctcaaggttagagcacagggtcctgtactggtaaagataatcagcagcaccagaatagttgccacattcaaactgaaacttggcgtactggtacaaagcctcaatctggtctggaccaatctgataagacaccaagccatataagatttgtgttccacaatacacaaacaaaaccaaatctggataacatttcacaaaattaaacaacttaatcatccaaatcacaacctggtagcgttccttgagcatttggagattgtactgcttgtcagctcttagctcctgcacagcgttagggttcaaaagaaaagacacgagtggtgcagcagcctcctccaaagatttgagcctagcgacaacctctgttcttctctccaccatttctatcaccacaaatttcaacattcatcatcaaacaaacaaaccagtacacaaaaacgcaaattcacagacatatccagagaggaatacacaagaataccttgaggagcgtcttcagtgtggtagagactcttgtgaatatccatggcgtaatcaaccatgttcgtctggttcaaaagctggattttagacttcaggatctgctcatcagggtaaagctgacgctcttgaaggaactcgaatataggaaacaccaagtgtctgtccaggttaggcgctattagtggcgtcaggtcatagttctgtttgctttcctccatcgtcgctaatctctcaatctccgccgcttcccgcactggcaaaatcttcttaagacggcagagatgaagtttcagagacgacgaggtaaaaaatcctgtatattgaaattagggttttctcgaatatgagctttcaatatttataaattcgcccctttacttcttatatattgttgtttaccccacaaggtatttttatctccaaaacgataacttagccgtcgttatctgatcggccggtaccggaggggttaagaaaaaataataattaaatgttttttgtggagaggcgcacggtaagaagctttattcgtttggcgtatgttagtagtctggacttctttctgtaccgcctgtgtccactaacttgcgcatgttcgtctttaacctttcgccctcttcctctatcatactggattagggttcttcttcgagacgaactctttttctttctcgtgacgaatgtttctgtctagaagcttttaaggattaagactctccaaaattttgacgccgtgttattctcttcccgtctctc

SEQ ID NO: 10004 - DNA, 3000 bp, Unknown
  misc_feature (1)..( 3000): cDNA_ID_3033123_gDNA_ID_2213359_Annot_ID_180727 3000 nt of promoter + ATG
tattcaaatgattagatatgttttatgattaacaacaatgaaaaaaaatagagtcactaaattttagtaacacattaattctcttttttatttttgctaagaatgtaaataattcattagaaataaaaaatattaggattaacatgtagtaaagtctaaggtttttagttctatgacaaaagaaggaacacattaattctctcatgaaatatttagtaacacattaattctctcatgaattatgccacatgtgatgaatgtattaaatattggattgatatttaacaggtggacaagtcggcgtttgctatggaagaaacggcaacaacctcccttcaccagcagaaaccattgcgctcttcaaacagaaaaacatccaacgagttaggctatacagtccggaccacgacgttctagccgccctacgtggctccaacatcgaggtaacgctgggtcttcccaactcttacctacagagcgtggcctcgagccaatcacaagctaacgcgtgggtacaaacctacgtcatgaactacgcgaatggcgtcaggttccgttacatatctgttgggaatgaagttaaaatctccgactcttacgcacagttcctagtccctgccatggaaaacattgaccgggcggttttagcagccggactcggtggtcgtatcaaggtataatcattactcatatatatcgattacgtattttcataagataaatattctttttagcattaatcaaaatttcattttaagttcaacatttgcgaacttatcttattaaaaataggagatattcaatgttttagtgtaaatttggttaagaacttaattgcgttttattctttttatctttatataacaaaaattgtaagtttcaactctgttttattataattgtacggaatttaacaggtatccacatcggtagacatgggagtgctccgagagtcttatccaccatcgaaaggttcgtttaggggagatgttatggtggtaatggaaccaatcatacgtttcttggtaagcaagaactctcctttactcttaaacctctacacttacttcagctacgcgggcaatgtaggccaaatccggctcgattacgctctcttcacggctccttcaggaatcgtttcggaccctcctagatcttaccaaaacctatttgatgcgatgctcgatgcgatgtactcggctctagagaaatcgggtggcgcatcattggaaatagttgtggcggagactggatggccaacgggaggaggaaccgatacaaacatagagaatgcgagaatttataacaataatttgattaagcatgtgaagaatgggacaccgaagagaccagggaaagaaatcgagacatatttatttgccatttatgacgagaatcaaaagccgactcctccttatgttgagaagttttggggattgttctatcccaacaagcagcctaagtatgatattaacttttattgagccgaaccaatattctatcaagggaatggtatatttatatttgaaaactaatatagatattggtactatcattcattatacaataaataaagtttgagggactgtaatgacttatcatttacaagtaatgacttcattaaaacaagactttactgttaacgtgttggtaattgtaatgcctttatcaataacaagtaaaattatacttcctgtctttaaaactgaagtcgtgtgtaatcagactcttaaaatttatacaaaattagttatctcaacttacctaggtttaaatagtttcttacagcatagcaggttagaaaatgagtaagaacaaaaagaattagtacaaatttcagaccacaagggttaaattatgaagggccgtgttttgcgtagttgtgtagtgatatatattcaaaaccgaggaattttcttataaacgtctatttcggtttttgcccaaacaagaaggtataattcggttggacgacaaaaatagacgctgtattgttgatggagtagatatttattattttcgataaatagtatctctttttaacgttacaacaatttctttcacatcctaatatttgtattttgatattttcttctctataagaaaataaacaagagaaatttcacattcatcgtggattttctatgcaccttgtgttttactgaaccaaattaattaattgaaagaaaaattttcacaattcttttctttttggtttaatggttgatacagaaatccaaaaaggtcaaatggttcatcatgaagggggaaaacgacaatataaaatcacaagcttagggtagaaattaaataaattaatacgaacgtgttttacaaggttgagaccatgaaaaacaagatcgtcaactgtaaccattaaatacgtccttagacccacaagccaatttcaattctggttagatgcatgatttgtgttcacagtggttcttggaaccatccatggcaccttaaacattttagtcactaaagtcgtttcaatcttgaaatttactgtgaacaaaagtcatctaaccataattgaacttggcttgtgggtctaacgacgtattaattggttcacgctagcttgacgtacgattaacggccaatattaccatgatccaacctattaccaaaagaaaattataattaacaatcaaacaaccatttcgatttaaatattttaaaaccaaattggtttgggcgattcatcatattaaacacgtgtgtcttgagctagttaaaccctattgatagctacttgtgtagaaaactcatattgttagacttttcaaagcgtatatttagagagttatttgtgaattataatggtgattaaggtgaaacataacaaaacagatgatattgatagatcatttgatttcattcattgactgacttgcacagttgcaccccaggcttggctctataaattaggcggtaaatggaatgattaaaacatatcatttttcacagaatcatagaaaaatcaagaaaatg

SEQ ID NO: 10005 - DNA, 3000 bp, Unknown
  misc_feature (1)..( 3000): cDNA_ID_3033154_gDNA_ID_2213359_Annot_ID_180725 3000 nt of promoter + ATG
ataataatcagtgttgaccacttgttagtatcacacagtatacttatatggctttccatagatctgctgtaatttcttgaattactgattgaaagtagcgattacctgcttattgttcctgtagacagtaaatgaagcttacctgcttatcctaatatacaagatggtaaactagacctttccctgtcaccaaatcttttagctcaatgtactaagggatagtaggccacgacaccagttgttaaacttgtaaacacaccaaccacacaaggcctccactcctaacgagaccacctgagaacgtgtcatttatgaagcagaatcaagacccaaacaataaatacatgaaaatggaggaaaaagaagttgaaagttcaaaatatataaaaagactttagcaggcaactcctgaacttaactttgagcgtcacagagtaccataaacacaagtggtggatcttttgctgctcttattgattgtgtggcaacatgttcctctactggctctctgtgataatctctttattcgagagcagtggaatacggatgttttctcagctgtatagcttagagaagccggtatttcagctattcctatcaacgcttctaactacaaaagactgcacaatctttaagagaatttagcttgtggcgaactagaagagagccaagaagaagcatttctaacaaacaaaagctaatgtcgagtacgacgactaaaagcgatcaagctcataactttttaatagcaatcatcgtagccaaatcgagaagaagaaatctatgtctctgattgaggttatactcgagcagtttacctgcggaccaaacttaaacgatcgggtctcgtagtgaaattggcggtatgtgaaggagaaaacaagcaagctttgagcagccatcggtaaaatttcggtttagttggtttaggctccgattgccgtttaggtttcaaatgggctcacattaagtctcaaattctttgttgggctcattcattttaggcccagtggtattagtttgttgtatctaggcttctagcacctagggtcgtatatgtatatgttgatttcttttatcccaaattttcgattgtccattttcatatgatatacttctgattccatttcactacaagtactgtacattgaataatcaaaaatgtaatatagtattttttagctaagcttccgtatttgttttaaactatttttagatgttatatgtttgacacgtcaaaccactgattatgcttattattattttggtaggttaaatcactgattatttccgtataataaatttgttagaatttatgaagcatgattttagttgtaatgatattgattacaagtaagaaatatgtcacttttaatgtaactaggtaccagttttgacgtagcaatatttaaattaggtttatagttgttttttttctactttcactttatgcttatggttcgttaatataggcataaaatgaaccctccataactatgcaaattaaaagaatgaaccaaaaattattataaagataacagtatgtaacatctccgactggtttttgaaatggttgacaaatacatgtgcctaagaaattccacgttaaaaccatgcatgacaaattgctcatggattgtttgttttctgccaattattgccttgatatgttaaaaaagcgaattagcagaagaacaaaatgccatgtaggttctctttatcttcttactgtgtttttaatcctaaaatgtatttgtgttcgtttacttgttaaactgtgacttaaaagaacaagttgggctgattatttcttctggctgcatggactcacagtggaacttcggtttgccattcgagagatgaaagagaaaaactaccgtgtggtggtagcacacaaccaaacactacatggattcgagtattgttaattactaggagaaaatgcaaatcaggttatcgtttggaataaccttgttcaaggaggagttatataaaccaagaaaagattcaacaacagttggttatcttcaaatgggcaaactttgaaaaaacaattattgagtaaatgtaactagttgttttgatcaatacaaaaacattaatttctagaatatttttgtcaataaagtaccataaatgtaaaccaagctaaatgggttggtccacttgcagttagatgattcttgcttatttacataaatatcgtcaaaaaatttagttgtacgcttattgtttgattatttagatattttgagataatgtaataagggacgtatctactatctacgcagaaaaaaacagcattgcagctgcccatatgcgtgaaatgaggctggccattgcaatgcattacttaggttgatagtaaatttagaatgagtgatgaaacatttcaacttattacactaaaaactggaaaaatgccaaaagctccatatgcgggaaatgaggccatcatcaccattggcttgtaccatgactccaaaacgcgaggacttaaagcttcgatatctatctaaactatttatgaatggttcacagaattcataacccgcatttggtctggaagattagtgattcataatcctgattattataaaagaaatttcaattaatatcttaagatagtttgatatccggcctatatatttttcaaaaatgttatattattcattgaatatttaagagtggatattttattttggggctctggaggattcgttccaattaactcgaagattttagtgtctagctagctagttaggcctattgaaagctacgtgtatagaaaactcacattcttagacttttcaaagcataggtttagagagatattcatgaacggtgatttaatgtataacattccaaaactatgatgatatgacgcgatgactttgtttcattcattgacttgaatccctccattccttctataaattagtgcaaaatgctacgattttagtatataaagttgcaagcttaacattaatcatgaagatg

SEQ ID NO: 10006 - DNA, 3000 bp, Unknown
  misc_feature (1)..( 3000): cDNA_ID_3033158_gDNA_ID_2213359_Annot_ID_180724 3000 nt of promoter + ATG
ctacaatgttgacaatgagctcaagcgtccgatcctcattaacgctgggcttagcttggttggattctttgtcacactcaagttgattcctgtagctgctagatacgttctgaggcgtaatatgtttggttttgatatcaacaaaagaggcactcctcaaggagaagttagagtgtatgtttttccttcttagatttgtctttgtttagttctcagattagtgttcagcgtttttctagaaatggatgtctcttagatttgattttttgtataggaggaaaactatgagatgtctcattttctgattgatgttctatggatgtttacgcttgatttgatctcaggggacttaaagtcttttgatgtgcttattttcagcaatcttatttctttgtaggcctgagtcattgggaattgttgtcggtattgtcttcttgatagtggcgattgtatttcagttctttaatttcactgaagattcggtggtaagtgtcctggtctcaaaagctcaagcttgatcatttatttattgtgaactatgaacttggtagctcttggctcatttactttgaatgcaatttatcaatctggctaaatgactcggtgcagtggcttgtggagtataatgcagcactggcgtctatttgcttcatgatattgcttggatttgtagatgacgtccttgatgtgccttggagagtgtaggtgcagttctcattttgttggattaaaaattcatgatttagttttgttttcttattaactcttgtcaatttgcaggaaacttctcttgccatcttttgcaacccttccactgttgatggcttatgctggacatacaactatcgtcataccgaaacctttagtttcttatattggcttggaagtgtttgatctaggtacaattcatcttgtatatagtgttaaaccatcaatagctattttgaaattcatttccttagttgtatatttatcgtggcaggacgtatatataagttatatatggcgctactggctgtcttttgcacaaattctattaacattcacgctggtttgaatggccttgaaatcggtcaaaccgtagttattgcagctgctgtaagttctgctgtcaaaatgcgtcgcaatgcttcatttttttggtcccatttttccttctgttggtttctcgtaagtaaagttatgataaatctcagtaacttgtagattctgatacacaacgttatgcaaatcggagcatctgttgatactgagtatcatcaagctcatgccttctcaatctatcttactcagccattgatggcaacatccttggcaatgcttgcctacaattggtaatctttggatctttcaagtcattttctcttaaatcaatcaggtaaactagcaaagcagaatgctttctctaaccacgttcatgtcccctctttggtgatgttaggtacccttctgcagtttttgttggagacacttacacagtctttgctggaatgactatggcagttgttggcattctcggtcacttcaggtatacttctaaccataccgtccttattgcaatgtacttagattcatcatttacatttaacttatgtgtgagccttcaattaactaactacttatgaaactttgctttttgcagtgaaaccctgttaatcttttttcttcctcaagtgttgaactttttactgtcacttccgcaggtttgatacctttctccatctcacactttctgttacttttcaatacatttgaaagcatctaacttgctattgtataactcttcagcttgctggcattgtcaaatgtccacgacatcgtctccccaagtaagctattttttgtccatttttcataagaggcaaagccaacaagtaaacaacacatgactcttcctctctcttttttaaaccaggtatgatcctgctacgggactgttaacaggaacaaaagatgggacactcgtgaacgtctacttgaggatttttggtaggaaaacagaaaagtctctatgtattcatcttcttgttttccaggtaaacttgttaatgcccatattatcatctctaaatacaagttggtttattctgagagagagaaatcacaagattggtgttttgtgtgttctattgcaggctcttgcttgcgcattttgtttcatgcttaggcattttctagctggttggtacaaataaatctctgcaacatgaagaaactctaaacctgttcctcttttcatctctctctctgccttcacaaatcatacaaacacagaacttgttttgcttcatgtccaacaatctactagaatcatcgttttagttcacttatatagagagttttcatctaaaggcgagtgtatctcaacaatataaagccaatgaaatgaatcagaacaaatttgtcttggaatttaaatttaactacaaatgctgatcttattttgataactttgattaataaactaaataatttttagattaaagttttgctaatatagcatgcattaaatgaagtgtccatttacatatatttttgaattttaaaaatgcgcttttaatattagacagactactgtcgtactagaataataaagaatgtaataaaaaaatagaaggagaatcggaaaagaaacccacttatagaatgccatgtgtcaaaacataacaagcgaagtatgtttatatagtaagaaaactcttttgccctaaatatcccaaattgtcatatgttctttccttatgtggctctctcttctctttctctttctctttcctttttctctttcgatcaacaaaaccacatctctgaactgaaccaatttctcttctcccccttccggttatcggattaccagatctcgtttcccgcgatctagtttattctttgaaaaaggtaaatgttcaatttttttattttattcaaaatctcccctggattcaggagatgatgatttgaaattgacgatgatgtttgtgtgtaaaagtgatagaagcagaa

SEQ ID NO: 10007 - DNA, 3000 bp, Unknown
  misc_feature (1)..( 3000): cDNA_ID_2714361_gDNA_ID_2213359_Annot_ID_131817 3000 nt of promoter + ATG
atcacgttaaattaatgaattattatgagttcacatattcttggattgatatgtatcatatatagtttttagtattttaattttatgtttctaaacacacaactggtctagtgaattttgttatattatatactaagagatgtagttttgaatatttccaagagtattacaatgtagtcaaaagtcgataactttaaattcaaatacttaaatgcccatagaaaactttggtaaacaataaattagatttttttttaatacgaatccaacgagcttttaatttattaaagtaattagctgaggaaatgcatttaagtctaagccaaactgataaaaataattagtcttcggataacgtaaagtaattagatttactagatatttgatagtaatgaaagtttctgcccaactctacaacatattatagagttttctgccaaaccttttactttttcataacaaaaggctaatcaaaatacctccataatgtaatcaacgtgacacgatgacatcccttctcagctatgtttgtacacaactttctcgaatctgataattaaaacaagagtttcatggttttcgttttattggtaataaccgtttcaaaatttatcaaaagtctagtttgaagtattcatggtgatattgtagagtatagcacatagtcaccaattcttatctttgtttgatggttagaatcatatatggttctggacaagaaggttatatatatacacacacaagcaaccatttgttgctttttggatacaaaacaaaaagcaattaaagtaccaattgattaagcctaaatcgcatcaattgatcttctcatgctaatatgagctccaaggagtggtccaatgtttccatccaagaccgatttcaggtccagaatctctaaaccggtttttctatcaaccaccatcttgtgacccttagagacataactcctggtttcttcccgcggttccaaaatgttcttgctgtcgattttatttacatccgaaaccttttgctcttttgctatcacaagtagcttcgccttcaaccggtttagagctttgatcctgtttgcaaaccggtttctttctcctgcatcaaaaacctcatgttatataatctgcataaaatgcagtaaaccaaagtgtaacaactaacaacacactcaagaatacctgaagattgtagtgttactccactcggaatatggtggatacaaaccatattctcagctattttgtgatcctcttttgcaggatacgatacaatcaaatcaccttcctttacttcaaaatcaggagatgctctcaagaatagtggtatgatatcaacagtcgctgaacattcctggcgcaaagaaaacctcttttaattctttcccgggccatgataatggacacgaaagtgattagttacgagaaagagagttataacttataatgtatacctcattagaagtggaacttatgataaggcggtgcacacctcgctcacctaagagataaccataagcaaactcgaattcaaactctatcgtggctgaacttacgccacttttattactcaataaactacatttctcagccacccgcgcgttttggcctagcctttctgcccatttgatatacatacttacaacttgctctgtccatatctgcaaatcctcaaaatatgtttaagaacaaacagaaactaagttacaagcaaagagttggaaactgtaagtgccttgagaatgatgaaactgacctgagattttgcgcctggagatccagatttgataatcatacaagcgccttcagcgtcatattgatccctaagaagcttagacatctcatagtgatgcaacgatctacttacatcgagtgatgaatcataggcttgctcaaagagactgtaatctatagcatccatctcacccaattgtatgatcagcttagcttcttcagcctaaataacaaaacacaattaaaaactaaatctctttcatacaaaaaaaaaacaagaagatttgttagagtaaacaaaaagaaccttgtatttgaggtctttgagggaatcgactgctttagctcgatcagctaatttgagaagaatctcatcagatttagcgggatcatcccataaatcaaagtaacgcattgtttcttcttgctttatccactgctcttcttcaagctcaagagcatccggtgcaaacatctcagccttaagaacaacatctttaatcttcttctttagtgaaaacaatcctgagacaaaattttcaaaatctcaacaaatatataccaactttccaaaatcataaagctctcaactttaatctgtatagaacaaatttcctaaaaccagttccaaatttactattttgcttctcctaaaaactcaacagagacatacccaattgcttgtagacggtgtccatgtcatccatggaactagaggctcgaacagagaaaatcagaaatcgagatgatgttctcttcctgtaaaagcgtcgccatgagcagcatccaccaataatctttgccgccattttatttcaccggagctccgactaaaatataaaatggggtttaagcttcgtttcttgtccgcgtaatgggtcaccacaaccttatcctttaagactctgttttaaaatttgagtctcgaatgtcttccacgtaattctccttcattctcataaagtttagtcacatagacacaaagcgaatcaacaaaaccgaatttgcaaaacttatacgaatcattagataaattatttgctggggtaatcagtgttttacgctatgtctcgttgtcgacgtttcatctgagtttggagggtatttacgtaattatatgtagggtttaaggtgaaaaattgaagtcaggctcgagccaatacgctgcgttttgattctctctgactaatcctgtcgacggagttgcttatcccggcaaattttcggcgcgatatcatcccaattcagaagtgacacgctctcaaacgaaatg

SEQ ID NO: 10008 - DNA, 3000 bp, Unknown; identical to SEQ ID NO: 10006
  misc_feature (1)..( 3000): cDNA_ID_2714342_gDNA_ID_2213359_Annot_ID_131822 3000 nt of promoter + ATG

SEQ ID NO: 10009 - DNA, 3000 bp, Unknown; identical to SEQ ID NO: 10004
  misc_feature (1)..( 3000): cDNA_ID_3033123_gDNA_ID_2213359_Annot_ID_131825 3000 nt of promoter + ATG

SEQ ID NO: 10010 - DNA, 3000 bp, Unknown
  misc_feature (1)..( 3000): cDNA_ID_2714324_gDNA_ID_2213359_Annot_ID_131827 3000 nt of promoter + ATG
cataatttaacccttgtggtctgaaatttgtactaattctttttgttcttactcattttctaacctgctatgctgtaagaaactatttaaacctaggtaagttgagataactaattttgtataaattttaagagtctgattacacacgacttcagttttaaagacaggaagtataattttacttgttattgataaaggcattacaattaccaacacgttaacagtaaagtcttgttttaatgaagtcattacttgtaaatgataagtcattacagtccctcaaactttatttattgtataatgaatgatagtaccaatatctatattagttttcaaatataaatataccattcccttgatagaatattggttcggctcaataaaagttaatatcatacttaggctgcttgttgggatagaacaatccccaaaacttctcaacataaggaggagtcggcttttgattctcgtcataaatggcaaataaatatgtctcgatttctttccctggtctcttcggtgtcccattcttcacatgcttaatcaaattattgttataaattctcgcattctctatgtttgtatcggttcctcctcccgttggccatccagtctccgccacaactatttccaatgatgcgccacccgatttctctagagccgagtacatcgcatcgagcatcgcatcaaataggttttggtaagatctaggagggtccgaaacgattcctgaaggagccgtgaagagagcgtaatcgagccggatttggcctacattgcccgcgtagctgaagtaagtgtagaggtttaagagtaaaggagagttcttgcttaccaagaaacgtatgattggttccattaccaccataacatctcccctaaacgaacctttcgatggtggataagactctcggagcactcccatgtctaccgatgtggatacctgttaaattccgtacaattataataaaacagagttgaaacttacaatttttgttatataaagataaaaagaataaaacgcaattaagttcttaaccaaatttacactaaaacattgaatatctcctatttttaataagataagttcgcaaatgttgaacttaaaatgaaattttgattaatgctaaaaagaatatttatcttatgaaaatacgtaatcgatatatatgagtaatgattataccttgatacgaccaccgagtccggctgctaaaaccgcccggtcaatgttttccatggcagggactaggaactgtgcgtaagagtcggagattttaacttcattcccaacagatatgtaacggaacctgacgccattcgcgtagttcatgacgtaggtttgtacccacgcgttagcttgtgattggctcgaggccacgctctgtaggtaagagttgggaagacccagcgttacctcgatgttggagccacgtagggcggctagaacgtcgtggtccggactgtatagcctaactcgttggatgtttttctgtttgaagagcgcaatggtttctgctggtgaagggaggttgttgccgtttcttccatagcaaacgccgacttgtccacctgttaaatatcaatccaatatttaatacattcatcacatgtggcataattcatgagagaattaatgtgttactaaatatttcatgagagaattaatgtgttccttcttttgtcatagaactaaaaaccttagactttactacatgttaatcctaatattttttatttctaatgaattatttacattcttagcaaaaataaaaaagagaattaatgtgttactaaaatttagtgactctattttttttcattgttgttaatcataaaacatatctaatcatttgaatatttgttttcaacttttattttcaagtatttgaaacatcagtataagtggtaaattataatttcaatatttaaataattttgttttaaagctaaaaataatagttaaaaaggtctcaaaagttcaagatattgacatggtttgattactctatgtcagggtgatattataatataatcacacatgttatattttctatatacataatgaaataaagaggtattaagtgacctgttggatttgtattgacgaagaatagaccgagaagaagggtcaaggacgccaagaatcggagatccatcgtcgttaggtgaagaaagagatgatttgtagaaaattaagagcgaggtggaaatcatttactgttatgacattgatcctagctagcataaacaatatatatagtaaattctagagaaagaacattaatatataaccaaatgtaaaatgtcaatatgaaactaaaattaatacacggaattaggcaacaagataaaataatgagttggtaatctctgaataattaatacaatggtgtaatatatggtaagctacataatcagagacagagagagacatttgtctttcttgactcttcataagtgcactcacaagtcaaacaacgcgtgtgatttatgagggcttagccgttaaaggtgtggttgaaatcaagtaaagaactttaattcagacaaaatcaaatgctggttgggctaaccaaaactactagtaatactaatggtctttaaacgaaatgagcccaataaagaacctgagacaaatctgagcccacttgaaagctaaaagccgcctaaaaaggaaacctaagcttaaaccagctaaaccgaaataattaaatggattcgttttttctcatctccgatccctaaagtcaaagattaaaccacactaaaccgaaattgtcatatgcgcgtaatttcttcgcaacattttgaccgaacaacttcaaaatcaaacgagcggacggtcaagattgtccgatcagtatcgtctttttagtcagtcagtcctgaacgccggctagatcaaccactccatctctcgtgctgaccacgctccgattctccatttctttcccttttgacttttcacttccaatttttcggtatcagatctggacg

SEQ ID NO: 10011 - DNA, 3000 bp, Unknown
  misc_feature (1)..( 3000): cDNA_ID_2714320_gDNA_ID_2213359_Annot_ID_131828 3000 nt of promoter + ATG
aagctcagtctgtttaataaggaaattgagcctttgttgctgcctttttgactctcgctgctcctgttcacgtttaaaagcctctgcagcttccttttcttgctttttcctctcttctgcctgtcaacattatcaaattattccaagtgcaccgttcaaaagagcatcagctgaagaatgatattaaaaaattccaagtctacaacataatttcatccatttctatagccaagtttatagagttgtgactattgttcaagtccttattctatgagaaaaggcaaataaacccgtgcaaaaagcatgtattattaaaaaaattggcaacagaatctgtaacccaatctagttggcaggctggtatactacaaagtcaaaaggagaatagaaattgtaccatctgcttgtcatatcgcttccagaatagcagcatgtctctggatatcttcctagtgcgaattggtgcagttcttgggattttgtatgatctacccaccttcattctcacctgtgaactcaaagtaatcaaatgagagatctaatcaaaaatgaaatctaagtccgcgattaacaacttagttttcgggattatgttgttaatcgccgacatgtaatttggttcttcttttataaaatttctaccagatgaccaaaaaaaatctaaaatgaaaggaaagagaatatccgtctaggaaaggaaatataataaagactaatatgagagtcaatttcaattacctctctttggcaaccatctgcaaacctcttggcatcaattgatagtttacgatgaaaagtagtgaaaattctatggtgttttgctatatctcttctgacaatattgatccaggcttttctaattttatccctttctgttttctcaatgactgcaggatcattctttgctttcagcttcttcggtagacttcgtttaacaatctgaagaaaggatacataaaacaatgtcggaacaaaaagataatgttgttaataaagccatgaatgagccatgaatgagccatgaaggattcaaaactatgattcataaaatactgccacagaatccaaacctcgtatgtatcccccttctccagaatcttcacgtaatggacctgtaaaacaccaccctcagacagaattgtccgtgcagtacttccagcagatccttctggaatggcagaattcattgcagcttctgacaccttgaggctaaaatttggggtggagtttgaaggtgacagggccttcattctagcttgaagagattcatattgaggtcgaggctcacccattccattacggcttcttactccagaccttttatcacttgccatcagttctgctaatgatctcagatccagagttcctttcaagtaaaattcttccacatgaatgtctgaaaagctcggtaagtttaatgatgccaccagcttgtcataacttggggggattttgtagatgacaccatcaccaatgtccaaatacgaaggttcatatgctatcctgcaaatgatgcaaaattcaacgtgtcaatctaggaaacccaacaccgtaagttatctaagcggattacacagggttacacggatcccatggaacatgaaaaaacatatgatcaacatacttgggtgtaatatcacgatcatggtagcttcctcgcctatgtggggtcacatcagctgcaaaatttggagagttgtccatgtcatagaacctcccatggtaatcattccctggtttcctacctctgtaactgcccacattgctctttagcaccggaaaacccatcagatgaggaggattcccttgagtctccttggacctatttttgaatttttgtacatgctccccaagcattgatcggtagtgctcctcagtaacatgttgattgtagagatcatcatcgtcctctgcatcctcagcttctgtccaccgctttctcttcttggagctcgcattcattctcgatttagacccattgctgtagtttgccactaccccacctttaaccattaccaaccatatagacagaacacagataaacgtcacttaaaactatcacagtaggtggcaaaagtaattccataaaaccaattaaaaactgtaccttgagtgcttctactttcatcctggctactactcccataataatcaacttcatcttcaggtttcggaattctaaacttcatcaacggctgcaagaatgaagaatttagccacaaaacccacactgaatttcaacagtaaaacaaaaacacactgtagaaacaaggagaagctatacaattgcaagatttccaatcaccaaaactacattcatcacagtcacatgatcatcatccaacaagtacaaaccatcaatttcaaggaaatcacaaaaaaattgagacctaacagacctcgagatcgaatagattcgcgtaaggagagtccttcggtggtcgtcttgaaggatccatgagagacgggaagagaataacacggcgtcaaaattttggagagtcttaatccttaaaagcttctagacagaaacattcgtcacgagaaagaaaaagagttcgtctcgaagaagaaccctaatccagtatgatagaggaagagggcgaaaggttaaagacgaacatgcgcaagttagtggacacaggcggtacagaaagaagtccagactactaacatacgccaaacgaataaagcttcttaccgtgcgcctctccacaaaaaacatttaattattattttttcttaacccctccggtaccggccgatcagataacgacggctaagttatcgttttggagataaaaataccttgtggggtaaacaacaatatataagaagtaaaggggcgaatttataaatattgaaagctcatattcgagaaaaccctaatttcaatatacaggattttttacctcgtcgtctctgaaacttcatctctgccgtcttaagaagattttgccagtgcgggaagcggcggagattgagagattagcgacgatg

SEQ ID NO: 10012 - DNA, 3000 bp, Unknown; identical to SEQ ID NO: 10003
  misc_feature (1)..( 3000): cDNA_ID_2714316_gDNA_ID_2213359_Annot_ID_131829 3000 nt of promoter + ATG

SEQ ID NO: 10013 - DNA, 3000 bp, Unknown; identical to SEQ ID NO: 10002
  misc_feature (1)..( 3000): cDNA_ID_2714310_gDNA_ID_2213359_Annot_ID_131832 3000 nt of promoter + ATG

SEQ ID NO: 10014 - DNA, 3000 bp, Unknown; identical to SEQ ID NO: 10001
  misc_feature (1)..( 3000): cDNA_ID_2714302_gDNA_ID_2213359_Annot_ID_131834 3000 nt of promoter + ATG

SEQ ID NO: 10015 - DNA, 3000 bp, Unknown
  misc_feature (1)..( 3000): cDNA_ID_2704602_gDNA_ID_2213619_Annot_ID_131929 3000 nt of promoter + ATG
catgagccttgatcgattcaagacacttgagatccgacagtctccagactttgagagtcttatcccacgatccagagtagattatcccagcgtgtaccgcaaggcacgaaatgctatcggcgtgttcaatccagagacgcttatggttcctcctcgtctgaacgtaattgctctgtttcataaacttccccagatagtctttagtcgtgggaagtgtatcaacaagcctgaaagcattctcagagtttctccgagaaactttccaaactctgattctactatcttgatgcgccgtgaacactttgcttcccacgctgaccaaagccttcacagacccatcaccttgtccgaatttcgcaaagatcttgagatcaggctgttgccaaacgatgatatcttttccctgagacgcactcagcaagaactcaccacagagcgctaaggaagaaacagagccgacatgagcagagagaacagcgagtggcttgtacgcgccggtgataggcggacggagagtgttgaggacgaagcttttggtggacgcagatgggctgagagaaccgtcggagtcgttgctgttgcttgtggttgaggaagaagatgaagacatcaagactccttcttggattgatctcaccatcgtatcaagagattcaagatttcgtttctattttggaacagagaaaccaacaaaattggagcgtttgaggaaatgttaaaaagagtatttatttttaaaaaggaggagaaggtgcaacggctacattgacaggtggcgtagcctcctttttttgccttttgcttatcatttgcgcattttcattaattcgtgatatatggctcatggaatcttataatatatgaaaccacttcaggagccttaaatttaatgtgtgcatatcatagtaacggattgatcattgttctcttgtttgaccagtgatgttaattggaccatatgtggatactgtaacgttaaggattatgaaaatcaagatatagatatatgtatttttcaagtatacgatataccaaattagttacgacaaaatgcgaatgagttggtagtaatgagtaaacctcaaaatactgttttttttttgtcaacaaacttatgttattatacttggatgacttaaataagctaaaccgaaaaacattgtttaacctcaaaatacttatttaattagttggtagcatcgttacatattataattacgactacgagttagattctcaaataatattcccaaatggatatatttacatcgattgatgcatgcttatttgtagtgatcgtcccttatgtatattatgtttttattttattttttgaacatagtataatattggtgggagaagacaaaaataagggagctctgccatctaatacgggaatcaagatatctgttttacatcaaacaaagactagtgtgatgaaatgaaagttaagttaacaacaataaaaaacaaaattagctgaaaatgtaatcaaatgagagatccgaatccgatctccgctaagtaaagcgtagtgggagcgtaaattcgcgtgagtctgattctgaatcgtatcatacataccaaatcaaacattaacgtttatgatcttacttacccatatcttatttcttaatttgtttggttgtttgtaaatgagaaatacactatgataagagaagaagatctaaatgaggcatagatctctagataccaaaacagataacgccaccaactaacatccaattaaggatatataacacggcatctccctctttagtaagcttacgaccaaagtagtgtgactagtgcggaacatttttgcagttaatactacttagcctcaattcttaattatgaccgtatgggacagggtaggtaggcacaaagcggatattgtttttaatatatttgcatcgaatttggtttgttggatcgataatcttttaatatgtatccgcttttgaactagtctattctccgattgtagaatgaaacatctatccgaaattctaatttgtagtattagtgatttgttttgtttttaacagtattttaatatttgtttaaatttgtaaacttatggttatccagactttttgaatcattcaaaagtggaaaacagatcgaatggaagtatagaacactacaatatattttcatatttttcttagccgtaagccactaatattggatggacataaacataagagaccccacaatatttatcagattaagcctttattcacattacaatgtttcgttctcaacttctcatcataacgtgaataaaagtaggagttagaattagaacacaacatctctaacaaatctcttatctgcattgctttggagagacatgtttgtacaagaagaaaaatgtttatggtcagtccgtttttttcatattgattaccttttaaatcccatttggtattaaaaaaaacccacttctaagatatgtttcgctttttatggtaacaagacatataacttttcaaagttactgaatggaattcttgacagaagttgttaggacactaaataatggaaaatcaaaatcaagggttacattagagacacgcgtacatcaattatttcttaaaatgcaacttggtgtacgacttttaattcttgagtcctcaaacccgagcattactccaccctttcttttcgcaataatcaagatcctaatttaattccctataagtattttttctaataactatgaaaataaagaaaaataagcgttgaagtcataagtttgaacaaagacgcgtgacctggaatcgtgctcaagaaaaaatatcacaactaatgaaaacgcaaggtcatgagtattgaccttgaccgggcaagagcctagagccaagaggtgatgtgtacttaaatgtgatagatgctcccttcttcttctctcatcactaacaaattaagagaagctgatcatcagattgaatcaaagacagactttgacttttctttgtgatcgaagatatg

SEQ ID NO: 10016 - DNA, 3000 bp, Unknown
  misc_feature (1)..( 3000): cDNA_ID_2704594_gDNA_ID_2213619_Annot_ID_131931 3000 nt of promoter + ATG
tgccgacagtaggttcagggaggaagatgtgtccaattacttcaggtaatttccaacaaaacacattgaacttttatttggtctgaatgtatgttcttgtatgtgacataagatgttgttatggtggttatagtacttttggaccagttcaagatgtgaggataccatatcagcaaaagagaatgtttggttttgtgacatttgtgtaccctgagactgttaagagcattctcgccaaagggaatcctcactttgtgtgtgattccagagttcttgtcaagccttacaaggagaaaggcaaagtccctgacaaatacaggtacttatattgctagtattagtaactcttatactttggcctgattgttccttgaatcccttgtgtttactgcggtttgttgtgcagaactaaccaaacaacagagcgagaactgtccccaacaggccttgattctagccctagggacgttctaggtaaacaaacactaaagcacttgtctcttttggttttactgaagaaccctttacttgcagccatactgatttgcttgttgtgcaggagggagagggttttataacaacactcaagatgtgttgtggaggagtaagtttgaagaagagattcttgaacttcagagcagaaggctgatgaatctgcagcttcttgacgtcaagaagcatttccaactcaattcccctaccaacattcactctccgaatcctttcagccaatcacttatatctccacgcccattgtccgtgatcaagagagagtatgatggaggagagaaagggaaaggaagttctaaagaaggatctgatgatgatacaatgaatctaccagagaggtaggtttatatacaagagttctctgcaaggaaactgttttgtgtattttaagctgaagctttttggggtgttttaggttggaggatagcttgccagatagtccgtttgcatcgcccgctcatcatttgcttctgtttgctgattctgctgacaataacggatcggatctgtggtcgccttcttctgataatgatgataattctactccttctacactctccgactccttcaactctttcaactaccaaatgccaaggtccctagattcaaccacactttatgttttactccttctacacactttaatttctggtatcaagttgatggtatctaacattgcgttcatgaatcttctcaataggttaccggcgattggaatgttacccggtaggggtggaccaacctgtcgtgttgggatataaacaggtaaaaagagttaatggatggtgaaacacaaaataacaatcttgttaggttaatagtttgtttgttgtggttgttgtttttgttacaggaagtgaagtaagaaaagaaaaaaactgataaaatagagagacccttaataaccaaaaagatgcagaggtgtaaaaaataaaaagcaggaaatttgatgtaagagataggagaagagaaagaaggaagattgttgtaccatttctctagttttaatgtgttatgtgatgatggaccacacaagatgatgtaatatgatatgatatgatatatataatataggacaagaagtgtaatctctctaaagatatacaaaagaaaagagagattatcatttgagtttgaaaagtcaatatgttcttgtccgtgctagttattaccctctcactctaactactctccaacttgggaatccagagatatcagcttttggtgattttttcttcaactataatttttgatttctaggttatgcatctttgtccttaataaatgcaactttggtgaggtggaaagtgtaaaaagagtaggtgatatatccatggttattaccgtgatttaaggcaaagaaaagaagaatgttatgaacgtatggtcgtattattgcatgtaaagactaaagttgtgatcgatatccaaattgtgtgtccttaatgacttagcaaaagcaaggacagtggtgtgtgtggtggtgagacacgcgcgagagagtgagtgccaaaaacttaacacacaacattacaaaaatagtttgtaacttgtggtctacttacaactatgtctcttctattatgtgaaagttggaaagaaggtgttttaattcatcatatcaccaccctatgatcaaacgaatgtgaaggccaagctcttttgaggctaatgatacaaatatatgatatgatatgtgtgtacacaacgattttcaagcttcttataaattgatcctttttggggactagggtgatagttttagtattggctattcgttgtaaagctagaagcttaagtatgcatgtcgcttccgagattccgcttaatgcttatttttctggtcacaaaacaactaaaattattgtacagtataaaacaagaagaataaaaacaacttcgaaataggaaaacaggaggaagaaaataatgggatcccacgagccaacacacaggccatgtggtgtggggatatatatttcagaagttgtgttttgtggagacatgtccacatatatacttccaatatcggttttacaaatatttatacatatgtataaattagatgatacgtgagacgtcaactagttttatggctaactaattaatcctaccatctactcaaaacaattttctaaaacatttgccagtttcattacatcttttgcattaaattctctaaaagtgagcaaaaatgtttttaccgttccttagagacaaaggcactctcataattcacatccgtacaaataggtagtggcaattaatattgaggacagtgatgaaataaatcgatggtagggatctttgaccattggtattggtttcaaagaaagaggcacaacacacacttggacttggtcgattcattaaaaatcgaaccccaacacaactgcaattaaatggaaacgaagagagagctcaatcatcgaagcgtgagagtcacgaccaacgagaagcgagtggatgtctggaagagtggaagcaatg

SEQ ID NO: 10017 - DNA, 3000 bp, Unknown
  misc_feature (1)..( 3000): cDNA_ID_2704544_gDNA_ID_2213619_Annot_ID_131932 3000 nt of promoter + ATG
acttcagagccaagaaatggtggaaactgaattgatcagactccgggctcttctggtagagatgcaggggaaaattgaagttgaactttgtagtttctcgtttcagaaacaatgcaacggttctggttttgtgttcaaagaaggtgatttctcctactatttggtttactagttgaaattggttgtcaacaatctgatacgttgatgaaaaatttagcattaagaggaagaactagtaaatagctaatgaaatttgagctactgaaattttattgaacaatacgaaacgctaaagaactagtttcatttatttggttatcgtcttagtaaaaatcacattttcgaataatgaaaacgtaaactaatagtaaaccattcatcaccatcatttttatacaaaagtgacctagacctaatcttgacacaattttggatctcgtgtaatcacacagatggatgcaacttagcaacaagtaatatgatgtgtgaagcggcaagagtggagtgcgaggagggccaaacacttcatgatcctattcaatcttttgttcctcaaccaccaccattctcacgttaagcgtttacgggctgtggtattgtgtgtatatatatacatatgggtttaattaggggcatagaggtcggattccaatatagttaacatatacacagattggtaacttattctacatatgtctattttaagggtaccaaaacatcttgatgtggaattgattttgaaatgaagaggaggatgattgtagatttgtagttgtatgtatatatgatgataattgtgggcttagaagatctttgggggtccatttatagattctctatatgtgggtatggtgaatacccaaaccaataatagataaggacttaaggtatgcatcatacatgcatgtgtatatcataaatttcaaatgcaaatgaattccattggtgtggaatagactgccccaatcattatttttttttttcaattcgcctcaaacatttgcgcataataatcattctcccccatgtaaaatttacatgcgaatcaaatatttctggatgagtcaatgataaggccgcaatgttagatttttggggtaaattatttagcaaagagtatatatactttataatattgaaaacacataatcatagagtgaagtgttaggtgcctcggctcttgtgactagactagaccactgcttttgacacccaaaaaataactattataatcattgctttcctttgtgggtcattcttcttttataaaaaggtcctttcgaaattttaaattttcaaaaaataataattcttttttaaccctacattaatttagaacaatcatgtcttttcatctttaatcctaccctctcatgaatattttattaaagcaaaaaaaaacatactcaatactttgaatatgtgaaactacgtgtgtaagattttttctagataattagttatgttgcttcaaataagaaacctatggaattggtcaacacatttgacaataaatcatatgcccatgagattaattaagacagattttaataatgaaatggtttttatttaatttcatgtgatcgaagcatgcaataatgattgaatgaaataaaattcaagtgtctctcaccaaacaaataaaaggacaataaaagcagagattaagctgagcaaattgacaatttggatatgacatgctttttatgtttccctaattactcaaatttatctttaaatgacaataaaattctgccgtttcattttaaaataagcaagttgaagaataagaaaaccaggtagtttatttaattttgtaatcaaaccaaaagcttagctatacttaaaaatgtgtccctaccaaaataaaatgatgaaaaatgagaaagagacagtaggagagagtggagaccccagcgatacagctggtctgcatatcaatcaccggcgcgtgaccaacacatcccaacggaaggcgcgtgtatctttcctgtccgaatgaacaaaaaaaaaaaaatggggttgtgtcagagaacgtgcaatgcaaccatcttttgtttttaatttgctttttaaaaacagtttattacacaatctctctgtgttttttctatctctctctttcttcttccactcgtgaaagaaagaccagagagttttctcctgatccacacaacaacaacaacacagagatcccaaatccggaagatatcttcttctctcataactcagtttactcagattcactgaaacatacaattaagtgtacgtacttcttctctttatctttctctcttaaatttgatgataagaagaatctaataatatgatgacatctttcttcatctactattcccaaaggagcagtaaccgtcagtctctcacctgcagcaaaattcactcttctgctaataatgttctccacagagattcatctattgatcattttgactttttcaggtaaagtaaatttttatttctcttttcggtctagtaaagttttactcaaacatagaaagttacgattttttttttgttttgttttccatggaaaaattctcggcatgcaaaaacttttttttttttcctaaaaaagtatttaccttttcctttttttctccaactctttttcttaaagtgttaattttttttcttcttgtaagcacgcgagcgagaagaaaacaaaaaaatgaatagagtagtaactttttatactatttctcttttaaaatttttggtatttactggtgtttcgcaggaaccagagatgaaaaattatagttaaggttagtagtagtagataggtttaataaatttgtagttaagtaacccaaaaaaataacattaaactaaaatccaacactagaaaccagagagaccctcttaacgacaacaacctctctgtacacaagacaacaaacactctctacaaaaacactactctttccttcttcttctctctactctattctaattctaaagagagagagaaaagctatg

SEQ ID NO: 10018 - DNA, 3000 bp, Unknown
  misc_feature (1)..( 3000): cDNA_ID_2704585_gDNA_ID_2213619_Annot_ID_131935 3000 nt of promoter + ATG
acttcttgattagatctttctccttaagtgaaagcacattttcgcgactaatagaattgaagtgacttgtgtcacttgacaaaccaactcctcggttgtggcttggaaaatgtgtttggctactacaatggatttgtgatgttagagacacgtgtgtgaaatttggaaacaaaataatcactttaaaattaaatgttgtaaaatttgaggaatcataacatgaatatcatattaattactctttagtttattgttccaaattggtcgattaatgctcttgttcgtggaatttacatttttctccaatgtagctgaaatatcgtaaactttacaaagtcgtacatatgattgtacttagtgtttaccttagtctcaccaatatccaagtcaatcaagaagtaagtctaattaagtagttctctttggtgattaattagagtcgtttttaagtttggaatcgatttagatttttttctaaattggtttctgaacatgcatcttgcttcactctttcggtatattgatcatttaaatcatgttttaggactccaataaactcctgattcctgaatgtactaattattgtctattataaggtttatgaaatcacttggacgttggtattgtagtttgatgattttttttttgaatgtaatgtcaaattatattcaaagagaaaaatatacgtttgtacaacatgtgattcgagtgtttgaatgaaagaatttaaaagaattgcttcgagtagtttgatgattttagactacgagttatctcagaatacgagttaggagttgaatttgaagaaacaagagagatgaaaggtttagaaaatgaatgacagcattttgtagatatacgtctgtcttcatacaactatttttaccttcttttttttttccttttttttcgtcaactgtttttaccttacagtggagttttaagacgatcagtttttttgttcttgttagaaaaaacagtttagttttttcaattaacactaagacaacatatttaaaaacactctactttgggtttcttccataagtagtagaaaaaaaaacaaaactatatataattggatcaatgatatggttcatacgcatgtcttgtgtatatgagtcaatatcgagaataggtgttttgcacgaagaaatggtgtcaatgatgaaaagttccaactctacaaagagatgctaaaaaacttgtgatatgagaaagttatgcactagtgcaaaaggctttacatggcatgtttttagaacaagcggtagttatgaatatgatgatccagtcaaataccatatgcaaccatgatgttacagtatatgctttattatgttaaatgaataaattgaccaacccataagagaaaaaacaatggcttcaaagcgaagcacttgattttaaacaaataaaaaatcattccacgggtcgaccacccaccgtctcgaccatcatacacgggtttccaatgcttaactcatcccaccgtcgtgacctaaccgacttagtcaaccccgtgagccacccaaccacttcctccatccccggccgtttctctctacacgttctcacacacttagccgccactaaccccaaatgattcctcacacttacatcaatcggtggtccgattctcggatcataaatcccaccgattttgcctctttttatcatcggaatcgcccaatctactataaacgacggcgaatatctaacgtcgattgcttttcttccgctgattatctctaacaacaagatcccgaagctaaacacatcagttttcgtgcttaatctatcagccgttacgtaatctggatctaagtaacccattgttcctgcaggtggtgttgatttcactttttgatcatcaacattgcatctgatcgctaatccgaaatcgcctagcttcgcgtttagattcttatccatcaatacgtttgctgattttatatctctgtgtatgatcggtgtctcttgagaatgtagaagatgtacggcttttgcaatctgaagagcgattttgattctcttactccagctcgaaatcgcaccggagtttaaaacggtatctgagtgaatcacgtcgtataagcttccgtttcccatgaattcaacaacgagaagtggttctttggagttatcggcgctaaaacctaagagattcacaaacctagggctacggattctggagagaatctcgaattcgttgtggaactcacggctgatttctcgagatttcgaaggtctcttgaccgcgatgtgacgtgaaccgatgacagctttgtaaacgcttccatggcttccacgtccgaggagattgttgatgtcgaaacctcctgtggctgattcgagatcgcgatggaggaaacgacgaagtctaggacggtcttcaatgggagattcgggaggagcagaagctttgctggaggtggatccggaggttgatgcggcagatgaaacggcgattgcgacggcggatccagctttgcaggagagataacccattgaatcgagggaagaagaagatgaaagtgaaagggaaaggtgtacgtggagtttaatggcgtgagtcgtgagaagtcatttttgtaaattaaggcacatttgattagactcaaggaagtggaggggtcgtgtttctaattaattatgccttttcctaaatatttcaaatccacccttatagtttttaaaaattctatttcgtactgataaataataatagtttcaatttacaccctaattttagttgacgtaaataagattaatcattcaattggtcccgcttctgccacctggcactttaatgttttagcgcgatagaaggtgacgatggatgagatgacgtgtaataatataattggctgaacacgttgttaaggagtagttactttcgtatataaattctgaaaacataaatggtaaagtcgcaaaacgggaaaaagcttaaacctttatttactgattaagtctaccgccgggaagacaaagatg

SEQ ID NO: 10019 - DNA, 3000 bp, Unknown
  misc_feature (1)..( 3000): cDNA_ID_2714528_gDNA_ID_2213619_Annot_ID_131938 3000 nt of promoter + ATG
aaaggacaaagatctaattcagcagctccccggacaaccttctgacgttactttcaaacagtacggtggttatgtggccgtaaacaaaccagccggtcggtttttgtactattatttcgttgaaaccatcaaacccggtaacactactcctcttgtgatctggttcaacggaggtatgtacatatagagaacatgtattccctctagaaactcctttacttggaactagttatatattttatttttttacaggaccgggctgctcatctctaggtggggcatttaaagagcttggtccattccgcgtacatagcgacggcaaaactcttttccgcaatccttattcatggaacaacggtacctagctataatttctaaaaatatattattagaaaccaacaaggtatattctcaagacatattgagatcaactaagtatgctattacatatggaattgcagaggcgaacgtgttgttcttagaaacgccggtagggacagggttctcatactcaaactctccaataaatgggaaacaaggagacaaggcaacagcagaggataactacatgttcttggtgaattggcttgaaaggtttccggaatataaaggaagagacatttacatcgccggtcagagttacgctggccactatgttccccaacttgcccaaatcatccttcaccgtaacaaccagaccttaatcaacctgcgtggcattttgattggtaatccatcacttaacagggagatccaggatgatttcggctacaaatttatgtttagtcatggtttgatatcccaacagcaaatggacaattataataaattctgcacggactccgacttatatgattgggacaagtgccatttggcgtcccaaaaaatagaagctcaaaaaacacacttggacatttacaacatatacgctccattgtgcctaaactccacattgagcagcgaacccaagaaatgcaccacaataatgaaggctgatccgtgcagtgggaactatttgaaggcgtatcttaacataaaagaggttcaagaagcgatacatgccaacaccacgaaaataccgtatgagtggacctcttgcaatacgaaactactttgggaatggaacgaaaaagataggtatgtctcattgacacctatccttcaggagctgatggggaagggtgtccgagtcatgctgtacaatggagacgtggacctggtgattccatttacatctacattggccgtggtgaagacgatgaatctgacggttgtaaaggaatggcgtccgtggtttaccggaggacatgtgggagggttcacagaggattacaaagggaacttaacctttgtaactgtgaaaggagcaggtcatagtgttcctacggaccaacctatacatgctcttaatatctttacaagctttatccgtaacactccactccctcaaacagcctgatttctaacttgtaccacccctataaacttaataggacactttggtccattgattgaatgatctaatgataagtatgatgtgtatgcgtctgtgatacaacactcaacaaattatacttaagttaattattgtcaaggaaataaaatttcgaaattatcaagcataaatttaatacagcagtagccactttacataaacaaagttcaatcccaaaaatgcattgtttctcttccaaacataacttgttcaaatctataacattcctgttgttttactgatcatcattccaagttagcagatgaatattcccatttccttgatattctcttaataggccaaaattgtgtcataatgtctctagttagattcggttgcttatctcttgtaatgcaacgcttctctcggaacggcattgtcgaattctccggtgaccaataatctgattgcaccagcagggaatctgttattttgatctgatccttcaattggctgtgagagtgagaacaatggacgatgattatactagagagatgatggatctcaagaccttagacactcgaaccctagagaagaaagatgttctcgctaagatccgggtaacttttttatagggttcctgcttccagatctttggttagtggatctaatgtctttgatatattctcgatgatgtatacatttggaatcatgtgaattctcgtacttagaaattgagtctggtgaaaaagttataatcttaattggattctttaacgttttgtgtgactactgtaaatttggtcactctttgtgtgttgatatgtattgaatctccatcaacattcgtgtcttactgtcttgtggtactacaaggtcttgctgtcacgtgagtaaccagagggtccagagaggaggacgggagagatgcccccataattattttctgaatcgcgacttcaacttaagtttttcgattagtcaagaaacgtaactacacatttgatagcattattacgtctccaatagtaaagtcctctattgctacttcacacgaaaaaaatgtttgtggatctcttgaagtaactagctaaatcgtgaggatattgagctggaaattgtctaagatttgagaattattagacggtttctaaacgctcaaaagggacttgaagaaattcgacttttttttattggaacctaggcaactatatcattatttacaaagaattagtttcatttgatttataagtttgttacagttaaacctcgaaaatataacgatagataatggctgctaaaaaaagataaaaaaaaatgtggattcaatgtttgataagaaaaaaatattgttatattttatctacggaggacaggtagttattatgttctggccttgtcggatttgttgttaagtttctacaaaaggttaaatgggttattaaaatagttgtcaaaagccaaaataaaacctataaaaatgctgccattcatattccaaaccattcgtctccatttcttttcaaatccttctcctaattctcataggattccaaaataagaga

SEQ ID NO: 10020 - DNA, 3000 bp, Unknown
  misc_feature (1)..( 3000): cDNA_ID_2714525_gDNA_ID_2213619_Annot_ID_131939 3000 nt of promoter + ATG
aatccattgtaggagcggaatacatgtttcaaaacgtttggaggggtcaaagcaaggagatggtaagtcaggtgatacgagcttcaatgtgcttcgtcgcgtgctttcgccaaaggagaaagatctaatcaagaagctccccggacaaccttccggcgttagttttagacagtatggcggttatgtgcccgtaaacgaaccatccagtcggtttttgtactattattttgtggaagccatcaaacccaatacatctactcctctggtcatctggttcaacggaggtacacatagagaatatagattctctacaaacttttttttttttattggactcttctacaacgtgaaaagatataagtcttctaccatctataaacaaacttttttataaaaatacaggaccggcctgctcatctctaggtggggcatttctagagcttggtcccttccgcgtacatagcggcggcagaaaacttttccgcaatccttattcatggaacaacggtactttttaaaaactttattaattagaaaatttagtgtgttttcacaagatatatatgatgcatgagatcaattaagtatacgattacgtatggaattgcagaggcgaacgtgttgttcttagaatcgcctgtaacgacaggtttctcgtactcgagtaatccaattgatttggaggaattgggggagaaaggggacaaggcaacagcagaggataactacattttcttgatgaattggctagaaaggtttcccgaatataaaggaagagacatttacatcgccggtcagagttacgctggccactatgttccccaacttgctcagatcatcattcaccgtaacaagaaaaccttagtcaacctacgaggaattttgatcggtaatccatcacttctcacatcgatccaggatccatacggctacgaatttatgttaagtcatggtttgatgtcccaacaacaaatggacaattataatcaattctgcctaagagatgacttatatgataatgacaagtgcgcactttcggtaaaaacaatcgatgatgcaaaaaagcacttggacacttacaacatatacgctcctgtgtgtctaaactccacgttgagcaggatatccaagaaatgcaccacagttttggaggttgatccgtgcagtaaggactacttgaaggcttatcttaacagaaaaaaggttcaaaaagcgatacatgccaacaccaccaaattaccgtatgagtggacctcttgcaataacgaactgactgagaattggagcgaaaatgatagagacaccccgatgatacctatcctccacgagctgatgggcgagggtgtccgagtcatgatctacaatggagacgtggacctggagattccatttgcatctacattagccgtggtgaaggagatgaatctaacggttgtaaaggaatttcgtccctggtttacgggaggacagctgggagggttcacagaggattacaaagggaacttaacctttgtaactgtgaaaggagcaggtcatagtgttcctacggaccaacctatacatgctcttaatatctttaccagctttatccgtaacactccactccctcacacagcctgatttctaacttgtaccacctcgattgactgaacaatatacgttggtctataaacttaataagacactttggtccagttattgaatgatctaaagatggttatgatatgttttgtatatgtatataaaccaatttacaatgttgtttacgtcgtacgtctaaataatcaatgattaagttctaaatggacatacatatgcgtgtgtgatacaacacaacaaattataatgaagtttgttaagcaaccaaaatgtcgaaattgtcgagcataagatcaatacaacagtagtcacatacacaattcttaagcccataatgcgttgtttctcttccaaaaacaatttagaatttcaatattcaatattcaatatcttttatacatttcgttgcttttattgtttcactgctgttttactgaatgtcatttgaagttatttacgtttttccacaactgcaaaattgtgaagtttttcatgtgagatttcagagataggaggactgatagggagtgagtgagaccacatgagactttacagatgattttttttcttttttcaatttcaaaataaggtaaggattttgggggttttgaagaaattttcgttgttttggtaaagcacatgtttgaattaggtaatattttttaaatggggtatatattaaatgacaatattttaaaaacaacatcttattcaggcaagataaaagttcatgtagttttcttccgaaaaaggttggtgtccttattagaaaatttcccataaaattaataataagttcatgatttattatttatataaaatttagctatgcaccaatatgtagctttgtaatctatatacatattcctgcctaccaaaaaaaaatctatatacatattccttttttatatatatttcttctcaaaataactggcattatcaccaatacagatttttccaaagttgtgtgagatctgtaaatttggtcactctttttgttgatatgtatattgaatttgatcattcgtgtcttgcagttaaacaaggtcatggcggaagtctaaaataaagagttttccgtctttgttttcttaaataaaagaaaaaattagttacaaaaatagagaattctgttttgccaaattttaggaaacaatttttctgaaaactttttgttttggtttaacttttaagggttacaaaaattgaaaaaagcaaagcttgtttggagtagttacagagggaaattaattgttaagttgttacaaaaggttatgtgtgattaaaatagttgtcaataaccaaaaatgtatccataaaatcagttcattcattgtctcaattctttcatacaaacttcattctgctttctttcataaagatccaatcaaacataattga

SEQ ID NO: 10021 - DNA, 3000 bp, Unknown
  misc_feature (1)..( 3000): cDNA_ID_2714521_gDNA_ID_2213619_Annot_ID_131940 3000 nt of promoter + ATG
tgtgtgagatctgtaaatttggtcactctttttgttgatatgtatattgaatttgatcattcgtgtcttgcagttaaacaaggtcatggcggaagtctaaaataaagagttttccgtctttgttttcttaaataaaagaaaaaattagttacaaaaatagagaattctgttttgccaaattttaggaaacaatttttctgaaaactttttgttttggtttaacttttaagggttacaaaaattgaaaaaagcaaagcttgtttggagtagttacagagggaaattaattgttaagttgttacaaaaggttatgtgtgattaaaatagttgtcaataaccaaaaatgtatccataaaatcagttcattcattgtctcaattctttcatacaaacttcattctgctttctttcataaagatccaatcaaacataattgaatgggagaactacaagactggtcggtaaccacttgtctcctccttttattgtttcaagcgtcacaaatccattgcacgagccaaacacatgttttaaaccgtcttttgtaccgctcgaagcgagggtttggttcgtcggttgacacgaaccatttaaatgccatccgtcacttaagcgtgtcttcaccccaaaacaccagcggtgttaaccaacaagagcaaaaggagagagatctaattgagaatctgcccggacagccttcagttagttttagacaatatggcggttatgtgaccgtgaatgagtcagcaggtcgatccttgtactattatttcgtggaagccaccaaaaccaaaaagtctttaccccttgttctatggctaaacggaggtatgtatctaccatctagttctacttttttttgttttttcctattcgttgagaaatcatacaagtaacaaaattgatgaattttgtccacaaaacataaacattcatacacaattatatatatatctatttttaaaatatgcaggacctggttgttcctccctatatggggcatttcaagagcttggtccattccgcatatatggcgacggcaaaacactctataccaatccttattcatggaacaacggtacaaaccttcttcttatggaatctttcgtctatcttcttttttttggatagtactatatttattattagaatctcccgcaaaatttaaaagtattatttacgtgtggattcgcagtggcgaacatattattcttagaatctccagtaggaacgggattctcgtacacgaacacagagtcggatttggagaatcccggggacatgaaagcagcagctgataaatacatcttcttggtgaaatggctggagaggtttccggaatataaaggaagagaattttacattgctggtgagagttacgccgggcactatgttccacaactcgcacaaaccatccttgttcataacaagaaccaaaacttcatcaacctacgtggcattttgattggtaacccgactctgaacgacatagtcgaaacaacgggttcgtttgattatttagtaagccatgctttactctcacaagatagtctccttagctacaaggaaaactgcgcaactgacactccaaaaatggaggtggattgcatcgcattgagtatgaaaatcgacgacgacataaaaaaaatgaacctatacaacatattgactcctacgtgcataaacgccacgttgaccccgttgactaaccaatccaaagaatgcaccactgtgctgcagtatgaaccgtgcggaatgcaatacatagcagcttacttaaaccgggaagacgttcagcgttccatgcacgtcacgaaattgccgcacacgtggatgctatgtaatgaagccacaggattcaattggaaccagacggattattctgcatcgatgctacctattctcaaagagctgatgaaacatgatcaacttcgagtctgggtgtacactggcgacacggatacggtgattccgttgacagttacaatgcacgctctgaagatgatgaatctaacggctgttacggactggcttccgtggtttagtgaaggacaggtgggaggtttcacagaggaatacaaaggcaattttagatacgccacagtgataggagctggtcatgaagttcctctttacaaacctaaggctgctcttactctttttaaacattttatccgcaactctcctctccctcttaccccttgatcatctatacactttgtaacaacaccacaacactcttttttcttttttctttttcacattcatgtaattattatataggtaaatgttaattgtgattttcttggataatctgcaaaactaacagaaaaaaacggatttaaaatttaagtaactaaccaaaaaaattgcgtattttgtatatcataaattttttggatcgttaagtagatctttctactttcacatgcatgaacataaggtgccaacaacaagctagatataacatttttttaccgattattccgacatggtgaaaatggtgtttccccttataaaatagccaaacttttttgtttatttggagtaagtttataaccacaaagatgaattttatttatttattttcatgtttgatttgcgacgaatgttaaaacatataatttaacactaaaaatttgtactgaactgcaatacattacatatataaacaatattttctaaaaattggctcatttattgtaattctattcagttctagaaaagaactcgtagactcaacgactagtaattttaataaaattacgttaatttcgtattttttcttttttcttttgtcatcagatattatttagggccaatcttttaggaatcgcgtcatatttcgttaatttcgttcaatagcgcaaaaaaaggtttcgatatctaaattattgatacagttcaaatcataataaattcggaattcagggtttaataaatttcggtttacatagatgaataatcggttcagttgagagtcgtgttttgtttaaaaaa

SEQ ID NO: 10022 - DNA, 3000 bp, Unknown
  misc_feature (1)..( 3000): cDNA_ID_1007273_gDNA_ID_2213619_Annot_ID_131941 3000 nt of promoter + ATG
catgcctgtaaaaatttaaacatgaacaaagataggtttgatactgatgcataaaaataatccttcacactctgcgcaaagacaagggagaatcatgtcgaggtttagagtgccaaaaagcctaaaatttacagtttgagcagccaagtgaacccatcacgtagaaagaagagagtattggatatgcatatctatgtcagtatgtacagaacggaaacaacaaaagacatcaagcatactggacctacgttcatcattggatatgacctaagtttattttacaaatagccaaagaccgccatggaagcgcatatgaccgaccctctgttatctacaccaaagtttatgactgcccaaaagcggcaagcaaaacacccaaaggaagacaaagttggcatttcacttcaaatatcatccttggcaagtaagccataatttccggaataatttctcctaggcacacagcagaaaatcagttcaaactgcaagtttatatatttagaagcaatatactgaaggcttgtatagcaattggagatcatcggcgatgatattacatacatcaccatcgagtcagcatactaactaaactctcatgcaaaaatgaccacttcttatactgtcaattaaattactttagtttgactaaggacatggagcttaccttttgcagaacgataacctgtagatgaattagaagtagtgccataaggaactcctgaaaaaggctctattttgttaaaaaagagtaactagagacgtataggtccagaaagcatttaatcttcttgcctcacatatgacataaccatgattactacatgatatttgtcagattaccactattatgcattactagaagcttttctagataacttagtggaatattccataaatagtacagtaatgattatcaagattaagtaatcaattttggtcaatatatcaccatctagatctccacctgcttactcttaggcctatcgaataaatgttctcagtagtggccagaagttgaaatctgaaacttttatccattcactatgatacaaatgaagttgaaaacatcaacactcaacataatctaagttttcgggcaacaacattcaacaagctgaagacaattatttatctattcatctgaaagaggatgatgaaaatcaaaattatagatgactagaggagcaattagcatcaattgataaggggaaatcatacacatacttgagtaattaaaatcaggaagtatagaggccataactatagagtttgaaataagggcttatatcaatgaattagtttaaatcatctgagaggcacactcaaagtggttaactatagacactaaaagtccccaaaaacctgaattcttcctacatcaccacatgaagtagatagacgtccatgaatttaaccaattatagaagactattacattaggactcaccatcatggtcgaacaccacctgcatggacacagttaattaagtcagtaggggctatccaacattaagaaaactacaagaacttcattcgatcatcacagatataaagaaatgcgatgttaaatggataatggaatttaccgccacatgggatgggagaaatttcaaaacatcaatcagctgaaaatgagaacacaatgaaacaaggtaagaagtcgaatgcgaaagttataacaagaaagataaactttagccttaaggaaacataattatacgcaaccatgattacttggtcagccatcgttaatgctacaagaagcttttctcaaccatcagatttaagtacagtaaaaatgaacatctggagaacaatactcaagatatcacttacaagagaaagagatgaaaatattgttaaaacccagtccgcatttccatcagcatgagccagatgaccatgattcaaccttgctgcacatgcccaatcaaatgtcaataagtgtgagatcgggaggaaaaaaaattaacatttgatgtacacatgagtagcagaattacctaaaagcttataataagccctgtatataatcgatgtcccatcaataagcatcactctgccatttgaagaagcagcagtactagctactctttcttctgacttgaaaggatattttatcgactgtggcgtaacatcttcacttatagaagtcaatgtgctgccactagctgcttcatttgagaattcagaaacagctacggaactgcaatagtactgtgtaccacaaatgtttatatcaacattagaacgaaataataagtatccttcagagatcaattttgagtttatagtaaacagaaatgtcgcgaaagaaacattcaattgattcagaaaatctgtatatcaaactaatcagagccatgattcagatgtagactacataacaagagtaaaaaccacatctaaatagctcagaattgaacgatacaagtacaagtatcaccttcgcagagcgtgcaagggaaggagagatgagagaacagttccgattacacaagtttccaacactccgaggaaaacagagattcctccatagaaaacgggagtgatgatacagatgcagcgtcatgacgtcactgaaagtactgtcatgaagaagaagagcgtttaaccttagcggaggaaacacattcaccatgaatcaaaaccaaaaatcgaagaagcgagcgagaatccgaaagcaatcgaagaaaggattttgaaagaaccttccaaaaatgagaaagggtttttacaaggacgacgaagaaggaggattttaccgctttctgcgtatccgtgtcttcctcggaacaaaatcttctgcctcccaaaaatttagcagagttgaatttagaaaactccaaattgggcccaataattaatcagcccatataaataaaggccttaagagcccattatataggcttttgattgttgttcttcttcttcttctattacaacaaaaacccttcgacagaagagaaaaccctagctagaaacgacgatccaaagatg

SEQ ID NO: 10023 - DNA, 3000 bp, Unknown
  misc_feature (1)..( 3000): cDNA_ID_2714517_gDNA_ID_2213619_Annot_ID_131942 3000 nt of promoter + ATG
gccggaagatgcaccatctcggttccgactctcccagtagctccacgtcacttgatcgtccagctgagatagatgtggaggattttgcgatgaagcatcacaagatggcattgttaaggggtcgaatcgaaattgagcgatgggaagctcattctcaccggtgaggcaatttttccattgggattgtttttcaatgttccagagattttgtttactcttgccatgtttctaatgttctctatgtcagggtttctcagtgtcgaatgaagaaaggtttgcttcttactggtgtcggtgataaggttaggattttttttagtatacaattcgattaggtattgtatgtgttatctaagtagcactggctaagttaatctgactactttgatcaggttatgcgcctctggtcattaaaaagctacaaatgcatggaagaatactcccttcctgatgcttcttccttgattgacttcgattttgatgagagtaaggtaaaccttctctaaaggtcatggatattacttaaactgggaatgagctaaaaatggatttaatgatcaatgatgatacagaaacctcagtcaagtcactgacatgaatttctgaaaccaccagtatagcagtataatctgtttccatgtcacagtttgcctcacctgttgtagctgaatatttccttttggctaaatcttgctattttctatagaaattggaagttgtatctctagcatgggagtattttgattctgttgttgttgttgttgttgagattgttggcttggttggtacccgcattagcatatggaggagaaatggacaaagaagcatttttccatctcgtgcaggcacctttcctaaaggcctttgtatgcggtatgtcagaagatactctcctgatatcaagttcctgagaacctatctgtttctatagaaagatcaactgatattccatgttactgacaaaagtcggtgtgatacttcaacatggctacctagcccctctgcccctgtaaggttgttggcttctctatccacactgataagttgtatgttttctttttcaaccagttacattgacccagaagctgtagttggatgcgaggatggaacagctcgtgtatttgatatgtacagtaagacatgttcacagatcattaggtaagctatgtattatgtgtctgttgtgttatggaacaacacagtgaaactggaaaagaacggtttttcattatcaaaattgtttacaatttcttttgagaaagctaaatcacaattttcctatcagattggttaataactatgtatgtaattgcaggactcagggtgggccaataacatgcttatctctaagcgataatcaactatttcttagtgggtcgtcactcgggagagtaacagtatctgaccctttgatggatcaaccagtggccactcttaaatccacgataactgcaggaggtaaactcaaactcaatgtcagattgcatctccagtgacatttcttaaagcaacctccattctctacaggtatacagacaatctgttttaaccaaggcactaatctcgccttcattggaacaactggtggatatgtttcatgctgggacctcaggtatgttaaaatagtcgtctaaggtttttttcaaagatgcaagttttaattcactatcttaagacgttataaccaactattatctaacaggaaaatggatagattgtgggaaaaacgagtgagtcctaatgtcgtgtactcaatacaacagctaaggaatgacacatcggttatggtagctggtggaatagacggtgtgctgcgtatgattgatcagaagagtggaagggttttatctagagttataatggacgataaattctccacaacatcaacaaggaacaaccaagtggtgatagagaaaagaagaggaaaaagagtttctcaagacatggagattgataaaatcgaaaggaaagttcggcctcaaatcagttgcatagcaatggggatgaagaagatggtaacggctcacaatggtaaatgcataagtgtatggaagttcaatctctcgtaaagtaacaataaacttgtttgtaagtgacgaaattggtaacaatagcattataaatgattgatttaaagacaaaaccgattggattgtgtaagagctacaaaagttgaaacactggaaacaaaaaaagaagggtttgttgtctatttggcggatttcttggatggctcaggttgagattcagctttgatgatattgagttgaccaccttctttacaagctgcattagttgctttcacttcattgcaatggtttatgaatttcgtaagctcctgctccacacaacaccaaccaataactcacaattaaagatccaatcgattcagaatttagggagattgaagaatatagaaattacccgatcagtgtccatctctttcgtcatctttgttggtttcacatttctcttccctggaacaagaagatgataaaatctgagaaatcaaaatcgaaagggatttgtgtgaagtaaaaaaaaagtgaatacctttgcgagtttgaatggatttgccatggcgattaggagcaatagtcttcctcttctgttggcccttgaactgattgctcttctgcgtcatctttggatcgtcgtttctagctagggttttctcttctgtcgaagggtttttgttgtaatagaagaagaagaagaacaacaatcaaaagcctatataatgggctcttaaggcctttatttatatgggctgattaattattgggcccaatttggagttttctaaattcaactctgctaaatttttgggaggcagaagattttgttccgaggaagacacggatacgcagaaagcggtaaaatcctccttcttcgtcgtccttgtaaaaaccctttctcatttttggaaggttctttcaaaatcctttcttcgattgctttcggattctcgctcgcttcttcgatttttggttttgattc

SEQ ID NO: 10024 - DNA, 3000 bp, Unknown
  misc_feature (1)..( 3000): cDNA_ID_2704578_gDNA_ID_2213619_Annot_ID_131945 3000 nt of promoter + ATG
gattgaaatgaatgagttagaaaaaattctgatgtgacaataaaaaggaaaaaggggaataatgacgtcagcaaaatggggacacgtgaaattatttttaaaattatttgggacaatcgacacagttgctctatcgctatttgtttacgtggggctgttctctctctatttatataataatgagatacggttttttcagcaaccagattttaaagttatctgattaaatctaataataggatagagatagagtcacagagacatgttgttgactttatgacattattttattctttgcttatccactcagtcatcatttatctcaccagtcagacataatgtgttgttgttgtgaatttgtagatgcttccgactatacctgattacctggccattcagaatcggtttggatcaaaaaatttgggttttcggtttagaaatcgaaacaaaccgaattagttgaaacgaaccgaatagaaattcggccaatttggttttgcattggcgtgtaccttgtgactacatgtgtgtgtgttagatgagatctatccacccatttttcaaatcatttttgtcgttaagctatcaagattctgatattttcctgctcacttttgattcccaaaacaaaaaactttcttcaattattctattcatcttctcatggcggctctctccaccaccttctactaccacccactctgcactaaccaccgtacaaagagacaagcctcaagcagacacggagttagatctatgagagtgatgtcttgtcggaagcagaaattaccagaagagaatgaaggagtgatccagagaacattgagaaggatgatttcagaggctgggaagattgggaagaatctgaagccagagaagaagaaaggagacgtcaaggacctgatgcttatgagtctctcttttgctgtttatgtttatatctctcaactattggtttgtgcttacttctcctggcaacatctcagcttccccaaatcttcatggtagtagctaagctagctcctccttgtaaattctgcacaaatcagtaataagataagaaattcaattccgacataggagaattgagagttgtgatctttcactttggtcttatataattgaattgttaagcttctcatacctctttatctgctttaactccggcagaaaaggcaaaccaaccattgcgataacactatcaaccagttaaggctctttgttttagagccgaaaggagatgcaagagcctcgggcagagtcgctgagtatgccttgaaaaccaaaactttgaccgtaattgttagaaagaaagagagattcctaaccatttcgtattggcctcctccaatttatcctccttaaacagagagccccatccattttccttctgtgtgctgcaccaaacctttcctccatagtcatatcactgcgagcttttccctgtacaatccaacctctaagtcagctataagcaaagagcttgggataaaagcttggttgtggagtgttcaggtaaggaaacaagaatcagcaaatgatcttaaagaaaaaacgttcctcctttgtttcatcaaatccaacaacttcagcgtcatctaacaattccgctatagatggaacattgggaaaaagaagagtttccatctctcctatatgctaaattcccagcaaacatgcaagagcgcacgttcaccagacttgatgctggaaacaccaatagctaaaccggccattacttgtatctctgttcatagaggacatttcactccttagtttttaatcttgtttaaagctctgtatactaacataaacatgcatgaatcagctttaaagcaacaaaagaaagaaaggaaaactcaatttctttcctcccaaatattctttttcattaggttcacatgaaacgcaagatttaagacctcagctttactatcaactttaggtaggtaagactacctaccattttgagaaggctcacaatgcaaaaatggaactcaccatccttgactgattcggtttcagctccagcaaaccaaagtgtttctaataaacttggccgtgcattgaaccacggagttccaaaatcaatgtctgtttaaatcattggccccagaatttgaactacacacagagtcacagacattcattacgatggttgaatgaaatggtcttgactaagaagtaagaacaactatgcacaattgagaaactattagctcgatttccagaaactatcactatcgtaatataaaagtcccaggatcgaccaaatcggacgagaaagactcaatgaagaaaccccataaaaacatggtcgaagtcagtataaacaaaatcaagagtttggtcgtcgttgtggatttggaggagaggagagtgagcttacagagtatgagaagcgagaagctcaggggaagtgtgactcgtcgtcgtcgtcttcgaagtcactcacgaccatcgagagatctgatgattttggtaaaatatcaaaaaaggacttcaacttttcacttaagtcaaaacaagcccctataaataaattctgttatttaagccttgaggcttgagctgcgtctttgttgttcactaggagagttatttgagcggataatttactaaaactgaatgtccatctcccaaacaaacattttacgttttcatgttatataaaagaatactatatcgttagctagaatattgtagttaaatattaaagtagtgtattttacattttgtctgaactttgtcatctttgtttcatgaatggtcaatggtgaataatggggagagaaggaacgtgaataaagggatccacaagtgtctccaccattttctgagtaaaaacaatcacatcctttcattttcaaacccctaaaccaaattgtaaagtcagaaaaaaagaaaaaaagaaacacacatacaaatcgaaaagcttttcttcatctcccacgttacaataagccctaagaacgaataaggcaactacagagagaaaag

SEQ ID NO: 10025 - DNA, 3000 bp, Unknown
  misc_feature (1)..( 3000): cDNA_ID_2704574_gDNA_ID_2213619_Annot_ID_131951 3000 nt of promoter + ATG
aagtatgtatttccttgtttcggagctgtttaacgtttctggattctctcttttatacacatactatgttggtacttgggttttattggcggtgttttttgaccttatgtatcttgtgtccatttttccaaccagatttctttttgacgagaactgtgcggactacaagtactatgtattcaggctggctgaagaggaaaaattaatttcacaaaccaaggattctggtgtacttcacagtggtaagtattagacaccatataattattttcagaatatgcttagccaagcatgtgcaaggaatatttggctcatttctttttactctccgaaaaatttctatcctacaatacgaatttatatgtgttctgtagtgtgagtgataatgtgaggctgctcttcctgctaccatattcttagcttcgatttccttcatttgtctttccaggtgatgcaggctcgcgaacgtccacagcagcaatccctttgcaaaagccagcttatcaacaaacaggatatcagatccctgcctcagctctctatgatactcctgtggaacctggagcttcttctagatctgctcaggcatcaattacaagacccagcgacagtatgttcattagccttatatcgatctaggttccttcctattactgatatctagttttgattgtgggttatatatgtctgatctgcaggtgactcctttagtgggccgaggggtgcagaccctctatcaatgatggagttttacatgaagaaggctgcccaagaagagaaaatgagacgtcctaggcagtcaaaagacgaaatgcctccaccagcttcccttcaaggcccatctggtgagaatgaatcctagtgctatttatggttttaggcagctgtaaggtcttatcgctcaaccatgtttgatttcagaaacttcctccacagaccctggaaagagaggtcatcacatgggtgattatatcccacttgaggagctagataagttcctttcaaagtgcaatgacgcagctgcacaaaaagccacaaaggaggctgctgagaaagcgaagatccaagcagataatgttggacataaactcttgtcaaaaatgggttggaaagaaggtgcttacttgcatcactctatctgtaaattggtgcccttgtttctttctgtatcttgtgcctttatggagacaaagagcttagaaaattggaggagtggattacaggtgaaggtataggaagctccagaaagggtatggcagaccctataatggcaggcgatgtaaagacaaacaacttgggagttggtgcttccgctccaggagaagtcaagcctgaggatgatatatacgagcagtacaagaagcggatgatgctgggttacaaacacagacccaatccactggtattttatccatctttagctccattctttttgtgatagcacttcttttactcaccatctgtctcaattgtactacagggaaatcccaggaaggcgtattactaaggatcaaatcaatgtgttatgcgcaattattatctttggttcacctcagcaccgtctgagctttgcttttctattataaagaatgttcaagcttttagattactgatatattgaagtgttggtatgcattgaatttgcgtttcagtgtgcaaatagatctctttgacagacatatcagttgaaatacaatggatttgttattgctaatgactgagattttgattcgattgtcataactttattaatgttttggaagtctgggacataatacactaagcagcaaggttattaaagagaaaggtaaatgaaaaaagaaaagaaaagaaagatgatatgtccttcctagttgatgatatcgcagggagggaaattagcagagcatctctgagggagctgaagagccatggagcggtcaatgccagagagtggaggtccattggcaaggaggcaaagacaaggacgaccaagtgtgacaacggcagagcaacatatctcggtcggtgggatcgggctaaaaggagcaactgctgctctacatggtatgagctgtaccagcgcggagaaaaatgtcctgctgcatcctcccacttcctcctcgggcaacattggtggtggaggtggttgttgcaggccctcttgctgcgctgcaacaatggtaagaacggttatggtcatgagcagcgtcattgccaacccaactctcatagctttcatcatcatgtaaacagcgatggtaatgagatgacgcaacaacgagatgctgctggtttatataccataccatataatgaaaggggtaacaatgtcatgccgtttcacacctctctcctacctcacaaccaaatagcctcacgattactccgtgtgtgtgtctccactgtccagagctttaatcttcgatcaaactcacaaaaattataacatatcaccggttcctcctagctacaaatattaaacccataataataatattgtggtcagtgattattctcacctactgtgggtatctaaaaacttgcttaaaattctgatgatttgcaataaatttcgcatctttcccgctttaaaaaagcccaaacaaagcccattagaaacccaaaaaggagggattggtttgttattctctgtatctctctcctagtattcagctctaacacatagagaggagtcagaatatcatcagccgcctctttcacttcaaccctccttaaacctcatctctttcctactccgccgctctctccgtcgtctctcccgttactccatttctctcgacccctccaggtaattccttttcagatcctctactagaccctttacttattttagtgaattggtctttctccatttccatctatcccttacgtatctgtgactttttccccccttttggattgtattcctcatcttcctctgtttccgtcaaatgaatgatctttctgaaattcaatcacttttgtatcgtttctgaatctttcctctaataggtgaaa

SEQ ID NO: 10026 - DNA, 3000 bp, Unknown
  misc_feature (1)..( 3000): cDNA_ID_2704570_gDNA_ID_2213619_Annot_ID_131952 3000 nt of promoter + ATG
cagtttgagttgcccgagctatcaagaactaccgctaaaaaagtatctgttcttcgtaatctttgccaaaaggtaaataattatagacacattttcattcagaatttatttaccagggaatcctgattatgtcagttcataattgttattaatcacttcatttccctgttaacaggttggtgtcagtattgctgctcgcaaatacgacttcagtgcaaacacgccttttgagacgtcagatattttggatcttcggcccgtaattaagcactccgtccctgtatgctctgaggctaaagatcttgttgagatggggaaggtccaactggctgaggtaccttttgttatttcacactagctaacttttgcttgctaatttttgccaatatgtttgtactggataagatcaggagaaccttattgtgatatggattggcattcaactcttcaataagcatctcgttttagtttgcgaaagttgcattatgaatggttcttggtttagttttttatgtatgaaaatgattaaacttttgtagggcatgcttagtgaatcctacacgttcttttcagaggcattttcgatacttcaacaggtaagtaatctgtatacgcatctcgtcctgtcaaaataatttaacaccgaagtagctcatcatattctgattttaggtgactggtccaatgcacagggaagttgcaaactgctgcaggtatgcgtccgactgattttttgtttttctggaaaaatatccatgggctttcgttttagttgccttaagttttttgtcgtcttttgcttttcaggtacctggctatggttttgtaccatgcaggagatatggctggggccataatgcagcaacacaaggaactcattattaatgagcgatgccttggtttggaccatcctgatactgcccataggtatcaactatctttcttttatattaatgtactgtgatattgtactctcagctattgacttgcttcaaatgttttgatactgcagctatggcaatatggctcttttctaccatggactgaatcagacagaacttgctctacaaaacatgggtcgagccttgcttctacttggcctttcatctggccctgaccatccagatgttgcagctacatttataaatgttgccatgatgtatcaagacatgggcaaaatggacacagctctacgttatcttcaagaggctttgaagaaaaatgagagacttcttggtcctgaacacattcagactgcagtatgctaccacgctcttgccattgcgttcaactgtatgggtgcattcaagctctcacaccaggtactaaaactttcgtaaagtcttctagatcccacctttcgactctgttcttgtcaacatgagaactatatgtctcacctttcgacttaattgttctgttcttgtcagcatgagaagaaaacatacgacatacttgttaaacaattgggagacgatgattctaggacacgagactctctaaattggatgaagacgtttaagatgcgtgagcttcaggtttggtgcactgataatgactgaggagaacctcatttatctagtatacattttgtttggatttctcaaattttctggttgggttttgaatcagatgactgcacaaaagcagaaaggacaggcagctaatgcagccaacacgcaaaaggctatcgatctcctaaaggtatacttgcagctttagatttcggcatattttgctgaaaaggaataactcctctatctttgatgttgtagagttgaaataataatgaaatcgttttcctgattggtatacaataggcacatccagacctgatacatgcgttccaaaacgcagctgctactgggaggacaaatgcactgaactctgctgtccttggggagactcaaccacggggcagaggttttgatgaaagagcagctcgtgctgcagctgaagttaggaagaaagcagctgcaaaggggctactggttcgcccccagggtggtgttccagttcaagccatgccaccgctctctcagctccaaaacatgatcaataccgccacagtttcgtctgagaaaggtggagaaaacggggaggcaaaggtacaagagaagaaagaatcctctgaaaatgggaaaacagaaaacctggctcctgcaggattaggtgctggtttaacatctttggataagaagaagcaaaaagccaaaaaataagaaacagtaggatcttgaaggaaaatggtgctcaaagaaagtgcacgattctaagtagtgaagttggtttttgtctctggaagtcgataaaccacttgctgatttcattacatgacaacaacgcttttgtacgttaagctttgtttttcttcccattatgtcacaacgatttgggtaagtcccgcttccaggcatgtctggcttttttcttttttcttttcccctcacttttctgcgggtgtaattttataccacaaaaacgtcattgattttctagtaactccaataagctcacagttcacgcttatacctaaccttgcagccttactatttttttgtgctctatacaaaaatcttttacttggcttcttgtgtctctagagtctagactttagagggacactagattgaactcgactaacaacgaagaatcatggagtggatacatcaatttcgatcaaccattaatgatcatcacatacttcatttatgttcatcttccatcaatgatgaagatgaacagtggcctgtagtgatgttgtcactggccaaaacagtggtcaggcgtaacccgaacaagtacctaagtgtatatcaacccatttaagtttaagtctgcggcgtgagagacgggtaaatgggtaatgtttctaggcccaaattataggccttaataaggcccaattatccacacaggttagaagtgaggacggctaatggataatgttgacgacactcgcaacttcttccttatcgacacctacactctcctgctaca

SEQ ID NO: 10027 - DNA, 3000 bp, Unknown; identical to SEQ ID NO: 9730
  misc_feature (1)..( 3000): cDNA_ID_1379940_gDNA_ID_2213619_Annot_ID_131953 3000 nt of promoter + ATG

SEQ ID NO: 10028 - DNA, 3000 bp, Unknown; identical to SEQ ID NO: 9740
  misc_feature (1)..( 3000): cDNA_ID_2704562_gDNA_ID_2213619_Annot_ID_131955 3000 nt of promoter + ATG

SEQ ID NO: 10029 - DNA, 3000 bp, Unknown
  misc_feature (1)..( 3000): cDNA_ID_2714503_gDNA_ID_2213619_Annot_ID_131957 3000 nt of promoter + ATG
acgtaatctgaatattaagaaaaaggataaatatgaaaagatatgatgtaaatatgtaatcgatgcatactcttaattatgcaatgtaattctttttttgtgacattaatacattatatatcctttatcttataaaacacaagtcacttggcaaatcatgttttgacatgtggcaaatttatcaaaaacaaaatccacaatgtaaaacaaaaatgaatttttcgacaaaactcaaaataaaattaaatgtgaaaacagtgtacaaaattaaaacattatcgtcaattttcccacgatcactctcaaaagaaaataaaaatcaacccacatattctccatactcccacaatttctttttcttctattcaaactatgtaactcttttttttcaattaaaacattcaaactaactattgggaaacaaagacagatacgatctcaaacctatatatacaaatctcggtatcatctttctattgttgatattggtttttaaaagaaggttgagagtaaaatcatttaggagcgagaccttctttgtaacaagagtcttcaatctctaatcagttcatataaggcaatatggccagcgtatgttatatttcttttattttattgattgcgtttagatgagtatattaatgctttctgtttttgaattatcttttattatgtatgtttaatatctttttgcttcatagatcaaccactaaaaataaacaagcaaacttgatcgatagaggataaaacacaaacaaagtagaagacttgagcaagaaaaacaccaatggcaaagtagtaggaggttgaagacgaagtagaagtgtacaacattaagacataaatgatatcatctatgtattgagtcaacttcactctggtaacttttttttgtctatgactataatctatgtttgtattgagtctttgaataccatatgtaattttttattttatagcttttgtatgtattctagaaagcattgaagttggaagctaattctctatatttggaagactaataattttgtgatatcaacttcaattctccattatatatcaaattatcatctgaaaaaataaaatccacaaatacatgaaacgatatatttttccctacacgattatatactaatctatttataaaattaatttttcatgtataaatatcgataatatgtaacatatcataacatttaaattcaaaaaaagaatgtatcataacattaattttcggtgctatgcaccgggtataatactagttacaaataaagtataaaaggaattaaacttttatatagataattaacacaaacaaaatattagagacgatttcaaataaattatgaggatatagatgagaaaaatactatatagaataacaatagtaagaaattaaaaataaataaatcaatttgtacatataaattagaaagaaaaatatagataaataattaaacaatattaatagtatcacataggtcaattaaaattttatatacaatagttaaagagtattatatctcaaaactaagttttgatactgcgtagaacaaatcatgtttcaagcaaaaatgatcaaattcctatgatgctggaaatgcttgacgatccacatgagactggctatgtgcatgtatggagaaaaacgtgttgttcgacaacgcgtgcatgccttcttccacctaagtgacgacgcatcacaaaaagttatctagtagtgttaatagttcatgttccatctgccgaaattacacacaatataacgtattcgattatttgttatccaacaacttaaacgattcgaccaactcactcaaccttttgtcactagttccagtcatatatttcttataaatactcgttcactacatctgtacagatcgaaagaatctcttgatatattacaacacacccataattcataaagactagctcatatacctttgatatatgagatttgatctatatgtcgttctccttaactagatatcgctaattgggcttgcattcaacaagcaacatatatcgcttattacattcgacgatactcagcttctacatcttaagtctctctttttttctgagctcaccatcaagtataagaacacaattctacctcttatttgtctactcccaattttttgtttttggtttttcactattctgacatcttatcgtattatgattaacgttaagaatgtcgtctcgaaaatcacctacctagctattgtttcaagattcgactcccatgcgcgtcccatcaagaacaaaccatccagaagcatcaacctccaactattagagaataatgtcccattcgcccctcgctggtcaaatcgcttccatttgattcacataagtccaacaacaacgatgatctctggtgtactactaccaaaactcaaccttgagacagattctcaaaatactatatgttctattaactattttaacttgaatcaagttgataattgtagagagaaattttttgttcacttcttattaatttgtaaaacatttattttaaaacccattaccgttaagctttgatacaatgatacatgttattttctgattaaaaatggttataaacttgaacggtataagactttagtgtatagagaacaatttagagaatctgtatttatgtaaccgcgacctttcggaaacgtagaaggtggtcgcacaaacaaaccaatcaaacccttaatcgatggcactcttttaatgtctaataaacttcggttcgtcactcgaccggacaattaaatatgtgattaaaagtgtgaatttccggttcggtagagattactggtatttgttaatccgggccggaccgggccgtatctgaattatgaacactttcctaatgtcatagaatcgttcgtgccgtcgtcgctgcgatctgaccaaaatcaaaagtgttacgattcggtatcatcgtctctctcatttgtgattttgtcaaaccctgctctcttttctccaagtgctctc

SEQ ID NO: 10030 - DNA, 3000 bp, Unknown; identical to SEQ ID NO: 10026
  misc_feature (1)..( 3000): cDNA_ID_2992057_gDNA_ID_2213619_Annot_ID_180904 3000 nt of promoter + ATG

SEQ ID NO: 10031 - DNA, 3000 bp, Unknown; identical to SEQ ID NO: 10025
  misc_feature (1)..( 3000): cDNA_ID_3033900_gDNA_ID_2213619_Annot_ID_180903 3000 nt of promoter + ATG

SEQ ID NO: 10032 - DNA, 3000 bp, Unknown
  misc_feature (1)..( 3000): cDNA_ID_3410146_gDNA_ID_2213619_Annot_ID_180898 3000 nt of promoter + ATG
ccatcaagctttctctttatgttttgttatttaagctatcatcaaagtaagatctttactctctttctttttcgtttgatgcaaatgcagactaacagggtgaaaagtacgaccggtgcattgatcatatttatcattgtcttcacggtggtctactccccattcgtggtcatggacatcatcaaacgcgctagaaagcgggtgcctgtgcacatcatggcgcttcaatggctcgatccaacaactgaacttcggatcttgattggtctccacggtccccacaacattggttctacgctcaacgttatggagatctgccatggtggccgtgagccgggttccatattctatgcgactgacatggtggagttgactgatgagattgcagccacgctgaagaagggcggaggagccggtcagagtaatgattcagtgacggtaacggataggtcggtgacggaaatgagagagagtataacggcagctgtgaatgggtacggagagctccgcaatggacaaggtgtgacagtgcggcggatgctggcgttgtccacgtttgtgaccatggcccatgacgtctgcggtttggctgatgaacttatggtttccattataattctaccgttccataaacggctgaatcctgatggtactctcgatgctggtcatgctgggttccgtcatgtgaaccgcaaggtaattgttccatctcagtaatactctgtttctttcagttctcagagagataatttggcatttgtgtgtgcagattctgaagaacgcaccatgttcagtaggaattcttgtggataggtcgttcgggcaaacagaagaggcatggagaccaggagcgtccatgggcattgctataatattcataggtggcagagacgaccgagaggcactagccttcgctgcacaagtggctcgacatcctgctgtgaaattaaaggttatacgtttcttggaagacaagagctctcaaaacgcacaaaaacgaagcagcatcctgaacagagcgagtgtggtagatcaagaggaggaaatgaagcttgatgatgaatgttttgctgagttctacgaaagatacatagctggaggtggaagagtgtcttacatggagaagcatctcaccaactcctctgagactttcacagctcttaaatcactagatggagagtatgggctggtgattgtaggaagaggagggggaagagcgagcagtgggttaaccaccggcctcaacgactggcagcaatgtccagagcttggtcccataggtgacgttctttcaggatcagatttctcacacaacacatcaatgttaattattcagcagcagcgtactcggggtcagctagaagggcttcatgatgacttcactatactgtgaatatctgtacaaatgcactttacttagtagcttgggaagagtagtagcttcaccatcacaactcttaaagagactttgtacaatagttcaaacattaagcggtttatgtagatagaatggtaaaaagaagaggtaatctaagcattacttcatagcatcctgaaatggtgttgaaacatagagttaaaagaagttacaggccgatttgtttttgatttatacaaagcataactagggaaaatttcccaagctcattattagtcttgattggtgcttagcaaaagacaatgtaaaacgttttccccgatgtgctgatggagaactccaagttccttaaaactgattcgaaaacttggccacctctgcctgaaaacacagaagggtataccataagaccaggtacatcaaacaacatcaatagcatttgatattcgtctagcttattaaccacataatcagataagtatatccgaagagagaaacttatgtacctcaaactggttcttcaagtagtcgagctccttgtccaagtcattgatggcctggttgtatgcttgcattggggaagactggcttgttgtgtgaatctacatacagaaaccactttcacaattaaacaacaacatacaagatctttctataagtccttaagcaaccagtaatcccagaggaaactgttaacactagaagcttaaaccaagaaatattcacggtttccaaacaaccatacactacttttaagttcctaaaccaatcttttggatcctaaggtcaatcaatgaactgaaaaaaacgcagaggatagcattgttctttccaattcaaagcaacaggctctacagtagaagcaactgaaaaacttggaacttaccctcactatgattttgtacttaagaggatgaggaagttggtatccagcaaacaagacattctcgtcgcgatgaagttgcctaaaacaaaaatttcagaacagagctgacaaaaattagggctttcttctttctgagaaaagagttgcaaaatcaacaaaaagacgtacatgcggacaatgtttccaatcgtatggtcttctctctcaaccgtgaaggaagcagcattgatgatcttcgtatccctatcataagaaaccctagaacatagaaatcgagagggtttagcacatgtaagaggactatcgagtatgatttcgagtgatagaaacttcaattacttcttggtgccttcagggacgacgaatcgctcatatcgttcgggagcattcatggcttaatcggagatttcaagcttcgctctctttttcgccgcagagagacagtcaagagttcttcagtttctttctggcaaacaaaatataatacgacgtcgtttttcataaaagaaaaaagatcgaatctccacgtgttatattattattggtgtatacagtttgggtcggatcgggccgataaaacataatatttccgtttaaggacctctaggtttatattatttacacaataaaggacgagtgatttaattcagaaacctaacaaaaaattcaggaaaaaaagaaaagaagtcagatccctaaaaatcgaacccgaaagcgtaaaacttgaaaaccgact

SEQ ID NO: 10033 - DNA, 3000 bp, Unknown; identical to SEQ ID NO: 10023
  misc_feature (1)..( 3000): cDNA_ID_3033924_gDNA_ID_2213619_Annot_ID_180892 3000 nt of promoter + ATG

SEQ ID NO: 10034 - DNA, 3000 bp, Unknown; identical to SEQ ID NO: 10021
  misc_feature (1)..( 3000): cDNA_ID_3033930_gDNA_ID_2213619_Annot_ID_180890 3000 nt of promoter + ATG

SEQ ID NO: 10035 - DNA, 3000 bp, Unknown; identical to SEQ ID NO: 10018
  misc_feature (1)..( 3000): cDNA_ID_2704585_gDNA_ID_2213619_Annot_ID_180886 3000 nt of promoter + ATG

SEQ ID NO: 10036 - DNA, 3000 bp, Unknown; identical to SEQ ID NO: 10017
  misc_feature (1)..( 3000): cDNA_ID_3033943_gDNA_ID_2213619_Annot_ID_180883 3000 nt of promoter + ATG

SEQ ID NO: 10037 - DNA, 3000 bp, Unknown
  misc_feature (1)..( 3000): cDNA_ID_3033947_gDNA_ID_2213619_Annot_ID_180882 3000 nt of promoter + ATG
agaagcttggaagatggagacctgaaaggattgatctttctgctatggcttgtccagcttcaagacagatctatctgacattccctgccgacagtaggttcagggaggaagatgtgtccaattacttcaggtaatttccaacaaaacacattgaacttttatttggtctgaatgtatgttcttgtatgtgacataagatgttgttatggtggttatagtacttttggaccagttcaagatgtgaggataccatatcagcaaaagagaatgtttggttttgtgacatttgtgtaccctgagactgttaagagcattctcgccaaagggaatcctcactttgtgtgtgattccagagttcttgtcaagccttacaaggagaaaggcaaagtccctgacaaatacaggtacttatattgctagtattagtaactcttatactttggcctgattgttccttgaatcccttgtgtttactgcggtttgttgtgcagaactaaccaaacaacagagcgagaactgtccccaacaggccttgattctagccctagggacgttctaggtaaacaaacactaaagcacttgtctcttttggttttactgaagaaccctttacttgcagccatactgatttgcttgttgtgcaggagggagagggttttataacaacactcaagatgtgttgtggaggagtaagtttgaagaagagattcttgaacttcagagcagaaggctgatgaatctgcagcttcttgacgtcaagaagcatttccaactcaattcccctaccaacattcactctccgaatcctttcagccaatcacttatatctccacgcccattgtccgtgatcaagagagagtatgatggaggagagaaagggaaaggaagttctaaagaaggatctgatgatgatacaatgaatctaccagagaggtaggtttatatacaagagttctctgcaaggaaactgttttgtgtattttaagctgaagctttttggggtgttttaggttggaggatagcttgccagatagtccgtttgcatcgcccgctcatcatttgcttctgtttgctgattctgctgacaataacggatcggatctgtggtcgccttcttctgataatgatgataattctactccttctacactctccgactccttcaactctttcaactaccaaatgccaaggtccctagattcaaccacactttatgttttactccttctacacactttaatttctggtatcaagttgatggtatctaacattgcgttcatgaatcttctcaataggttaccggcgattggaatgttacccggtaggggtggaccaacctgtcgtgttgggatataaacaggtaaaaagagttaatggatggtgaaacacaaaataacaatcttgttaggttaatagtttgtttgttgtggttgttgtttttgttacaggaagtgaagtaagaaaagaaaaaaactgataaaatagagagacccttaataaccaaaaagatgcagaggtgtaaaaaataaaaagcaggaaatttgatgtaagagataggagaagagaaagaaggaagattgttgtaccatttctctagttttaatgtgttatgtgatgatggaccacacaagatgatgtaatatgatatgatatgatatatataatataggacaagaagtgtaatctctctaaagatatacaaaagaaaagagagattatcatttgagtttgaaaagtcaatatgttcttgtccgtgctagttattaccctctcactctaactactctccaacttgggaatccagagatatcagcttttggtgattttttcttcaactataatttttgatttctaggttatgcatctttgtccttaataaatgcaactttggtgaggtggaaagtgtaaaaagagtaggtgatatatccatggttattaccgtgatttaaggcaaagaaaagaagaatgttatgaacgtatggtcgtattattgcatgtaaagactaaagttgtgatcgatatccaaattgtgtgtccttaatgacttagcaaaagcaaggacagtggtgtgtgtggtggtgagacacgcgcgagagagtgagtgccaaaaacttaacacacaacattacaaaaatagtttgtaacttgtggtctacttacaactatgtctcttctattatgtgaaagttggaaagaaggtgttttaattcatcatatcaccaccctatgatcaaacgaatgtgaaggccaagctcttttgaggctaatgatacaaatatatgatatgatatgtgtgtacacaacgattttcaagcttcttataaattgatcctttttggggactagggtgatagttttagtattggctattcgttgtaaagctagaagcttaagtatgcatgtcgcttccgagattccgcttaatgcttatttttctggtcacaaaacaactaaaattattgtacagtataaaacaagaagaataaaaacaacttcgaaataggaaaacaggaggaagaaaataatgggatcccacgagccaacacacaggccatgtggtgtggggatatatatttcagaagttgtgttttgtggagacatgtccacatatatacttccaatatcggttttacaaatatttatacatatgtataaattagatgatacgtgagacgtcaactagttttatggctaactaattaatcctaccatctactcaaaacaattttctaaaacatttgccagtttcattacatcttttgcattaaattctctaaaagtgagcaaaaatgtttttaccgttccttagagacaaaggcactctcataattcacatccgtacaaataggtagtggcaattaatattgaggacagtgatgaaataaatcgatggtagggatctttgaccattggtattggtttcaaagaaagaggcacaacacacacttggacttggtcgattcattaaaaatcgaaccccaacacaactgcaattaaatg

SEQ ID NO: 10038 - DNA, 3000 bp, Unknown; identical to SEQ ID NO: 9734
  misc_feature (1)..( 3000): cDNA_ID_2026998_gDNA_ID_2213619_Annot_ID_180910 3000 nt of promoter + ATG

SEQ ID NO: 10039 - DNA, 3000 bp, Unknown
  misc_feature (1)..( 3000): cDNA_ID_3033892_gDNA_ID_2213619_Annot_ID_180909 3000 nt of promoter + ATG
agaagcaaccatcaaaggagaccccgtctaaatcctcctccacatcgaagccttctgtgacacagtcagataataattatgaagattttccaaatagtcaaattcgcaaggtaaattaacatatttattactctctatgtagaatgatgaaatatgtcctgctgcattctgttttactttccccacttggcagattatagcaaaacgtttattggaatcaaaacagaagataccccatttgtatttacaatcaggttggtgactcacaacctttgtattttctttgtgtattttatttgctgtttaagcattttattttgcctgcagatgttgtattggatcctcttcttgcatttagaaaagaacttcaaggtttgtagactgctcttatcacacatcctggtatttattaacaacttgagaggctcagagtgaactgtactttcatgatctacagaaaaccatggcgttaaagtgtctgtcaatgacatagttattaaagcagtggcagtcgcactgaggaatgtacgacaagctaatggtgagaaattattttctcctcgtaaatgatttcattaaaaataactaaactatggtttgttcccatccctaactatgcgctagattaaaaccttagttcatcctctttaaggaaactcggcttccatgttggattattcttgcaatgccgtttacctccgttgagagtatttagtaaagatgttttgagattgtaatactgtaacattcaatatgactggtaatgcattttagactcggttttagtcgttacaagtaggacattttttggtgtgagtttgatgtaatgatttgtggattggaatcgtgtggttgttttttctcttctgctttctcaaacctttcttatggttgcttaaagttctctttctcaatgtctggcagctttctgggatgctgagaaaggagatatcgttatgtgtgacagtgttgacatatcaattgcagttgcaactgagaaggtacacttgtgtgtttgattttctgatcatttcaacagtttatccctcatcatcttggcattttttgcagggcttaatgactccaattatcaagaatgcagaccagaaatctatttctgctatttccttagaggtaattttattctctctgaagttaaacgaatatggaaggctatagaggcacatatgtttgatcagttcttaccatattccatgtgttgttgatcgctatagttatgaattttaatatgtcaaatgatttttggatcaggttaaggagctggcacaaaaggctcgatctggaaagcttgctcctcatgagtttcaaggagggacattcaggtattcatcatttttaagttattaagcatagtacggaattatcaatcatgtgtaacttttcctacttaacgagaaaaccatactttatcgttttgcagcatatcaaatctaggaatgtatcctgtggataatttctgcgcaatcattaacccccctcaggtaatcatagccttaacgatgcaccctgaatcacagattgaagattaagttttgctgtttgtaatttgtggtgtagaggatttagtttaatatttatagagatgcagatgtgtttttttggataataaacttcaggactatcaattgtcttgcaggctgggattctagcagttggtagaggaaacaaagtggttgagccagttattggactagatggtgagctagtagaatccttttgggttttcaactagggttgctattctgatcatggtatgacaagttttcgtcattgtttcaggaattgagaagccttctgttgtgacaaaaatgaatgtaacgttatccgctgatcatcggatctttgatggacaagttggaggtaatggaacattcataaatcccttcgtttcgagttttatgttatgctgctgccatatttcactgtgtttctcctttgttactcattgctttttctatgaaaccggctttgtttcagcttcgtttatgtctgaattgcgttcaaactttgaggatgttcgaagacttcttctgtgagaaagatccaactgtttaccaaatgaatcttggattactacataataaacctcggaccaacccacgtgcacatccagaaccagaactgctggtctacattgttaactctgatcacatgtttcatttttttccatttggttcatatacttaccaaaatttgttttggtctttaacaattcgtcttatagattggtaacttcctgaggtattttttgtctggtctgtcctctgcaaaataaataatttcagctgtcaatccgcaactggtgaaataatttaaaaagtattttaccctcatcaaaatttttaaaatgagattattgccatctctgttctaccagatcttattgttgagctccaagaaacgatttatagacttatagtggttagtgttgaattcatccgttaagtctttaaccaagagattacaaaatttctatccaaaatttagggtttaagtaccattacaaaagaaggaaatatcagagatttgaaggtgatgtaggttaatcatctgaagtagtctaatgtcttgcaaattgtgttgtaatttgttctatatataaagtttttgcattttcggagaaataaagaaaaaaatgatcacaatacatccgaattgatagcatcgcattcgcataataaaaacttgtagaatgaaaaaatgaaaaatcacataatgaaacaagaaactatacgcttacttattagcataatatgcttttatttatatttttagacgtaagatctacattttcatgaatcttatgcatattttctcgattggttcttgcataatcgtattaaaaacccgttattcaaccattatccgtgttacgaataaagtatgaaatataaatgaaatatggaggcaacagaagaagaaaagtttaaatgtgtgtcaaaattgtaattttcagaacttcagccggagaagaaagac

SEQ ID NO: 10040 - DNA, 3000 bp, Unknown; identical to SEQ ID NO: 9740
  misc_feature (1)..( 3000): cDNA_ID_3033896_gDNA_ID_2213619_Annot_ID_180906 3000 nt of promoter + ATG

SEQ ID NO: 10041 - DNA, 3000 bp, Unknown; identical to SEQ ID NO: 9730
  misc_feature (1)..( 3000): cDNA_ID_1379940_gDNA_ID_2213619_Annot_ID_180905 3000 nt of promoter + ATG

SEQ ID NO: 10042 - DNA, 3000 bp, Unknown; identical to SEQ ID NO: 10015
  misc_feature (1)..( 3000): cDNA_ID_2704602_gDNA_ID_2213619_Annot_ID_180880 3000 nt of promoter + ATG

SEQ ID NO: 10043 - DNA, 3000 bp, Unknown; identical to SEQ ID NO: 10039
  misc_feature (1)..( 3000): cDNA_ID_2704559_gDNA_ID_2213619_Annot_ID_131958 3000 nt of promoter + ATG

SEQ ID NO: 10044 - DNA, 3000 bp, Unknown
  misc_feature (1)..( 3000): cDNA_ID_2026998_gDNA_ID_2213619_Annot_ID_131959 3000 nt of promoter + ATG
aagtacatataatacccctgtgacacctactcgaagcttgtatcctgattcagttctaagcagtagagaattgtattcgactccttattacacacgcccgtttgggctgtctcctactagtggttcagatgatggcttatttaggcgagaatgattctgttgatccttgtgaagccgtgatatgattgttggatctttgtagagtgtggtggttgttatatacactgtagactaatatcagctttgtgtaacgtcaaaatactgtatagaagaggcaaaagttatgtatgtgattcataacttggtcattataggaccgtttgttgaaatcccatttgttgataatgtttgtgtgttcatttgttcggtttatgatatttaacatgacaaatctcttgaaacttaactagcaatgatctaactacaagtcacgaactaaagagacactgcacagcaacaacaagagatttgtccagtaagaaaaaaaaaacttcttgccagcatgagaagagatttcgagtccccttagataaggagatgagactcaagattcaagtacatacaatggaaaataagaaatcttcattttgaagtttatggtgtttttgctatacagaaccaaagtgggtaacattttcatcgtgttcaagtaatatgactagtcttcatgcccatcagatgattgatcatcctcatcatcatctttctgatcatcatcacccgtcgcctcctttttgtcacttctctcgttcctttcattccatcttgcccaggcccacttcaggacaagaaaccctccaagtgcatatacctgaaatagttatagagaatactccactaaattaaccatgaaagaatccaactttttccaggatttgaaacaatcatcagaacaaaactctttcgtatacgtcaggagtccattgatgagaaaataaagcacaccacaaccaaaacatctcgattctcgagtcatgctattcatatatcaagtcagcctttgatagctctgactactacaaaacttgcaattgaaaggagcaaaaatagtatgcttcctactccatgaacgacagaacatcaagctaattgttagaggtcatctaaagcattaccaggaatcgaaggcataacaaaaactgaaaccattttcaacattcattgtagcacactgcaactgactgcaaccaatgaaatacattgaaaacatcgaaaactatttgcctattgatagagaaaaaaagccagaatagtttctagtaaacaggaagtgataatctgagtcatagagtcataattatgaacatctaccataaacaaccatgtccctacaattctcataaataacataacaaagcacctctcaccaaaccccaaattataagccaattcaaatcatttttcatcaaagaaccctctaaaatataaacatcttaacaaaatcacctgccaaaggatgacagagttggaagtcctgccagagctgggctcagcctcaaacttgattggctctgcgcttttgggtggattgtaagggaaagtgacagtctcgtaggtcgatttcagaggttccttctcgccggtaggtttaggagcattggcatcaatagtagcaggaggaggcttaggttgaagaaaggcgaataggttggtgatgaaaggaggtaactttatgggaggagatgatgaatcagagccattagaacgatctacttgagcttcttcagccatttttcctccaccgagacggattttgagtttagggttttgaattgaatcggtgtggattaggtaggctttacaattgtctggtggtcacttctctccacttctctccttctttgcttacgacacgtgtcacacgtgtcttttcaagtttttgtttctattaacctctaatgggcctaaagccttatttggcccataataataatcaccgtcttcagtttgttttttgtatttttgtttttatttaaactccattggaaccaaaaatctgagaaattcgtatccaatcaaagttctggcttttagcctcctgaggaaaaatcaaggttgcaactttcagggtttcgatgtatcatccaacgaggggaggtgttcgcggtggtcgagatcgtaagtttcattataattcgttttggattttgcttctaattacaagatcctacataaaattctcaactgttagggttcctatgtattatccaacgttttcgttcttctctgctattttgatgattttttttgttggatctagtgtttgattgaattgtctataagcaatttgtgggagaagctgaaattcagaagaagctttgtcattctaattaacagatcgtttttggcaattagttttcaaatcaaagatgtagaacatgagctgctaatgatgagaactctattactaattgaatttgtttataaatgtgcagaattcagttgggatgaagtcaaggctgataaatatagggagaactatttgggtcacagtatcaaagcccctgttggaagatggcaaaaaggtactttttcttatgtacactctcggtggttgttaatttgtaagctaactagttttcatcttgacgatataatcctcctttgtgcttcattgctctgttcaatctcattggagtatgggcagtcaatggttgttttactttagttactcctttcataaatccactgccttagatttttgtagattaatcttcagtttagtgagttttgactgacattcatttgccatgtacaccaactgaataggtaaagatcttcattggtatgctagagataaaaagcaaaagggttccgagatggatgctatgaaagaagagattcaaagagttaaggaacaagaggagcaggccatgagggaggctcttggcttggcaccaaagtcctctacaaggccacaaggaaatcgccttgataagcaagagtttactgaacttgtgaagaggggttcgacagcagaggacttaggtgcagggaatg

SEQ ID NO: 10045 - DNA, 3000 bp, Unknown
  misc_feature (1)..( 3000): cDNA_ID_2714555_gDNA_ID_2213621_Annot_ID_131970 3000 nt of promoter + ATG
ctccaatatataatttattcatgaaatttttattggaatatatttcaaatgattagatctacaagaaacttggaaattttctcagcctgaaataccactatatattttaatgaattttaagaagttttaattgaataaactaagatttccatatattatatcaataaaattttgttaaaatttattttcagtgcattatttacatatattatagcaacactatatataagaatcaatgatttaataattaatggattgtgcttagatttaaattttattaaaattcatgattgcataacaataacacacaacacttccctcttctatacactcgactagttccaaagatatcctataatatcgtcttcaatccctaaactcttaaagatgtatcaatctcatcatcaacaataaagataacattcacagctaatctaaactctaataatctaaacatgtaacaactaattgtataaatgtgtttttaatgagaagattcatcttaattccttagtaggacaaggccatgctcatcaactcgttagatgatcagcaaaatttgtggaatggatctgaaaagtgaatcaccggctacaaactaaggtatatatgattgccaagagtgtagttaacgattttcaacgagtatctcaaaagggtaaccggcatgaattcatgatctaatgatcatgatcgctcttctatcatggtgtagaagagaaagctccatttggtttcagtttattctagttctttatatatgttggcgtgactaaacccttgctcctgtggcttttgtgtttcctttgaactatcttccttttcttaataaatctaggcccggtggacctagaaaaacaaatgttcacatgagttgtgcacgtgaggtaacttaacatgccaaatgttgtgctactattggcagaccataatggctcgagagggacgaagccaatgatgcgttttggaggaataaagaaaaaggaaagacagagtccaacggcatctacttgtactgagagtgggcttttaaagcttttttatgtgcatttttatttgtgggactcattatcgtcatctcttctttttgcccatccgattgtcccaaacggcatataattgctgctgatgatgtaatcttggccgttggattctctcgaacttgttagaaacgtgacacaaaattttaaaatccacattgttcgtcatgttgtcattttgttattgtaatcatgtaacagtactataaaatgaatagaaaaaggaacaattctggaacaagcatgtgtcatgatgttgccaaacccactcacaccacgcaaattgtttcgtccgattgtccaacaatttttctaatatattaataatgtactattttaattgattcttaacttatagtgataatcgtaagctaagtggaaagtgagatgtgattaatccataaaacaattcgtttgttttcgtttatgaacaggtgaccaatattcacctaccttttatacactgatcggttgattataaatataacaaatccacataatagtgctctaagctatctaattaatctattgaggataggttcgatgtgctgtttaaatattatggaagcaaaaaaaaaaaaacttttaacatggatcatggatatagcctatgaaagtgaaatacgtcatacacagttcaaaaatattatcttttttaattagaggaaattcgttcaaaattttcattgtaatttttatcgaccattgttgatgttttgaatgacaagaatacattatgcctaacaagtttaatttatgaatgaatgcaaatttatcaaaataattaatatattttaaagtaatatataagattaaagaaaaactaaaactaaagtacattgagttcttttctagtttaccgcatatattaaattaaatatttaggatattagggatattatttcacatcaaaagttgagtataattttaagtgatatatataaaatataagtttctccacctataaccagtgtcgtgcctaaggttatcggagattaaggcgaagttgaaatcggaaaccaaattttttttttgtaatataaattttaaataaaataaaagtaaaaaaatttcaaacgatataaagtattaaaaataaaagaaataagaaacaaataaaacactaagacacgatcttcctttgatctcaataaattctttcacgaatttaagaatttaaaacctaaatcaaaaattttatttataaatttacaacctttactcaattccgattttgatttcttttttggtttgagatacgtttccttacgggtttagaaatctcgatttttttttttctttatttattctcaatttccttattctaagcctaattgtgtataaataaaaaaaaaaggtatatgccggattcaaatttgggttgttttccattaaagagttttctaaaaccattctaatacactacatttatgataattaggggccctaaaattttttaatattttcgttatctgaaataaatatcttttttttgctaaataactaattagttttaagttggaatctcataatctaatatattggaatgttaccactctgacaacattaattagttctaatatatatatacatgctaaacttttctattgaaataaacaacgtgagatcaaagagtggaaaacaaaactaagacgagataaatagagttttttaaaaatttgtccgtaaggatatttgggccaaacatacacctgaaagagtagattaacaggctttatttcggtccatagtatcacttgaaacgtttacttatgcaagcaccgaagcacccaaattttgaccataccaaaagagaacacacatgcaagtctctcgatcaattcacgtgtctctcaaccgctatgacgtggcctctatcctctgttcttataccttgctcttgaaggcaaagatgaaataattcaagaacaaaccaaaaatccccaaattggagatcaag

SEQ ID NO: 10046 - DNA, 3000 bp, Unknown
  misc_feature (1)..( 3000): cDNA_ID_1441333_gDNA_ID_2213621_Annot_ID_131971 3000 nt of promoter + ATG
ttttctcatttttattttgtaagattattctttctctatttatttattttctgatatattgttaattgttgtagttttttcttctcactgaaggttgagaatgggaggaacaaagaaagtcttggacattaccattgtcaatttgaaaaattagattaccgcataagtctctgatatacaaccaaaaatatttagtttggtcgttgcatggactgtcgatatttctaaaaagtaaaaaaccaatgataagtcatctctactccatttttactgttaacccaaattttgtcctgacaaatcatgcggtgtatatacatagttctcgggcttccaagattcttggaatctacttgatctctgttgtatcgtctaatctacagcatgcaaggaaaaatattgatttgtgaagaatcaaataatgatgatttcaaacatcaacatcaataaaaaagcaaacatacttctggctttaaattttgaaaactataaattcacattttacatagaaatactccaagatactgttctcaagatccaactaagaacaataagttaaaaaggacttcaagggaattgacttctatatgcttttttttctctgccaatttattaatactttgaaactttgatctaaaactaacatgtggtatcagagcttctatatatatagaagctttaatacccaatgttaggtctagattgaagctacaaagtacaagttcattggcagaattattcattgtggctattaatcaattttaacatttttatatacacatcactcttgccaactagatccacaaaagatcctacaaaaaaggaattcaaatatattttggaaaatcaagtccttacttgataaggacgattcttgctcctttaatttgttaacaagaaaaagaaaaaatatctcatatctcggattaatacctcacaaaccgaccgatttatgtatttctgatttggtttaagttcaggttcaatttatagagaagttggattaaaaaataaccaaggcctatgtattaatgtttttttttgcaagattatgcgctaggttgcatggaaactcgctccgaggtgcgtttctcgtttccgaaacgtttcggaaacggaaactctccggaaatacgaaaaacgtcacggaaacgcgtttcctaaaaatctaggtttagaaacacgatggaaacttacgtttccaaaatagaaactcacgtttccgaaatagacatacgacaaatcttttttattgactttaaaaatttaataactaaaattgaaaatattaaaattattattacatataaataattttggaagactttgagttttaagatctttcttttgttaaaccagatttgaaaagagctttatattatctttgataaaactaatgaaaatgttggtctaaattaactatttgaacttgaaccttttaatttttatcttttagaattttagtttatttatttaatattgatattttggacttgtattgtttaaatcattttttctttaatatagttttatgttaatgttatatatatatatataatgttatatatatgtataaatgtgtatacgtttccaaaacgtttccaatccctaattttaagaaaaaatcgtttcccgtttccgaaacgtttcgtatccgcatttccgtttccgttttcatgcaacatagattatgcgaatgattgcaatttacaagtaacaacttgagagatgtacgttcactatgtcgcgaagaattggtgaggaaatctttcgtaatattttgttatccaatggtatttatctcgattgtaatcgttaaatcatgaatggatggttaaatatttaccaaataaataaaaagaagaagaataattaaaatttatatattggtgagcaaatattattattccgattaaattatactttttaattgttgttttgtaaaattgttcagttctgttttgttttgtagtctctattatcatcagagttgtttagtttgatcgtcgtgtggactcttgacagtcctcatagtctactaaatctaaaaccaatgataaatcaactaattaattaaataatcatgtctataaagtataaactatatttttatgtgttaacccatccaaatctgcaagtccatacaaattgactctaaatatattgaagctgcaaaatcagccaagtacaaaattgactctaagtatattgaagctgcaaaatcagccaaggttacgcaatataatcatatagcgatcgatgcatcagaataataagttagaaagcgatatcaattgcaaaatagtatagagtagtataaaaatatgaaaacactctgaagttgaatgcaccaaaatctaaatgcattgttttgtctgccaaattgacttctatctagaagcttctagtgtgaagctctgataccacttgtaacgtccaaatcaaagcttcgagttacaagtcaattagtagaatgatttattgtttttgtttcttttacttatgaaaagactctaaagcaaagcgaaggaagagatgaggaagaaaaagatttgcccaaacggcaaacactaaattatttagattgatgttctattgttcatatgaacaataacgtctatatatatgtgaatctgattcgatagaataacctaattacttgggctttttttgggcttatattgatttatctgacaagtctgatcccggataaagttcatgatttggttaagttcggttcaatttaaagagaaattatattgggctttaaaacccaggcccatataaaaacgactcacgtggtattattaataaccggagccctagacccgccgtgaaatcgagcgattgagagcacttcgcaaaatcagagcgacaaaaaaaaataaaaaccaatcctttcgattccaaattttttgttactcactcgcacgagttttatttggtcgttagttatctctttcgttgaataacggttttaatttaaaccgttactttttatca

SEQ ID NO: 10047 - DNA, 3000 bp, Unknown
  misc_feature (1)..( 3000): cDNA_ID_2714547_gDNA_ID_2213621_Annot_ID_131973 3000 nt of promoter + ATG
atagtagtagtagtattagatatatgattccaaatttgagattattactagtgtattgttgatttagctgcatattggacaacgaacaagaccattctcattacactccttacacttcaccaccactgcatcattcccccatccttccaccactttacagcttccattacaacccgaacacggcaaaaacgctaatccgccgcaaccaccgcaaccgccgccacaccgatctttcttcctcggaatctctttaagcaattcaccaagcaatccttcttccaccaatctcatcacttcctctgctccaccaatgtacttccccttcacaaaaacccgaggcggcaacaccgccgccgtcgattctaccgccattagattggataactcttctctaaatcctctatccattgacacatctctctcacaaaccactacaccaaaactctcaatcgcagctctcacggcgttacacgcctcaaacgtccgtcgaacaccgcgcaacgacgtcgtataaatcacaacgcgattctctccgccgtcacataacctctcagattcctccgctaatttcggatctaacggtttcaaaacctcgtaatcgttagggtttttcaaattaggatcggagttctctttctttaatccgccggaaaatccattacatttcaccggaatcggagagaatcgacaagtatcgccgtctaaacctgacattagctcccagaagttaataacctccgtcgtcggctcagacttaaccatcatcatcgccgcctccttaccgttgatagtgaatctctcaggcggagtcattggcgtgataacggatttggcggaggaggaggaggaaggagacggaggagaaggtgaagaagagtcgagattgagaagaccgtaagtggtggaagttagcttgacgaaatgttggcttaaggaggagctggtgaggtgagagaagctgctgtcatcggtcggagtaaggaggttggaggagacgcaaccacccatcgccggagatttcgaggattaagcaacgtcggagaaaaaatgaatcacggagattgagtgaaagagagacggtgaagtgagattaaagacaaaataacataaaactgctaattagataaaacttgtttatataaatacaatttttctaaagttgggaagtgacaatgcacgtggctttggtgttctttttaatccatatttttcgttgaataaagaattcttttttcttaacaaaatatttgagatatttgttttgtttgattttacgttaataaaaaagagaaaatacaaggcttaattttagaactaggatttagaatcaggaccactatttggttggagtataaggaacagaaattgattttgataatttcgttagaaggagatagagacatttaacaagtcaacaaagttcatgatggttatggtaaaaataaaaataaattccttgtttaggttaaactaaataaagaaaaaattgcttgttgaggtacatttgaaaatgttgaggtacaattgttgaatggataatgaattttataaaatctaataaggtaatattgaatcaatgatttggtatgattataccatgttcttcttgtattggtcgttgcgattaaatttgatgactaaaaattaaagaacgaaatgagaaataaatggcataatttattataaaattcgttgctggttgttcaaaactgacaatggaagaaaagctggattatgttcatttaggccgctatatttttcacgactcctacgttgttagatcaatatctctattttttccaacgacacttctattttttcagcgacatctccgatctgtctatatggatcattttactttattttttttaacggctactgccgttttacttcgtcatagttaccgacgcagtggtccataaaataaaagaacctatatattttcttaatatccatttttattcaatctggttttatttaatattaaatttttttatataattaaaatcaacatgttattgatttttatatatgtacaaggtatgcaataaagagtttcacatccgatgttattcgatgaaaaaaataaaactatcaattaaacttgtgtgccttaaatttggatattagaatgttagtcgatcgaaaaaataaaattaaagtgattaaaatattattaaaaattgaaaatttaaatgtagaactataacagttatgtttttataatacttttaaaattcaattttcttttgcaattttggtagaaagatattttaaagaaatatcataggtatatatctattaaattcgtaaaattaccactgattaaacaacaacaaaaattacttcagaaccgactctatttctgcttaaccacctccataccaaacaacgaaattgatttttcctggttaagaaattagacccggactcaaactttattcgggtcgggttataaaacttttataaatgccctcacaatcttgtcttggtcgcttcgcaattttcttcttttttttgttattacttttttttttcctccgatttgagagtttgcttacctcggaacttctctccgacatcgtaccgtctcgtccgattgagctggtttacctttccggcgaagcttacttgtaccctcaattagggtttcaagaaagaaccctccaatccaacaatctcgtatcagtgaatggtatcgtatcgtcttcttcaattttatccaatgctttgattgcaactcagcttaactcgaaaattgatcaatggggtttcgatttggttgtgattttaaagccaaattgagactcttttgatgaagtttcagataaagaagttagctttttttgtttccaggtccgtttaggttggcttgtaattgtgtagttttttttgtttcttttgaaggttttgattgagttttaatggttggggatttgggaaggacaattgccttgtcgtctcccgattgtcaccattgtagttaaatctttgaatatg

SEQ ID NO: 10048 - DNA, 3000 bp, Unknown
  misc_feature (1)..( 3000): cDNA_ID_2714535_gDNA_ID_2213621_Annot_ID_131976 3000 nt of promoter + ATG
gcttttgtagagttcgtaatggtaataatcgaacacacctccacacatttctttgagtcatattctgagtagtctttctttatatcttcacaggcggaaagcgcaatagctgctctcaactgcagtggagttgttcttggttctttacctataaggtcagtgaaacaaaaccgatcttcacgacacaaattcgttctctttttcggttttatgacggtttgttattctacagggtgagtccttcaaagacgcctgttcgtccgagatcaccgaggcatccaatgcattgatcttagctttacaggttttcacatatctcatgtctccgcaatatatatatcgctgtgtcgtcttaaaaacagcattacacagacatgtaaagatgtttgtctgcatctctcatctcttgttttcgaaatgtaactctgggatctgatgatgcttctttcttcttcctttacctgagaatcttttgggtaaaaaaaacctcgtagagagtttttatttatctcttaaaaagaaaagagcttaaaacatatcacacatccagaagttacttcgtacagttacaattttacaatcgtgtgttattggtttcgaagaaagtcaaaactgatttcttttctttttttttgtcggaataaaaaattgatttatgacaaaaagagtttggatcaaatttgatgttcttagttttgtccgaaggacaacagaagcggttgtgttgttgtaatatggagatcaaaaaacaggtcaacttagaacagctgtttttgtcagttcttaatatctaaaaagtcaactttggaaatttcgagagataatataattaaaaaaatgttttggtggttttcttaatttgtgacgtcatcaagtacgaaatgcggtctaggtacaacggtggttactcaatgtttgtgcttttcgagactgagtttttactttctagtttgtagtgtgttatttttgttttataggcaatgtatgaagctaccatttacaatctttttgtacatatatgggattttttttttttttacaacaattgaacaaaatatgaatgagagtttatgaggttttaaagtacatcttcattatgaaatttttttcaagtattcatccaaacattattgagatagatacaagacattcgtcgttttaaatattgtacgattccaattcacctactcgattttcggtggttaaacaatccaatttgaattttataaacttcctaatgttttttatgtattattaaacaaaatattaaaatcactatagacttttatttacggaataaaatcactatatattatcttaagaaaaggtttagaagcagtaactattaaaaaagacctattattatcaaacaaattgaaaaataaaggttaagaaaaaaacattttgataaaaaaaacctttaagaataatgtttcttattcgtcttttcttaaagcaattttttcccctttttttttgttggtctcggctgaagcccctaggacattcgtgcgtatgttctaaaatatacacttatcaaaagatgttgaatgtgttaggtgttgaatgcattaaacggttcggttttgtctccaatttattttttagattgttagaatttgtggatattttgaacttattaaactttaaaaatacttaaaacccaagaaatgtctgcgtatttgacggcaagatcaaattactgtgttcaaaaactcacaagtccttgctccctaattcctataaacgatgctcatattaatttcgctacccctacggttagttagaagatccacgcaaaatgtgtttttccacattaacagagaccatttctattcaaattttaatcttttcttttcaaataattatgcttggttttgagactaaaataaatttaattgaatgagctttcaaccgttttcacatgaaagcttgtttaattgttttagaacaccggatatttaagtttcctcgaatatttaacgaatttcggaagaggatatgctttttggaaaaaagtggcaagtctcactatatatcttacactaaaatagaatactaataataagattaaaaagagatgaatacattggagatgttctaaagcattcgagctaaaatttaagtgttttatgcaccgagtttacgtatttgattctaaatccgatattacaatgcaaccacacgagggtttactggtttaaggctttatactattggtgcacacacattacacatcatcaccattttctagtcatttctatcaccagactctgtccattttgtgattggtgtgccattgaaagccatttaatatcaagtaagtagtccccgccaaaacctaccacttattttctccaccatacattaccaaattttgcaattattgtattttattttaatgaaaatctatccagtttcattgacgtttaaaacacacaatatttttagaacaatgtacataaatttgacgtgacgttgtctaaatcacgaagattggcggtattcaatgacggtctttaatgctaggagttcacaaatcttatgtgaagatagtatagtttaaatttttgcatgaaatataaagttagttggagcacaaacaaaatttaagataccatcgatttttcggtcgtttatcagccggtgactggagcgccgaatttgagattcgcattacgatggtttatgtaaagagattggttatatcaatcttatcaaacccacctctctcgggattattgactcgatttggatatttatacatgtgactatatttagacatacatagatctcagtcctgtatatatagagctacattcataaaagaaagatctaacataacaaaaggaaaaaagcatcaagaacatggcggagactcaaggaaaggtcatcacttgtaaaggtaagtaaatgactcaccaatgagatggtttcctatcattatgctgttgatgcatatgatgatgatgatgatgattatgatagtaatgatgcatg

SEQ ID NO: 10049 - DNA, 3000 bp, Unknown
  misc_feature (1)..( 3000): cDNA_ID_2714531_gDNA_ID_2213621_Annot_ID_131977 3000 nt of promoter + ATG
tatttgagcgatccatccggattcaacaaatatgtgtcgggatgaaagtgggagaagtgactctgtttttccatggatatatagatgagatgaaaccatgagacttgttgaaaacgttcaacaatatgttgtcaattaaaagataaaaattaattaataaaaatatcatatatatatatacacatattctttttaagtttttgcttttggttttggtcggaaatacacttttttctttatatttccagtttacgtaattcatccaaaagtagaacatcagagtaaagtgactatatatacacatatgcattacgaatatttgatggattcatttaatttgtattttaaacaaaataacaacaaaatgtaacaatatcatttgagttaaatgcttatgtcgatttccttgatccacaacttctcttaacatgtttttacctttcatatttctccaactcaatcgttttggaaatcctgatggaatattttagaaaacaatcaacagctaaatataattacccggagatttttaaaagcatactcactgattccttattcagtaagttggaaaccacattcctgggcatgatcgataatagtgctaaatcggcaagggttgaagaagatgacaaagaaaaatgcatattaagaatgaaaaaagccggtgagatctgaaggaaacattagtatcaccaaatattataaaataaatttggtttttgacgttttgtgggttggatgcaaatcatgtatttcttgtagtgatatataaatgaaattaacgattaaatgaaaaatcaataaaaattagcaaatcaatttaaccgagtcaaagttagggctttgtttagcattttattacaacaaagaatatttttgacatttttccctatatatatatatatatatatatatatatttgtgtcaaaactacacacagatctataacaacatagttaatgaccagtttgagactcaatctaacctctaaaattcatcaatttgagtaaggttaccagaattttattgtaaagtatttttgctctcgaactgtcatatgaacgcattaccaagtaaaattgtctaaaatatgtcattgttggttgccttaaagtccctggtaatttactaacagcaagttctttagtaaagatatggacgcaaatttaatcaaaaaatacaaagttaatcaagagttagtagatagagttatttacatatattttctgtttgaataaactaatttaaatatgtatatatttacatatattacaaaaaataatgttaaagagtaaatcaccaaacttgctgttagtaaaatagataatagatgggcgtccataatatattagattaggttacactcaatttagaacgtgtgaaaaattaattgaacaatgaaaatcaaaaatgaaaagtaaatttaaagttttatcaaaaaccaaataataccatttaactatttgtagaaaattgaacagtaacttccaattattttttcagctttttatacaaatttattgtggtgttcatgttttaatgccctaactgagttttatactttgtggaataccctcttctaatatatatatagcttgtaatatagtttttcaatttaattaacattaggtaaataaaaaatttgtgagagaaaggaacattcaagaagatattatttttattagtaatgtttttatatagaagcatatatatttactaacatacttgaattagtttcataattgttttagatagattaatgataacaccaattataaattttgacattttgtatattttgctgacatctatatcttacacttatcttaaccaaaaaaaataaaaaaaattaagaaaaatattcaaaaaatatatttgtaagggtctctatttattatatcatgaattatattgaacttggttatccttattctaacctaataatctttctaaaatataatcaattaattgaaatgtgttgtgatttcatgaattacagttttgccacatggcatgctctcctaagaatattaaaattttctacattaacattaacaaattttatattttatatttatgataggataaagaactctaatatttttttgaataatattaacaaacaacaaaaataacaaaataaggtaaatattttgttaacaaatttcatattttttatttttgatacgataaagaacttttacttttttctttgaatatattaacaacaacaaaataaatagaatgaggttactagtttaatatattaataaaataaaaaaattgaatatatagaaaataaaaaatcttacttattatatatactcctttttgataagggtaaggactttttaaaatatatatattaaaaaatttacactggagaaatgacggcatcttatattttaattaaaacatattacgattatataagttaaatctaactttatataataaaatagtattaattttaactaattaaacttatattttgggtagacatatgtttttaatatctctaatcaaatattagtgtatcctccttttttaccatcatattttttctaccgtattatgtttccttctaaatccgtaaaattagactcataaaacagaccaaacactccagagtccaggctctctctatctctccccggtacggtcggattctacgttatccaatcacactctatttttcaccgcagttaaagaaaaaaacacaaagtgaagtaaactcattactagtttggtttctcaacgaatccttacttaatcactctgatcaaataccattaattatcaccgatcctctgattaatcactctttaatcgtctctttatttctctctctctctcttcttcttcttcttcttcctccagagagcaccttatgctgattcctctccttttcttcctcaactcataaacccgatcggccgattccttcacaattatccttaaaattttcgattttgattattgggtttctctctgatcatg

SEQ ID NO: 10050 - DNA, 3000 bp, Unknown
  misc_feature (1)..( 3000): cDNA_ID_1012423_gDNA_ID_2213621_Annot_ID_195725 3000 nt of promoter + ATG
gtgatatataaatgaaattaacgattaaatgaaaaatcaataaaaattagcaaatcaatttaaccgagtcaaagttagggctttgtttagcattttattacaacaaagaatatttttgacatttttccctatatatatatatatatatatatatatatttgtgtcaaaactacacacagatctataacaacatagttaatgaccagtttgagactcaatctaacctctaaaattcatcaatttgagtaaggttaccagaattttattgtaaagtatttttgctctcgaactgtcatatgaacgcattaccaagtaaaattgtctaaaatatgtcattgttggttgccttaaagtccctggtaatttactaacagcaagttctttagtaaagatatggacgcaaatttaatcaaaaaatacaaagttaatcaagagttagtagatagagttatttacatatattttctgtttgaataaactaatttaaatatgtatatatttacatatattacaaaaaataatgttaaagagtaaatcaccaaacttgctgttagtaaaatagataatagatgggcgtccataatatattagattaggttacactcaatttagaacgtgtgaaaaattaattgaacaatgaaaatcaaaaatgaaaagtaaatttaaagttttatcaaaaaccaaataataccatttaactatttgtagaaaattgaacagtaacttccaattattttttcagctttttatacaaatttattgtggtgttcatgttttaatgccctaactgagttttatactttgtggaataccctcttctaatatatatatagcttgtaatatagtttttcaatttaattaacattaggtaaataaaaaatttgtgagagaaaggaacattcaagaagatattatttttattagtaatgtttttatatagaagcatatatatttactaacatacttgaattagtttcataattgttttagatagattaatgataacaccaattataaattttgacattttgtatattttgctgacatctatatcttacacttatcttaaccaaaaaaaataaaaaaaattaagaaaaatattcaaaaaatatatttgtaagggtctctatttattatatcatgaattatattgaacttggttatccttattctaacctaataatctttctaaaatataatcaattaattgaaatgtgttgtgatttcatgaattacagttttgccacatggcatgctctcctaagaatattaaaattttctacattaacattaacaaattttatattttatatttatgataggataaagaactctaatatttttttgaataatattaacaaacaacaaaaataacaaaataaggtaaatattttgttaacaaatttcatattttttatttttgatacgataaagaacttttacttttttctttgaatatattaacaacaacaaaataaatagaatgaggttactagtttaatatattaataaaataaaaaaattgaatatatagaaaataaaaaatcttacttattatatatactcctttttgataagggtaaggactttttaaaatatatatattaaaaaatttacactggagaaatgacggcatcttatattttaattaaaacatattacgattatataagttaaatctaactttatataataaaatagtattaattttaactaattaaacttatattttgggtagacatatgtttttaatatctctaatcaaatattagtgtatcctccttttttaccatcatattttttctaccgtattatgtttccttctaaatccgtaaaattagactcataaaacagaccaaacactccagagtccaggctctctctatctctccccggtacggtcggattctacgttatccaatcacactctatttttcaccgcagttaaagaaaaaaacacaaagtgaagtaaactcattactagtttggtttctcaacgaatccttacttaatcactctgatcaaataccattaattatcaccgatcctctgattaatcactctttaatcgtctctttatttctctctctctctcttcttcttcttcttcttcctccagagagcaccttatgctgattcctctccttttcttcctcaactcataaacccgatcggccgattccttcacaattatccttaaaattttcgattttgattattgggtttctctctgatcatggcggttgttgagactggagcagcagctactgctgctgatgcaggaggagtcgtgatccagccgccgccgtcttcaccaccatcttcaatgactagtcaagattccggcgtttcttccgatgatcagaaccatcactctaggatcgatcaagttctccggcacgatcaaggtctttacagcaagatcgggtcacacgtggcgagatccgacggcgttgacggtggtgagagctttaagcgtgatatgagagagcttcaggagcttttctctaagcttaatcctatggctgaagagtttgttcctccttctctgaataaacaaggaggtaacggtgttaacggtggtttcttcacctctgctggttccttcttccgcaacaatggctttgctggtaccggaaatggcggatacggtaacgaaaacggtggtttccgacgggtaagagacactggttttcgtcgattgtcctgtgcaaagttatgatcttttgttgaattgaggtttaactttactgaattgtattagggtttttgttaattgattgtgttttcacaaattttgtgttgttttgtttagtctacgattcatagctttggatcaattgtgtttcgttttcgttggagatctttgaaaagaaagattgtacatttgaaagcttgaattttacttgatgagactactttatatccatatcattcgttttgattgtgtgtgtgtgggtggtgtagaagaagagttttggtcaagggaaacgaaggatg

SEQ ID NO: 10051 - DNA, 3000 bp, Unknown; identical to SEQ ID NO: 10047
  misc_feature (1)..( 3000): cDNA_ID_3034125_gDNA_ID_2213621_Annot_ID_195720 3000 nt of promoter + ATG

SEQ ID NO: 10052 - DNA, 3000 bp, Unknown
  misc_feature (1)..( 3000): cDNA_ID_1537635_gDNA_ID_2213621_Annot_ID_195719 3000 nt of promoter + ATG
tactccatcttcagagcagaaagcaaccgagggcactcccgggtacatatatataaactaattttctgttttgtttgtgcttccatgggcaagtgaatcttagatgataaaccggtgtttgcttactaatactttgataggagattcttcagctttcttgttttattgcacgtagttgatagtgagatgatatattggtcttgtggaactaaaatatggcgctttatgttgacgttttcttcttttggaaattgtttcaggagtaccactagagtttcgtcaatccggcaactttctagcaactttgctcagtttaataacctgaatgcttcttcccgccagagaaaacctttgacgataaaggtatactaattaagacgtctttcattgactttagtactctatgaaaaatctccatttagttgttttcctcttatcagtttttgttctgtctatattctataggatgctcaagctttaaacgagtggcggtttacaaagctaaaagagtacagagacagaaacattgaagtagaaaatgaagcttttgatcggtacatgagtaatgtgaatttactcgaagaagcattttcatttacatctgttcctgatgaagagagtcatggaacagcagctcctgagcaaaacaaagaggaaaatattgtttcagagcttaaactgaggctgagatcgaactctgcaagaacagagagctttaagaagcggatcgcggagacagtcaaagccggtttggtgaagcttaagagactggatttaggcagttcttcagatgatcaagatgatatcaaaaggcgggtcaaaagaaagaaatgggaagagaaaggttcagctttgaatgaaataatcgataaactgaacaaagcaagaaccgaagaggatctcaaatcttgcttagagatgaaatcaaagctctgtggtcaagtttctcccactgctgcttccgagaagaacaagatctttccgggtgtagtccgaaaagttgagatgagtgaagaagcacttcaaaaaatcgctgagaatctccaatcttttgacaaagttggaatgttgtgaagtcgagaacatcctgtggatgaactgaaaagtttgagtggcaagaaaatttctagatccttcgtgaccacggtattgtacaatgatcaaacatccctcaaaactgatcctgaagactccaaagactcaagagattcttgtaaagtagtgttgagcatcatttagatattagaactcagccatggataaagctgttgattctatctcattggatttttttcactgtgtgttgttgctttgttagatttgaaattgctcattggattacctttgacttaataaatagttggtttggtttggtattggataaccgctcagtctaattagaccggtttgtttttttggaaaaaaatgaatccatccatccataggccactttcaacacgtatatttgaaaacgactaaaaccaaactcttagattctagttttgttttgctgccccaattccactattgatcaaaacatatccaaaagtttttgtggaactaaaaagtaaaaataacgtttagtttgtttccaatttcaaccatatatatcttattcatatatgcatgttgtggttgtctcgtgtgtgtagtattcatttacattatgcaaaccaactggaaacatgttgaatgggttatgggttggtggttgggacttgaggatcaaacaactcaaatgagctcattataagttaagctctcaataatcattaatttatttttgttaccacctaatatttctacgaagggttggtgtaacaatttttaattgtaagataattgtgtaatcattttcaatattaatttttattatgtatttattttaaaaagttatataatacgtaacacatttagtacttggttttggtagcttcatcaatgtaccatccgaagttccaaaaaataaaaaaaaatgtcgatttcaccgttggtgaaaaagaaactaaattgatatgtattattcattttttagaagagattatgggtttaaatctgaaacttcttagttaaatttttaattaatttatttattttgcatgctttattatatatttgaaattagaatctacatgattaatgatttttttctcagatagaataaaaaatatatttactgataaattattcttttacatctttccggattcgctactaatgtgtttttgttaactttaaccagattgcttatggattatgatatatagtatccattacttaaaaagtaaaagagatgaaaaaccaagaataattaatgtcaccaaactatcaacaacaacaaaaagagagtgtaatattcaagataaacgaatcctattatataaaaaaaggtgggaagaagttgctgtctaatgatgtaattatgttaactagtgtgctaaggaaagaaatcaagcaagtctcacacatacacatgttatgacttatgattagcgacaagcatttcattttattttatttttgctaagcaaaccttttgtttagtaaaatagacaatgtgcaaaaaattccaaacttcttaaattgaaaaaaatactatatttaaatttacctttttaagtaagaaattaaaagattttgtagtacactacatgttttaaaacaaccactatccaaacaaaaacttggtcaccgaataaactgtagaaatatcgatttccgtcatttaaattcactttatttttggttgtttttttcttggaatatgcaagagtaatggcgtggttgaagacacgagagagagagagagaatcctaaagaaaaagccaaagcatattaagaagaagagaaccaaaacgaacaaacccaaccctaaagaaacactattattaaacctatatttatagacatttaaagagagagtgaaaggtgcagaagaaaacagagacagagttcaaataccttaagatcacatcatcatatagcttttgtatcattaaa

SEQ ID NO: 10053 - DNA, 3000 bp, Unknown; identical to SEQ ID NO: 10046
  misc_feature (1)..( 3000): cDNA_ID_1441333_gDNA_ID_2213621_Annot_ID_195718 3000 nt of promoter + ATG

SEQ ID NO: 10054 - DNA, 3000 bp, Unknown
  misc_feature (1)..( 3000): cDNA_ID_2714763_gDNA_ID_2213622_Annot_ID_131980 3000 nt of promoter + ATG
tccacattctctaacttctcaaaaaacaggaagagaagcaagacgcaatgaagagttcaatgagcatcattgtcttcttgtttgtgaccatcttcaccatctctgcttcttccttgaaccctgaggaaacttgcatacaaagaaacatcaaccggtcacaacctccaagctcttcactcgaacccaagacatcaaagttcgactttcttgtggacaagttgtgcagagacatggctcgtgccgtcatgttctctgtgaggataaccggaaaattcccatctcactatgtgaaggcgatgtgtaatgtgtttggaaatgacgagaagaaagtgaaagagtatgttgtgaagaaatggttgggaggttcgaagctcgtgtctagtttatcttgtgcttttcattgaaagagtataattgtctttagtgatattagtctattaacaattagctaaggttttcatccgaaagtcaaaaagattatgcaaattaaaacgacacaattagtaaagaaattatgctcaaaagtcaaaaacttacaaataacagtttttatgcaaaattaacttcagaaatttatgaatagcaattccataaaaatatatcataagaatgtgtaaaaaatcagagatttattctcctttttgctaccgaatccattactcatgttattgagacccaccccactaaactcataggttaatcactctcggataagaacattcgaacaattaccgacacacaaaaagtttgaagagaaaaacaaaaaatgttgtcgagattgttcaaggcaggtgaaaaggttttgtcgaatctcgttagcaagaaagacatttacatggcgtcgaggaatcaggagaaatctcccaaagtgcaagagctttacgacctctgcaaagagactttcactggcaaagctccttctcctgcttccatggctatccaaaagctatgctctgtgttgggtatttttctttcttcttttgtctctgtttgattttctcctactgcgatagggttattgcaattgcagctagttttgatcgaatcagtgacctagttaaagggtttaacgttgttttgttggatttgaataaatgtggaaactcatttgatccaccaaatctggccaattgcagattcacaatttgaaatcgtcagagtctctgagaagtgcaaatcttgtaactttgatgtatacatgatgcaaatttaggatttttagagaagaaatatcatatattaatatatcaatctattcttcatagagggactactaggatcagtgattttatggttcattgtggtgagagttgaagttagaatttggggaatgtttgttttataagcagaagtgtgatttgttttttggtcattcttgtgtgcagactcagttagtcctgcagatgttgggcttgaagaggtatctcaagacgatgatcgaggctatggagtttctggggttagccgtttcaatagagtaggacgatgggcacaaccgataacattcttagacattcatgaatgtgatacttttacagtaagtctttgattgatactgaattctttctgctgatcaatcaacaaatctcaaaacacaagtgtttgtttgtcctttcttcagatgtgtattttctgcttcccaacgtcttcagtgatcccattgcatgatcatccagagatggctgtgtttagtaaaatcctctatggatcacttcatgttaaagcttacgattgggtcgaacctccatgtattatcacacaagataaaggcgtccccggttctcttccaggttattgttagtttctcatcttgggtttcactttgtgtcattgataattaagacttcttgcaactacttgtataacagcaaggttggcgaaattggtgagtgacaaagttataacgcctcagtctgagataccggcgttgtacccaaagactggaggcaatctccattgcttcactgcgttgactccatgtgctgtgctcgacattctctcacctccttacaaagaaagtgttggcaggagttgcagttactacatggactatccgttttccactttcggtatgcaaactttctctcttttgcctttagaagaacattatgttactctgttttcgtttaccgttttttctctttggattgataataatagcattggagaacggaatgaagaaggtggatgaaggaaaggaagacgaatacgcatggcttgtacagattgacacgcccgatgatcttcacatgcgtcccggatcatatactggtccaactatcagagtctagatatttgtggtttgttttgtagcaaagtagagcaactcttgtaacattccaagataagtttctggagaagatatcaatacgatttcagattaaagatgaactctttgtttagtccatgtccacttctcagttctcacacgcattcaagcaaatgaaactgcggaaaactacaaatagatcggcaatgagaaatgttaagatttcatttcgaatctgtgcttacatcactgataacagctttcacaactttgttaagagtgtctctttgtttcacaacttaatcggaagagaagtagaggaaaagatcgttacgattatccagcgggaaaaaaaaaacgaattctaatgtgcccgctataaaatcttccgcaagagtgtaacagtgatgcagctgaatcaataagactgtcttcttctccgaatttgaaaattaaattccagttttttcagtttgactctgcttcttcttcctcgtgggtaacgacgatataccgttaaaattaggaaccaaattacccaatggtcgtcgtcaaatcatttttaatcccaatttggtatttttccacgtgggtcaaacaaaaaacaattttttacataaagagaagagagtagtgacgagaagattagcactactgaatcaaacttagccgccgccaccgtcacgttgaaaccttcatctctctatctctctgagacctctccttcaatg

SEQ ID NO: 10055 - DNA, 3000 bp, Unknown
  misc_feature (1)..( 3000): cDNA_ID_2714755_gDNA_ID_2213622_Annot_ID_131982 3000 nt of promoter + ATG
aggcgcatatcttcctcctttaaacccgttaatccaaccccgaacctcctcgttaatcctctccagtccatactctatatgctcagctaaaagaccaccgtgaacaaaaaccgaatcaccaacaacagcaactgtttgattcttagtcaagaatctctttgcaatcggaccatcaggtctcaatgcagcaatcctagctctaattccttcaaaacagtcggctctcatacgagggaagctcatcggaatcccttcgtaaggatccttaggtttatcaagaccactgcataaagtcttcatcttgttccctaaacaataccaatcagcccaaatctgaaattcctctaaacctttcttagtcacatatctaaagtcaccttctatattcatgatctcatggttcccattcatagtcagaatcttacctccagctctctcagcctctcgtttcaatttctctaagaaataaagtatcttcaactcctctccacctcgatctagtacgtcgcccacctgaacaaccatcgttgatccaccagtccatctgtccgacgaatcaatcagaccagcgatcttgaatgcttctctagacttctcgagatcgccatggagatcaccgattgcaacgagtcgctccggcttctcgaacctcgtttgcagaatctcattttgtgagctaggatcttggggcaggaagatgccggagacggagtaatcaacgaaagtgtcgacgaaggaagagatgagcttgggaatgcttttgcagattccgctagggttttctctgcttgacattttccgtgataaatggcggccaagaacaatgcgcctttataagtttccttattaagcagtttattaaattaattcattgactagccaataaacgaagccaattagtgagtgactctttttgtctgtgtatcttctagatattgttcaagttgggctttggatctcctacaaggccacgcccattgttttgttgctcatgaattaagtaggcccattaacccagatagttggaaatgagttgaaccagagtattggactctgagcagcagagcagcccagagttgagaccagacgagatcttccaagcttagttgtataaaccaacgatgagtgaccggtattgaagtccctttactacaatttgcgagctgtcttatgtctattttatatacaagagttacagtacacaaatagttttttactaaaagacaagaaataagaaaacaagattcattctccttatgacaacaaaaaaaagaaagaaaacaagattcattcatacaaaaaggaggaagttgtgtcagaattgcaaccaatttaaatacatttagaaccgtcaacgcctctattgtttgttgtgactcttccaagtatgaaggttattgtattaatttatcctcaagttttttataacattgatatgataatggttttaaacgctttatgcgttattgtaaaatttatttaccccacaatagaaaaagaaaaatgcaattgtttagttttcataagtcacaatcgtagaaatattttaatataaattgaggtgtttgttgtatgtttatttgttctctttggataagtcacgacttgccaagaagaaggagcgtgagagatcgtgttaatgtggggtctttcttcttcaattaattacgatctaaattgctgagtttttttttttaataatgatttgactttcttttcctactattatactaaaatgatattttatcccaaatgtagtaaatttaatagcgatatctaatataagtttcagctaaatttaattcaatactcttttttttttttttttgaaaaacagtaacactgttatttgaaaaaattcaaaagcatttaaatatagtggaaacaaaactttatcctttgaacttttttataaagaaaaagtttagattcttctactgtttaaaaagaaaagaaccattaagtacgttaatgcggttaccgaacatgacattaagctttcgtttccttaattatccgagtggtccaattctttaattacgaaattatgaaagcgaattaataattagttaacgaaagtgacattgagaacgcgtttgcgtttcagttatggcgtgcaaacaaagctaaacaaaaaattcagagagattaaaaaaaaacaaaaggaatccaaaggaaataaatgattttgtttgcttttgcttgcaaataaaaatcattaaaaaaaaacgaggcgtaacaggaaggagaagaagcaggggtccatcatcaaatacaacattgtagcaattgcgttttcgactttatagagatattttcatagagatggtctcgaagctaacaagttgacaaatttcttcgttataagagagatagatgagttgcaggagagtgctgaagtcgatacaagccttggcggctcatagtttactcttctgtttcacgcttttattggtgcttaaactcgatcacaccgtctcttcctcatggtggttagtctcttttctctctttcaattctcttttctctgaaattgactgcatgattcaaattctttgcttctgatttgttcaatttcgattttcgtttttggtgtggaggagaatcatttccctgatttcataatttggggattttgaatttgaggaccttgtctttttgccccccgttgaatttcgaagctaaagattgtctctttttgtttaggcaaagtatcagtttttgtttttgagagaattgaaaaagcagatcctttaacaatttcccgattcattgtttctatttgccgttaatagcaacaaaagcaatcacgtcaatagtttttactgtataaagtttttgcaaattttggtaagtcatgtatgcattttgtatcctagtgtgttaaaaagttacatcctttagaggtatgcatttaccaatgactttcacgaaaccaaaaggattcagctttttacttgggtctgataaaaaatatttctgtatttggggttatgcagg

SEQ ID NO: 10056 - DNA, 3000 bp, Unknown
  misc_feature (1)..( 3000): cDNA_ID_2714751_gDNA_ID_2213622_Annot_ID_131983 3000 nt of promoter + ATG
aagctatcccagtttttatgatggcgaaaatcattcattggtccctctatctttgtttcaggagtctcctcactcagctagagttaaagtgttggcaagcggtaacacaacagaaagaagattcaggtctggatttagtgttcacttcttcctctataatgagacccaaatttttttgcttggatcaaccaacaaacatgttatgtatgtgcagtgtatggataggagggagtatattggcatcactaggctcatttcaacagatgtggttctccaagtctgagtaagtctctgttctgattttccattaatcagactcgcaaagaaactatagtttgttttctctcctgacactcggatttggggtcttggtgtaaatggcaggtatgaggaacatggagcttcctacattcagagaaaatgcccttaaagcaggcagtttcagattatgtggagtctgacaagacgaaacttggaaactaatgtgttattttcattgtgcatcgttgttccttgaagattattagtattccgcctgaaccttttagaatgagtgtcattaacaagcattatagtgctattttaaaaacataaaaacatgtggaagaagtttcgttgctttattagattttcgcacaatcaagaccgtccacgttttgttactacgaaccaagataatccacaaaattaacaagaaaataacaaatccgaaactacaaaaagcagcttcataagttttctttttcttttttaaaaaagaagaaaaaatcagctttatcgtgcctctcaaaaagctaatgacttcgaagttccaaaattccggtcttcgaacatattttatagaatagcaaaatgttttgaaccacaagattattaataatataaataatgtaattgatattggtaagtaataatacttttattaatcataaaatggtctgaataataataaagacaaaatggacgtaacttctccgccactacagacttacgtgtcatgtctccatatccgcatgcaaaatccaatagatgacacattctaaatcatccaattatatacgcccacgtgtcaacctctgtctcgtctctctaaataacgtttaccgaccttctcttgtggacggtaagaatcgccggcgtcccctaatatatcggatttcaatccaaagacacactcacaatttaaaaaaaaacgtttcttttctcttcgattcccgattacggcttttgattttgtgggactcttctcagtttttctgggcttttggtttttggattctatcttctttcatttttcagattttttattttattttgttgtatttctatattgggaaacaaaatcatgcagaggatcgtcgataatgctcttgctatcacaaaagagtgagtccctctctcttttcgatttcaccattagtctgtgcacgcttattgattttgtgatttctgatttgtttttttagttgcatgtttagtggttttagtaatttgatatgtgatttcaactgttttgtttccttaatttggattttaattcgattagattttctcaaatagtaattcgatttgctttagatatggaagttgccaaattttgagccagtggttttatagtggagctaggagctaagtctatatcttatatcttctgatttacattaatcttgagatttagtggtatatagttttactaatttggggatacatttctgatttaccatttttagttagttgttgaaggtttgttgtctctttgaagaaagtatacatattgactctttgtcctgtaataattacagcgattctcgttgtatctgcggatagttttctttgtttaatgcttgtctgtttgggtttttggtgttcgttgtgggtttttgattggtattaggattgtttgtgttagtctaaaatagttttaagctaactaatgattttggtttttagtgcaggtcagtgaaaactctgacttatgagtctttgaacaacattgcaagatgcattaatggattttctgcgcttctcttgacacttttgcccggaaagtccaatgttcttgaaggtcttcatggatgggagcttaggcctacattgcgtggacctcgtttaccacgctggatgcataagtaaaactctcttcaactctctaatacttctttgtggttaccttatagcagcttattcgactctcttttgatttctgtggttttgcagtggagtctcttctttcaaccacttcattcacgaactctctgtggattctgatacttctagcttggactattcctctggtgatgatgatagtgatggcatgtccacgcctccatcacccttgtctcaaagctcactccgctcttgggctagtcttcctgccaattacgaaagccattggacagactggataaccttcattgtctggtgggctttactacctgcccggatccttctatgggtaccattatatcttttacgtcttttagctagaagaaattcaagaatgcagcctctgagcccaggaaggtaccaacattcgtctagaccttgttttagcaaagctatctcagggaaagagcatgacgtgcccaaccgaactactgataaaagacgcggagtcattgaggttagtgttgatgggcatacttaaatcacatttcttgtttttgagttttcttacgcaattatgtgttctactttggcaggatcttcagcttggtatcgagatctttatagaaacaatatttgatttctttcacaaggcggcacatcttcttctttctccatcagaaacttttggaatagttttatcatggttctcttcctccagtcacagctctaaaggaaactatggtgacgtttcggatgatgagatcattcagactgccattctaggagataacgattcatctcttacagaaagaagaaccacaacgagcttatacaatacagatacccggacctgtcaagatgttataacagagcttgggtaaggggggaatg

SEQ ID NO: 10057 - DNA, 3000 bp, Unknown
  misc_feature (1)..( 3000): cDNA_ID_2714743_gDNA_ID_2213622_Annot_ID_131985 3000 nt of promoter + ATG
ttgaccggtatttttggtttattaatgaaaataaattttattgagattatgggttgaaaaacaatctgtaattagacacgaaaacgtgctctaagacgtgcatagcaatcataccagatttgcataccatttctttgcaaaattcgaaaacagttccaaatttgggaatctgggttttttcagttcatgattcatcagtcatgacaccatcgtgtctttgatagaaatcataaaccacaaatgcacaataaataatagaatctctcccgagtctttccgtctctgtttacacctctatcaatcttctgcaatcatcggaatcaagaaccagaaatggcggcaccaaagctggaatctttcaggcggggtagcatgttcgacggatctttcaggcgaggtagtatgttcgatggttcgtttcgacaaagcatgagagataggcttatcctacagagcagaggctattccaatgtcaacgacgatgacaaaacttccgtccgttgctgctcctacaggttatacattacatacaatctctccttctttccagaaccttctattgaccaaacctttttgaagccattttatcttaatatgatgcctcttggagtccaatgtcaagtaatctcaaatggttaagtcttgaaatgctattggtgttgtttgcagctacttctctgacaagatcacgggggttgtgaagaaattaaaggatgttttggttacggcatgggagatgggaacagctgacccgaggaagatgatattctcggcgaagatgggtttggctctgacacttacctctatcctcatcttctttaagatcccaggattagagctcagcggccactatctctgggcaattcttacagtagttgttatcttcgagttcagtataggtatatgcaacagactttacacatcaaatttgagcattctaaaaactttaatacctgacatgtgatcttctcttgttttttgtataggagccacctttagcaaaggatgtaaccggggactaggaacattgtccgcaggaggactggcgcttggcatgtcttggatatcggagatgactggaaattgggcagatgtttttaatgctgctagcatctttgtagtaggtatatatacgaaatcatgatgtgtggtctaaactaaagcttccacaatctcattctgatttctgacaatatcgcatgcctgctcttgtatcagccttttttgcgacttatgcaaagctatatccaacgatgaagccttacgagtacggattccgggtgttcttgctgacctattgctacgtaatagtgtcaggatacaaaacaggggaattcatggaaacagctgtttcaaggttccttctgatagctcttggtgccagtgttggcctcatagtgaatacttgcatttatcccatatgggctggggaagatctccataacttggtcgccaagaactttgtgaacgtagcgacttctctggaaggtttattattaactctctccctgaatttgagtttctggttgaaaagcttcttagtctgtttccaatccatggaaaatgttcctttgtgcaggttgtgtgaacggatatcttgagtgcgtagcatatgatacaatcccatctaggattctggtctatgaagctgtcgcggaagatccagtgtacagtggttacagatcagccgttcaatctacaagccaagaagacaccctggtaagattcttttaacacataagaacagcaacaacattatcaaaagaccagcttacttgagatcctcacatctttttcttgttgttggtgtgattgtgaagatgagttttgcatcatgggagccaccacacggaccgtacaaatcctttagatacccatgggcactgtatgtgaaagtaggtggtgcattgaggcattgtgctatcatggtcatggcgttacatggctgcattctctcagagatccaggtactttccaatctttaagtcagaaacattctataatcttcagatcttaagagagatttgagacaagagtatgcaaagtaattgcaggctgcagaggatagaagacgagaatttcgtaatgagcttcaaagagtgggaatcgaaggagcaaaagtactaagatacattggggaaagcctgaagaagatggagaagctaaaccctatagaagacatactctacgagattcaccaagcagcagaagaactacagagcaaaatcgacaagaaatcataccttctcgtgaacgccaagaattgggaaatcgggaaccggcctagggttagggatttgactgatgaacaaaaaatctcgaatctcgactctgatctaagtcggatcttggctcataaatctcagagtgaagccactcttcgtccaccgaagaattgggatgatgttacaactgcagctaacttgagttcggcgacgatgcttccttacctgcaatcaaggacgatgatacataaacagccgtcgtggcctagccggatctctattacgccgggaagtatgttacagccaccactgggagagccgggaaaaatgtacgagagcgcgagtaatctttctctagctacgttcgcttcgctactgatcgaattcgtcgcgaggcttgagaatctcgtgaatgcgtacgatgagctcagtgtcaaagctaatttcaaagaagctgtctctgagtgaaaaagaggacgacaagtgtatgctttgtatttgtcgaattaaataattattatattgaattgtgtatcaacaaggtcgttgtagtatagtggtaagtattcccgcctgtcacgcgggtgacccgggttcgatccccggcaacggcgatttttttttgttattttcggtttcgtacctcaattttgtggtcttttaaatctagtcccttcagttttctttctcctttttaccttttttggtcgacaccgacagaacaaaatccatttggggataaactataaaccctaattccccagaagaaaagatg

SEQ ID NO: 10058 - DNA, 3000 bp, Unknown
  misc_feature (1)..( 3000): cDNA_ID_2714739_gDNA_ID_2213622_Annot_ID_131986 3000 nt of promoter + ATG
aagaactttgatccttgactggtacttctcctcacgagctttaaacacactgttttgctgcaaaaaagagaactcagaatataaaacatttgaacacaatttactatttctccgaagaaacaagaaataccgttcttagatgttcagattgagttgaaattcgtcgctcgatttcctgcacgacttttctcagcagacatgctacacgctgatcattacagattagatcaaaagatgtcccaagcagcatttgaaaaatgtgtgcatgcatatttgcttttacaagcacgtagcatccataaaaatcatggtcaggattgttagagactcaagtacctgagggagttcaccattctttctctcaatagtttcatcaagaattccattaacgatacttagaagtgactgtgtgggagcattctgcattcaacagaagcatatatagggtattattataaacaactttgaaaaataaactagtatgacaaagaagagaaccagagcctaggaaaagcatataaaaattcattgataaggtacacttaagcttaagcagcaatacatctaaattgtttgatttcatcagttctgaaatctttgcggcttggagatcaaatcgcccctgtttcatttggaaagcctcgtgggacttgtgtcctccatggagcattgatccaggggatgatggatctgtggtagaaataactcattacgtcatattataaagagaccttttctaataacataatgcagacaaatacataaaaatgtacctagagctgaagaattgggcaggggacgttgaaatctggaatccgccagacctttattatgcctttcacgtggagatgatggagagaagggactacggggagttgaacctccatgagagctgcctgattgatcagtgagagaattcatcatcaattcaccaaaggcaaacttatggaaacacttgataaagccacaagtccttcattctctatcaacaaggcctgaaaacacgattgttatataaatcatcaaaccaaatcacatacaaagaagctacaaaacataaagcctagaggaaactaattgaaaccagggaatgcaacaacatgatcaagtaaaaccatgctaatgaaatgcaaggatcattcggatctacctagtagcattctcaaaatgcgaattaagaagaaaatagcagaagagacgaacctacctggagaggaacagaagattgctcttttggtgcaacaagagaagaacggcattgggttcaactaagtcaaaaaaaaaaaacacagtacaattcaccattcagaatatccgatcatgaaaaataaccacaggggaaagcaagatcatctctccaaacctgggaaaatcgcaaggagaagaccaagtcctaacctgccagaagaaaacacagagacgtggatttgtcacgtcaatcagactttttcagactttttttttttaattgataccaaattttccttcttttttttcttcgtctctgtagcgcgaatgtaggaagaagcgcgagtatctctgcttctccagtcgtttatacgggtcgggtcgggtacgaccaggccgggttttaattttggagttttcacttttagcccctgtaatttttgtgtattatgtattgttcgtagtgttttttgtttattgcagatgtagtacctaactttgtttcgaatttatactttcttttttttttggttaataagtaatatatgaaaatcaaatggatttctcattatggtagtacatcaaaatcgaatggattttctttggtcttcttctgtgctttgtatggtagtacacagcaattcctctgtaaaagctcagagcaactatagaatgtatcgccaagttccacgtcctctgaatcttcatctgatgcaactaaatcttgtcccgaggaacttgagggaagagctttagtttgaatttcctcagactcacagctctcagcaggattggtattcaaggtcaaattatctaacatctgaacagagtcatcgtcagcctcaactgactcatgaaggttatcggaaatgggacaggttaattcttgttctgtagcactttcaaaagcatgttcacgctgaaattcagattccaacattgcttctgataaccctgcaaaacaaactcaaatatctcatgacataaattattgactgattcattactcaagattaaatttaaccaagatgagatatctcttgcttgagcttgcgaatggctaggcctgcttgctcctgtcctcttttatcacgcttctcctttgcttttatagcatctgatcttgccgaataatattctttggcaatcacatcgaatggccttggaccagagacctagtatgatttttaaaatcaagatatcacagcagagagagacatcaaaccaggaaaacaagaccaatatggtgttgtaaaactaatttgactgaagtttgcaatttcacataatcatcataaacaaatgaagaaaagtcccacttctacccaatgggaaagaaaatatattgatagcaggtagccacaaacactccaaaaaattgaacaaaatatcttaataaacttctgccataatggatacgcttaatgtaatccctttttcagaaaaaaacaacacttcattaaacacttcataattttgaccggtatttttggtttattaatgaaaataaattttattgagattatgggttgaaaaacaatctgtaattagacacgaaaacgtgctctaagacgtgcatagcaatcataccagatttgcataccatttctttgcaaaattcgaaaacagttccaaatttgggaatctgggttttttcagttcatgattcatcagtcatgacaccatcgtgtctttgatagaaatcataaaccacaaatgcacaataaataatagaatctctcccgagtctttccgtctctgtttacacctctatcaatcttctgcaatcatcggaatcaagaaccagaaatg

SEQ ID NO: 10059 - DNA, 3000 bp, Unknown
  misc_feature (1)..( 3000): cDNA_ID_2714731_gDNA_ID_2213622_Annot_ID_131988 3000 nt of promoter + ATG
tgtttcttcaaccagtttttcaaccacagtacctttctgcaattgtggataaataggttattagatcaacgaaagtctagactgaatcaaggacataacatcagcaagaacataatcaatgtataaaattagtatgatacctctggatcatcaaggagtttaagggcacgtcccgaatctgaattgagcagatctctgacattttcattatatatttccagaccagaaatcttgatagtaaaatctctttcaggggtctggaaacaacagtgaaacaaataaaggtattggtcagaagaactgcatttgacgtctaaaacattgactctgaccaaagcagtgcttaccttaattatgtgattgtaaatatcattgacagctttctccgttactcctctcatggtatatgtctttccactgcttgtttgtccatatgcaaatattgttgctgaatcattaaaaagggaagttagtcatctatgataaatccgagtaaaagacagaagaatcattaaaaagacaagtaccatttatgcccatcaaagcagacaatgcaacattcttaacaccatcttcatacacattctctgttaaactctctggtccaaaaactttatctgaaatcaaaagagtgcattattagccatcaaaaaccgcaggacttgaagagttggaaacatcagatataaaacttcaattaccaaatgtaaatgaggactgatgatgcaaacgttcttgaacttgtggtttagacacaatggtgtggtcatttacacattcccaagcaacttggtctttagctaacagttctctcttattcattggccttaaccttacagtaacaacaatcttctcttccctggatcttgagcttccacctggtgttacagctggtgttctgtccatcttcgaaaccggagttcccggtgtttttatagtcatttccctacaaaatattcccaattttttcatcagatctaatagatcaacttaattctaagcttaaattctcccccaaatctatcagatctatggaaaaaagttcatataaggcaacattgtgcagacttaatccataaaaaggtaatctttagtttttgctcataaaaggaaaatttagcttcttcagattaatttcatcaaatccagaaatgttatattcaaaacttcctaaaaacgtcatttcactaaatagttctaacaaaaacaatagttaagagagatcaaaaacacttacagagaaaaaaacgaacaaatgaatcggagttttactctcagatcaaagagagagatctcaggcagctaagaatgtagaatcgtctcagatcgacgatagagataaattaaaagaataaaagaatattgagaggagaagatagtgagagcggtttctgggtttcgtgtatctttgtggtagaaatgatgaagaagaagaacgggttttgggggttcttttgtctttacggaaacccgtgcagagtgagattttgaatctgacgaacctctaacggctagttctttccacgtttcttttgaggggcttttatttttagcttatttcaaaagctctccccacgttttaatttcttctagaaatcacctttacctcaattttttccatggataattttctcatttactgtttctgcaaattttctctatagattttttttttttctgtcaattatcatttcatctttaattattacttcggtattttgttttttttcttagctgccaattttgatgtattttgtcttcttgtaattattattggcccttaacacaaaacggtcatttattgttattttctttttcatcctctacaattttaatttatttgcagatcaagcgggaaatagtaactactaaccaatttggcgtataaaaatagtaaactacgtttacaccctcattatacttcactaggcagaacctcccctctattgcagcaagtgggattggaatattattatacgagtctttgaggtgtggagtcaaggtcttcggcatgagattttgaaatatctgcaagcctgtatatttcgttttttatagcaactttagttgaatatgtgtatacaaatattaagaaaacaacataaatggataaataaactcaaaagataacacatgtattctcattttccttggtcaaaaattcaaacttcaaaaaaaaaaaacaatcaattctccatctctttgctatttattcaatggtgtgtttttgattggatcacaagtctatcattcagttgacttcataataaagtatatcaaaaccatgttcactcagattttgatgcaattatatgctattggactatttcaccagtctgcaatttcttttacaaaattatgattgaagtccttagtgaggtttaatgaaatactaacataaattttcacataatactcttttgtaattcgattaacgtttttttttctttttgtgtataatcatcagttctcttcattcctttatatatataatgttttcttatattcatcaattttataagtttgcagtcctgttatatattggaagcataaaatcgcagtggaattttcaagaaaaattgttgacatacttaaaaatgttcttttgggtcaaagaattaaaatgtttataacttacaaataagtcattaattaaccttagtcgaacaattgcatttgtatgtaactatgaagtcgatatttataggtatcaactatcaagtcgctttcagtctgtccaaaaaaaaacacactatagtttccaacaagtcaaataaccattaaagatctgtatgaatctctgaccgttcatatacataaataatttatttaggatgtagttataatgtaatcactaatcagcgatcataatctgttttaaattcgccggactgtaattaataaaagtcgtcaccgatcattttgaccaatcttccataaaatccccaaaacctctcaccaaaaaaaaaaaaagaaggctttagttgtcaaaacccaatg

SEQ ID NO: 10060 - DNA, 3000 bp, Unknown
  misc_feature (1)..( 3000): cDNA_ID_2714727_gDNA_ID_2213622_Annot_ID_131989 3000 nt of promoter + ATG
taaagattattaaaagttttggtcaatgacgataacaattctcgaccaatttggtcaaagtatacgttctggagtctgacgaaactaatcttaaatgttaatcacatcaagaacagaaattggtactaatcttagaagaaaagtggtactaatcttagaagaagtaaaagcttgaatctaaatgataaacgactaaccttggttagtgttatcgtcgcaggaggagttgtgaggtctgtccgcacatagacaccggaaactctccgaatctaacgccgaaccacaaatcccaccggaatcaatgcatctccggcaagctttgtcttccatgatgtacctcaaatcgaatccttttctcaaagcttccacaaaagttagttcggaccgttgaagctcgtccttagcagacctcagcatcggaatttctgcatatttcatacaaccttcgtcagaatccgacgatcgcaagacatgatatgtcaccggatcctcgtagctttcttcgcaagaaatctgcaacggagctacgccggaacagttgacgaatacatcgatcgtctcggtgttggagtctaatgtgaactgattcttcccgttgaagttccaaatgtttaggcaacctccgtctagtagactatcatcggcaacggaaattttatgatcctccagattcgcagaaacaacgcgaagagtgatgttcccgatcgctagggttaggttttgatcaccctcgcaggagagtttgaatgacgaatgaccgcagaatttgggtttattgaatccaccccagaacggatacgtggtactctcgaataccctgtgtccagatccacatgtcagattacgtgagcgacactcctcgtactgttgatcggctgagaagcacgacgggaggtcagcgacggagaagacgacgaagctgatgaagaaaaaaaagatggacattgggttttgacaactaaagccttctttttttttttttggtgagaggttttggggattttatggaagattggtcaaaatgatcggtgacgacttttattaattacagtccggcgaatttaaaacagattatgatcgctgattagtgattacattataactacatcctaaataaattatttatgtatatgaacggtcagagattcatacagatctttaatggttatttgacttgttggaaactatagtgtgtttttttttggacagactgaaagcgacttgatagttgatacctataaatatcgacttcatagttacatacaaatgcaattgttcgactaaggttaattaatgacttatttgtaagttataaacattttaattctttgacccaaaagaacatttttaagtatgtcaacaatttttcttgaaaattccactgcgattttatgcttccaatatataacaggactgcaaacttataaaattgatgaatataagaaaacattatatatataaaggaatgaagagaactgatgattatacacaaaaagaaaaaaaaacgttaatcgaattacaaaagagtattatgtgaaaatttatgttagtatttcattaaacctcactaaggacttcaatcataattttgtaaaagaaattgcagactggtgaaatagtccaatagcatataattgcatcaaaatctgagtgaacatggttttgatatactttattatgaagtcaactgaatgatagacttgtgatccaatcaaaaacacaccattgaataaatagcaaagagatggagaattgattgttttttttttttgaagtttgaatttttgaccaaggaaaatgagaatacatgtgttatcttttgagtttatttatccatttatgttgttttcttaatatttgtatacacatattcaactaaagttgctataaaaaacgaaatatacaggcttgcagatatttcaaaatctcatgccgaagaccttgactccacacctcaaagactcgtataataatattccaatcccacttgctgcaatagaggggaggttctgcctagtgaagtataatgagggtgtaaacgtagtttactatttttatacgccaaattggttagtagttactatttcccgcttgatctgcaaataaattaaaattgtagaggatgaaaaagaaaataacaataaatgaccgttttgtgttaagggccaataataattacaagaagacaaaatacatcaaaattggcagctaagaaaaaaaacaaaataccgaagtaataattaaagatgaaatgataattgacagaaaaaaaaaaaatctatagagaaaatttgcagaaacagtaaatgagaaaattatccatggaaaaaattgaggtaaaggtgatttctagaagaaattaaaacgtggggagagcttttgaaataagctaaaaataaaagcccctcaaaagaaacgtggaaagaactagccgttagaggttcgtcagattcaaaatctcactctgcacgggtttccgtaaagacaaaagaacccccaaaacccgttcttcttcttcatcatttctaccacaaagatacacgaaacccagaaaccgctctcactatcttctcctctcaatattcttttattcttttaatttatctctatcgtcgatctgagacgattctacattcttagctgcctgagatctctctctttgatctgagagtaaaactccgattcatttgttcgtttttttctctgtaagtgtttttgatctctcttaactattgtttttgttagaactatttagtgaaatgacgtttttaggaagttttgaatataacatttctggatttgatgaaattaatctgaagaagctaaattttccttttatgagcaaaaactaaagattacctttttatggattaagtctgcacaatgttgccttatatgaacttttttccatagatctgatagatttgggggagaatttaagcttagaattaagttgatctattagatctgatgaaaaaattgggaatattttgtagggaa

SEQ ID NO: 10061 - DNA, 3000 bp, Unknown
  misc_feature (1)..( 3000): cDNA_ID_2714723_gDNA_ID_2213622_Annot_ID_131990 3000 nt of promoter + ATG
atgttgaacaatcaagaaatactctatacttcgccaaccgagccaaggaagttacaaacaatgcccacgtgaacatggtaatgatctttgttccatgcttttggttcatcttagtgcccttttggatgaaaacaaactaaaatatttacttcctgtctattatctacaggttgtctctgataagcaactagtgaaacatcttcagaaagaagtggctagattggaggccgagcgtcgcacccctggtccatcgacagaaaaggatttcaagatccagcaggtttctgtccatttcagatcaccaaaatatataattgaaccaaagctttggtacttagtttatggctattttgtgacattctcagatggaaatggaaatcggagagcttagaagacaaagagatgatgcacaaattcaacttgaggagttacgccaaaagcttcaaggggatcagcaacaaaataaggtctcttaatctacctctctgtctatctactgtactaaatatattcacaagcgttggctgaagtttaaactaaaccttttgttgaatctcagggcttaaatccttttgaatctccagacccaccggtcagaaaatgtctttcctattctgttgccgtaacgcctagctcggagaacaaaacgctaaaccggaatgagagagcaagaaagactacgatgcgccaatctatgatacggcaatcatcaactgctccatttacattgatgcatgaaatccgcaaactcgaacaccttcaagaacagttaggggaggaagcaacgaaagcccttgaagtgttacaaaaggaagtagcttgccatagactagggaatcaagatgcagctcagacgatagctaagcttcaagcagagataagggaaatgcgtactgttaaaccatctgcaatgcttaaagaggttggagatgtcatagctcctaacaagagcgtaagtgccaatctcaaggaagagataacaaggctccattcacaaggaagcaccattgcgaatctagaggagcaacttgagagcgttcagaagtcaatagataagttggtgatgtctcttccgagcaatatcagtgctggagatgagactccaaagacaaagaatcatcatcatcaatcaaagaagaagaagcttcttcctctgacaccaagcagcgcatccaaccgccagaacttcttgaaatctccatgctctccgctttcagcttctaggcaagtcttggattgtgatgctgagaacaaagctcctcaagaaaacaacagttctgcagctagaggggcgacgacaccacaggggtctgagaaagagactccacagaaaggagaagaaagcggagatgtctcgtcaagagaaggtactccaggctacagaagatcaagctcagtgaacatgaagaaaatgcagcaaatgtttcaaaacgcagcagaggagaatgtaagaagcataagagcatacgtaaccgaactcaaagaacgagtagctaaactacagtaccagaaacaacttctcgtttgtcaggttagataaagatcacaacccataaataaaccttttttcctccttttatattttctcatcagttttgaacttacgcaggtgcttgagttggaagcaaatgatggagctggatatagtgtagagaacgaggagaacacgataatggaagatgaagagcagaatcaagtggcgtggcatataactttcatagaggaaagacaacagatcatagagctgtggcatgtctgccatgtctccataatccacaggacacaattctacctactgttcaaaggtgaccaagccgatcaaatctacatggaagtcgagctaagacggttaacttggttagaacaacatctagcagaagtaggaaacgcaactccagctcgaaactgcgatgaatctgtggtttctctatcatcaaggtaatgaatgaatgaataactctcacttggaaaaatgttgttgtaaaagtttcttcaactaatatggtcttgtttcgttttcagtataaaagcattgagaagagagcgagagtttttggcgaaaagggttaactcgagattgacgcctgaggagagagaggagctgtatatgaaatgggatgtgccattggaagggaaacagaggaaacttcagttcgtgaacaagctatggactgatccttatgattcaaggcacgtgcaagagagtgcagagatagttgcgaagctagttggattctgtgaaagtggcaacatctctaaagagatgtttgagctcaatttcgcagtgccttcagataaaagacagtggaacattggttgggacaacatctctaatcttcttcacctatgaagacttattgtgtgtttatgatttgtaaaagtacacgacacttctttgtctcctctgaatttgattaaataagctttaccagactcgtctgattatgtttaatatagtggtctagatttcttaaaccttgtgaggacaagcttgctaaaccctcaagtccaactgctaaccaaaagttgtccaaaacactgcgttttattggaaacaacgatgtgccaacgtggcatatttggaagactctcctcgtctttttcgctggacaaccatataattatctcagctactaaccaacaaataaaaaatcaaaatattatttaaatgttaatgttgttctctcgaatcattccttaagaaagattttcactttccaatttgcttcactgtcttgtcgattctgcttctccaaaaaatttcttctttagttctgagtttttctctgttctgaaaaaccccaaattttgttttttttggccattcaaaatttcagaagaaggcgatacaaaatcgtctttgaattctctttgtttatgatctgttcaagtaaaggaacggtcgtaattgctactagaagctcatttcccagattactaaaccggattcaaaatcgaaatgatgttccgattagtgtcatagctactcgacgatcatca

SEQ ID NO: 10062 - DNA, 3000 bp, Unknown
  misc_feature (1)..( 3000): cDNA_ID_3443632_gDNA_ID_2213622_Annot_ID_195758 3000 nt of promoter + ATG
ccagaatttaaggagcatcgaggtaagagaagtagatgtaacacgggatacttatattagtatataccacatgttatgcatgctttgtttgctaagttctagcaatgatcaacagatctctgtagaaaaagttgctctcaagtcatctgaagtgagagatgaagaaatcagaagagcagttgagatggccgatgctttccttcgggctggcagggagactctaattatgagcagtcgtgaactcatcacgggaaaaagttgttctctatctcaaatctttatatatttgtgtcgttggtataaaatcatgactgaggaatatcatcattaacgggtctatattcattttgacagcatcttcggaaagtcttgatattaacagcaaagtgagctccgctctggttgaagtagtgagccagatatcgaccagacctcgttatattcttgctaaggtatttagcttctatatttatctttccatctcataaacttcctgacacactctgtcaatccccagttgaaatggtaactgttctatgatccaaagcctttcgatttttttttatgacactgtaacgtcattgtttagggtggaattacgtcatcagacacagcaacgaaagccctgaaagcacgacgtgcacttgtgattggtcaagcccttgctggtgttccagtatggaagttaggtccagaaagtagacatccaggggtcccctacattgttttccctggtaaatcttaatttgtattcaaaacatttaactgaataaaaataggtattcttaatcaactctttttccttatatgtaacaggtaatgttggtaacagcacagcgcttgcagaagttgtgaagtcttggtcagtggtagcaggacggtcgacaaaagagctgcttctggtgagtatccttctcgttctctagcttcatatatctcttctcatattgatgttgtctttctatgtaaaacagaatgcagaaaaaggtggatatgcagttggagcatttaacgtgtataacctggaaggaatagaagctgttgtagcggccgcagaggaagaaaatagtcctgctatattgcaggttagtgttctgaccaaaagtggatttctgatatacaatagcaaccaaagattaacattctgttctgagttgttcaaagatgtccgacacaaagagatttgataactgaactttttttggctaccttttttaggtccatccaggtgcctttaaacaaggaggcattcctttggtttcatgttgcatctctgcagctgaacaagccagggtaagtggctttgtaactgtacgttgattctgcattagatacataccaaaattttaggcaatcatgtacttttgaactcgctctctagctttcatctgtggtttttcggaatagacattgaaatcaaaacttaatagctgatcctaaatacccagtacatgggtctgactctgagccccctgattaatacgcacaatgtggcaggttccaatatccgtacactttgatcatggaactacaaagcatgagctattagaagctcttgagctagtaagtttgagatctctatcacttatgtgcaatctctgtgtcatcttttacttattcttatattgaaaattcataccaaatcgatttcttgcagggactagattcagtgatggtagatggttctcatctttccttcacagaaaatttatcctacacgaaatccataacagagttggcccgttccaaaaacattatggtggaagctgaactaggccgactctcaggaacagaggatggcttgactgttgaagactatgaagcaaagctcaccaacgttaaccaggtccttgttggttttaagccccgataaatccaatctctcacctaacaaatttatgttgctaaaccaaactacaatttattattatgagttttcaggctcaggaatttatggaaactggtatagatgctttggctgtgtgtataggaaatgtccatggaaagtaccccaagtccggtccaaacctcaagcttgatttacttaaggtgaattatattcttgtgctgactgaagtaagttctatgagtttgtgtcattcttattctaactgatcaccatgtatgtaggaactgcacgccttaagctcgaagaaaggcgtttttcttgttcttcacggagcttctggtttgtctgagaaccttatcaaggtatgagtcgatcatgtttgaaagtttcttgtttggtaatagaaaactaataaaatcggcgggaaattttttcttttgatggagatcttgatatgaatttaactgaattaacgtctttgtgggctatgaaaattgttgactgaatgagatcaggaatgcattgagaatggagtgaggaagttcaacgtgaacacagaagtaagaacggcttacatggaagctcttagctctgggaagaagaccgacattgttgatgtcatgtccgcaacaaaagcagccatgaaagctgtgatcgcagataagatccgtctctttggctctgccggaaaagcttgagttgttgataaaaaaatgtccgatcaattagttaagtacaattgtacatcacatccaaagaataaaaaaacaacaaatattacatcacatccaaagaagatgaatgcattgtatgcaatgcagatgcagtgttgttggaaataaagaaatcatttttagtactgtttaactgttttttttttctttttctcagtcaaatatataaatagaaactaaatgggcaaatatttaattgttgttatcggataaaactactaattattcatggctataaaatcctcgcaatcttcgccgtttatcttcccgttccccgatcaaaaatatcccaaactctcacacacattctcttcattgggactcatattcttctttcttttctttttctttcttttttcgtgtttttattttgctatctccaagtatttatctttatgacttgctttgttcctatcc

SEQ ID NO: 10063 - DNA, 3000 bp, Unknown
  misc_feature (1)..( 3000): cDNA_ID_3035160_gDNA_ID_2213622_Annot_ID_195757 3000 nt of promoter + ATG
ttttcttttctaaacttgattgagacatagtgcgattaaagtgtagaatgtgattaatacgatagagtagagtagagtagagagaagaaaacgcacatggacgaaggatgggtctgattgtgaagagctgggcgatagggcagagctcgagtcacgacgctacctaactcatcattagacatggcttctccctccgttttgtttttgtttttcatttttatactttgacatcataataataaatttatagttcatctgtttttagaaattccaaaagccaaaaacaaagattacataacataagtcggtaccatgaaacaaacaatatatcatatcaatatatatacagctcaatagttgtctggaactctggatacatttattcatttaattaaaggaaaatttgttagttgccacttttttatacagtatgttttttaatcaaggttttctattgttaaaacaaaagcattataaaaaaacatgccatgtataatcattactgtagatttggtattcagatgtagacagataaattcatgttactcaatagattaacgttataaatttaattaataatttgtagtcgattaagaaaattatatagacttcatatgtgtacattatacgtatacagtaacacacagattagtatcaatttttaggctttatagatgtaagaataactatatcaaattttgttgaacattattagtttttatgtctggtgtatatgtctatatatgtggctgtatgtttacttgcgtatatgtatttgtcgctgtcagattttaaaacagttcaaattatgtgatttgatttgtcaagtgccctggactttggactctacttgttttgttgtttatcgctcgttttgttggattaaaataaattaaatcgaatccatttgatgaactgtcatatggtttagtatatcaataattttacaacacaaagtcactaacactcggataacattattattatactaacacatccattagctagaagcctagaactaaagtgaaaaggggatcttaattagctatcgtcaacatatttaaatcagggaattattattaattacattatctgggagttggaatgtcaaaatcttgacaggaactaaaaagctagcttccaaaaacgttagctattaaattctagctaaggagtaacatatacattttaacagtctttttaaaaatatataactgagatatgtgtatcataaactggagtttgcaaactagttgttcgtattgtaacgttatagttaaaatcttccatattcaggtgcactaatttacatgtttatgactaagtagaagataaaaatgaaaattaagaaccataatacgaccatttataaatctggagattagacaatatgttggtaattaaagagttgttggaagttattagtactattatttggatttcatagtacatatagatcagttataacctttagttgaaataaaaacgttaccgaacatggtctgattaatttccaacaaatgaaaacctagctgataaagacgtgaaataaatatagtagatcatcagaagaagagtgttgccacgacagccgatgcaaagctaagtccaccgaagttgatggccggggctgagcttgttggcttggccgtcgaaggagctgcatttccggttgatccgcttcctgttcctgcgttttaataagaataaaattacattaataatccaaaattttaaaaacttagttttataccacgaaaaatataattctcgtataaaaccctcgcaattcgatttaaatttcaaatatttaaacttctatgtattcataccggtactggtggaagatgccggaggagttttcggggttgccggcggtgttgaagacgaattagtaccttcgttaacacaaaatattgtcgcattaattaggctagatatataagaaataaaaacggcgtgacattaggctaaattaagaaactaattaaaacgacgtcgtagtatggtttattcaccggcgctggttttgcatagtgacacgtcagctttggcgccacaagccttggggagatcgagagcgttttctttagtgaggttaagcgatttgagcatatcaacgttgttaaagacagcgcagagacacgtggcgtctttggctacgatctcattcaacggcatgcaacacgtcgccggcggcggagtcgccaagtgaagatacggctgacacggcatcagtttctgaatacacggcagtgagtgtgcgtctcctcctgcaccgccgctcggtggtgaagtcatctgagcattagacgacgtaacgtagcaaaatacaagaacgacggcgacggcgaatctaacagcctccatttcaaaacgttaaatatctctttgtattatgttctttctatctttagttggttgtgaagatgtgaaagttgtaaaacatgcgtgtggtttatatatgtacacaaggtggttataatttttggtttttgaatttaatccagctcaccagcctgatttttcgagataatcagtttctgatcctatcattatgcattggaaacgaagactaagctctggattaattagaaaatcgttacatttattattacaggagttgccaattttaagagtttagatgtttgttcatatagaaagtgtaatgatatggtaccttaaatggaatgatatcatatatgttttctcacctaacacaatacaacttcttatcatttttttttaataaatatgtataatgtacgattactatttctttttgatcaaaaaagttttgcttttggcagataagttaaaggctaaaaggctgttggatatggacttccacgtaagagcctacacgatgtaacgttacattaatctcaatttgttaaattatagtatcatatatatatatatagagagagacagagagatgcatatgaaattggtttgttgactgtaaattacatcggagaattgtagtgatcggagaaa

SEQ ID NO: 10064 - DNA, 3000 bp, Unknown
  misc_feature (1)..( 3000): cDNA_ID_3443646_gDNA_ID_2213622_Annot_ID_195756 3000 nt of promoter + ATG
ttcctttgaacagaaagaacgacatcgataaaataacactttcaagttgatgtatcataccagattctgagagagaacatcgaggaagcgaccctctatgtcatcttttagcaacaacggaatatgattcttgtaaatcctgaaaacaaaatatacacaagacaatttaattctgtgacagccatggtcaaaatatgggcatgtcaatttggcataaaccttcagtgatatattcaatgggcctaaatgaggagctaaaaacaaaaactatttttcttccagatagatttggtaaacaggaaaccctggtgtagttacaacttacttgcaatagtctattctcaaaacttccagaattagactattcagcttatttttttccgttctctaaatgtgtgtatcttaaagatctactactacaagaaatgttctcaaacctgtgattaataacagtcctactatcaaaagacctttttattactcataacaaaaggaaagtccatgtagcataaagcataccatgaatttccagcagcattggaaattatgtcataaagtatccatggatgcacacccgcctgagaacctaaagatatagcctccacagcagcaacaagatgtatgccctcaagcaactcattcaccattttaactttactggttcagaaagaaaaaaacaatgacatcaattggttttctgtaatgccggggaacagttagaatagtcaaaggtgtttttacacatattatgaccaaaggtttctcatagatttcatgacattaaactcagtaaacaagttgagcattatgatcccaatatgactcgtgacgaggaaataggcagtcaaacacttagaagttgtagtgatcacgagaaggttattctggaaagttgcataccttccagcaccaatttctccctcaaaggtgtacagattttgacacattgctgaatgaaacaaagagattttctcagaaaacaaaatgaaaattcataacgtctacatctggagagggtctatacactagagttaagttttaccagtaagatagggttgtgctcttgtgatcgaatctgaccttccagatgctattatcttaaaagttgaaaagaaaagggttactataagtacggtgacatgcaacttttaacaatgaatggagatcagctagcaatagtactccaccagcataacaaactttgctagacaagagagtatataccattagttttccatcaagaagctcagacatcccttttaaaacataggcatcaactacaaaaatctgctctcttttctctgcattggaaacaaatcccaattgtcacgactgaaaagcacaaacttcaaaatacggtgttgaaaggcaaaccatgcctcaaactcagagtatcaaattgaaacctgtaagttgtttctctagtttctggagttgcaaagtcgatattgtcgaagacaaaagcaatacagcgtccttctgtagacctgcgaagaaatgacgcatacagtctcctacacaataattctgagataaagttcataaaatatgagctaaagaatcttcaggattacctttcataacaccctcatcaccaaaaatgacatcttgaatttggtcagggtgggatagtacaaccacaacggctgctgcagctgcttaattaaaaacaaagacagaggagagaggaagcaaagtaaataacatgacacaagacagtatcagaagtaaacagagtcatgaaacgaagtagcaatacaaacacaacaagacggtttgcatgtacagagtctaatgctggatatcaaatcaaatgctctgaactcatttccatgtatcttagtgtttcaaatgccttataactaacaacacactcagatgctgctatacctttcccaacatctgcagggctgtcacatttgtgtcctcccaattcaatgaacttctccactaattctgtacttatctgtcgaattagatacaacaatttagcttccctccttattttttccaatagacaaagcaaaaaaaatcaacaaaaattccacactactaatcaaatcaatttcacgtgtgtagtgaatgattgaaataaaccagtaaaacagctgaattcccgagagatagaccgagtatttcgaaattactacagaacccacaaatttcacatgtttaattccgaataattgaaccccgatcaatatgatatttccagaacatgccgatccccagaaaaaaaagaaaaaaaaaaaagaagaagaagcaacagacctcgaatgcttgaaccttaaacccagaacgaagaagcgaagaagctaattcgaagctgaaagaatcaagaccaacaaacccaaccacgccactcattttctccgatcactacaattctccgatgtaatttacagtcaacaaaccaatttcatatgcatctctctgtctctctctatatatatatatatgatactataatttaacaaattgagattaatgtaacgttacatcgtgtaggctcttacgtggaagtccatatccaacagccttttagcctttaacttatctgccaaaagcaaaacttttttgatcaaaaagaaatagtaatcgtacattatacatatttattaaaaaaaaatgataagaagttgtattgtgttaggtgagaaaacatatatgatatcattccatttaaggtaccatatcattacactttctatatgaacaaacatctaaactcttaaaattggcaactcctgtaataataaatgtaacgattttctaattaatccagagcttagtcttcgtttccaatgcataatgataggatcagaaactgattatctcgaaaaatcaggctggtgagctggattaaattcaaaaaccaaaaattataaccaccttgtgtacatatataaaccacacgcatgttttacaactttcacatcttcacaaccaactaaagatagaaagaacataatacaaagagatatttaacgttttgaaatg

SEQ ID NO: 10065 - DNA, 3000 bp, Unknown
  misc_feature (1)..( 3000): cDNA_ID_2714705_gDNA_ID_2213622_Annot_ID_195754 3000 nt of promoter + ATG
cggccaaaaactgtaagaaagtcaaatatatttttctgcttataatcttaccgccttgattcatgctttttcactgaattaagaatatttagtttctaaatgacctttgtcacaacaaaaagtcacacttagatacacgcattttctatttgtaattttctttgtttggtagagcgaaacataaaacaaactaaataagctgttctcataagggatgaatctgattaattatcgagtttgacttgattatatgaaaattaattatgtagcggccatatatatgtgcattaatgaattagtgttgttgaaacgaaaaccttactttttgtagtttaataagttaaattatatctatcagataaagtcccaataaagttaagaaacgacaactatattacgaagagaaagaagatacacacagttgtacacaaccagctaacaaaattaattaatacttaatcatcacttaatccctaaactaatacaactatatatataagcataattataaagccagcccattcttctaaacgtctttctctctttctatttctctttctctttctcttgttcgtctactctgatcacaataatgggaaacacatcttcatgcgcaccattgatcatatcaacaaactcatcctcaggagtggttaaaatcttggctccattcaccggaactcttgaagttttctcaaaacccatcaaaacctccgacatcgtctctagacactccggccactttattaccgactcaactttactccaaatcagccaccgagtcaccgccgtgtctcccgacgaatatttacggccgagacgacatctctacctcctcctcccgaccgacatgctcttctctgtcttaacacaagaagaactttctctcatctccaacaaagccgcggagacactcaacaaaagccggtataaccatttgaagagaatattcccggtctgcatatttccgatgaccggagacagaagaagaaacccatcatcagttaatgaagatcgagctcatgatggtgtggaaataagagaaaccctagatgagaaggtactatacgaatcaaaacatggatcttggaggcctaaattggagacgatcgtggagagctaaatgcctaaaatctcgaggatcattaaaatactatatatataaacaaatcaattttcaaacgtagacgagtattttgttcttttatttttcctgattttttgtccgactttaaagagaaattgaggcttatatggttttgttcatgatttgaatattcgtgtagataatttagtgattcaattgtgtaattataggtttatttaatttatactggacaagaattggataaaaaggatattggtcaacgaatcaaagaattgggttttttggtaatccagattttaggtacagctattttggtatttggtacgtatttatatatagtatacatatattttcaactttggtatgtatactttgtcaaaataaataaaaaacacttaatgaccaaaaaaaaaacactatggtacgtatatatgtatatatccaaattttaattaaataacctttagaattttattggaactattcgcagatactctgaatataaaagatatcggcagccaattcaataattaaaagaggataataaaaaggacctgcgcagttttttggtagtaggccaaaagtctacctaaactaaacctatacgagaataacctagattgattatttcattctcatccatcataaaattttcatatccaagcaagcttttaccatttatcaaaaaaggatataaaaggtaagcttttaccatttaaaatttttaaacattaaaactttagaaaatactttataaacatagacataaaaaaaattgataataaatgttctattaatcctgattataaccatctttatgagaataagaagtaaacttttagccattttttggggtcgtattattactcttagtaacctaccattcaacatcattgatagtagtttgagtttcaattatcaaagaaaagaaaaaacaatgaataagatagaaaacttgtagtgtaatggcccatggcccatttataagttttttcagcagtaacaacaacgtttgggcttctagaagaaagcaacaaaatgtgactatgtgagtcgttttatattagttgagataaatgttgataaaaaaagaaaagaaataaaaaggcatcgcctaataccgtgtttgcgtcagggacgagtttgtggatgaccacactctcttactactaaactaacaaaaacacttgctcagcttcttcacgcaccgttgatgcgcgtatctcacaccattcctgcattttcttctccgtgtctgtgccgatgtttttttggtggtttacgagttgaccttattttgttgtctttttgtaggatatctaagtttgatttttctttgacgaaaaaacattaaaattctagaagataaacaaaatactcgtgtttattttgataagtgggaatacgtaaactgctcatttaatagtgtaacatattaaaggcttttgtgtcgattttgattgtttatttggttattaccattagtgaaaccaaaatttggaatccattaggaagagttgtctcattaacgaatctcaaaatacagagaaaggagttacatttcagattccaaaccgaacaaaaccgagaactcaattacaataaccgggaaagttgagtcaataaatatgtatactttcgatttagcaagttgattagataaaaaaaaaaaaaaaatagttgaagcgcgtgggaagttccatataaaaatagtcctaaaaccaataacgctcttaacaaattcacatctccctctctcttatccatttcctctctagacttccttaaatcgattctcccgaattcgagaacagagcctttttttctttaattccaactctttctctcttgttctgaattcgtggttcgtcggtattataaaaaaaaacatg

SEQ ID NO: 10066 - DNA, 3000 bp, Unknown
  misc_feature (1)..( 3000): cDNA_ID_3035172_gDNA_ID_2213622_Annot_ID_195751 3000 nt of promoter + ATG
tgaatcgtcagatgaatttcaatagagcatatttctgatcatacaaaaattctacaaaaaaataataattgcgatttgggtcacccggaaaatatccagacccgtaatatcacaagcagtcggatctaaagactttcacggagaaaagggtgaccgagaagctgcgacgccgtccacctctcactcgattctttacggagacaacagtcaacaaaactcctaaactcgtcggaacatccttccggcgcacgcggtggttctccaaagcacacgacgcacattaacgtcgcccagtcaggtctctgtccctgaggaagcaacggaaaatgtccgacgaagagctcaagtatcatcactccgaaactccagatatcgcctgcgtaaacatcggagttttctccggcggcagagtcaaatctctccgggctcatgtaagcgcaagtgccgacgtaggaattgcagtaatctaacgatcgggtaatgattttgctcactccaaaatcagcgattttaacttcgtttctcgagtttaagagtagattcgcaggtttgatgtctctgtgaacgatcttgagtgagtggagataacttaaacctttcaaaatctggcgggaaaatcccgctagttgtttctccgtaacggcgccgcggagagattctaggtttccaccgtccatatactccatgaggatcgaaacctctccgacgattggtttctcgaagatcccttgacacctgacgacataaggagaatccgtgcgacggaggatctccatctcgcgcgctaattgtcttgtgaaagcaggactcatgtcgccgttgactgatttcagagcgtatatctcccccgtggttttgtggtggactttgtatacgatcccgctgcttcctcttccgagaacgtggagtttctcgacatcggaagctgagattccgttgttgatgacgggggcggtggatgaggcaaaggagaaccaggggaggtgaacagagagcggtgggacagggagacggaggttgatttgacggcgtttacgaacaagagccatggaaatagaagagagagagagagagtgatgatggtgatcgaagagtgatggaagttgcagtttttatatggagacttgagtgggatttaagtgaggagcctgggaagctaataaatctttccattaaatgttaatcactcttttttgttctttatcttaattattatttgttgagttgtatctaaaaatggcaactagtgtgtctaccgtttatgtttatcttgcacgaggttaaatgcatgggactgctatctgtcctacttacccggaacctggctatagtggcttgtgtatattgagataaatctacgcaataatgattagatttatatacatttaaagagtttgttttagtgattttgaatggtaactcaattatcaaagtttgttacagcctgtatcgtgataattacaaattacaaaggcgttataaaagcgttacttttaacgttttgcattaatgattagatttatatgcatttaaagagtttgttttagtgattttgaatggtaactcaattatcaaagtttggtacagcatgtaccgtgatattacaaattacaaaagcgttataaaaacgttatttttaactttttgtactacttatttatatagttttgcattctaatttacagctaaaacaactttaaagctttgtgttacctatcagaatcgttatcttcacattcaaacacataatccattgttgttgaaaaataataatactttcaaaacatttattttagtgatattaatttgacttgatagtaagattattatttactcataaagacattggtggaatttagttatataattttcatatactaaactataggagattttaaagtttaatgtgaatttgtgaggttcaatgtacctcggaggctaaggacttctaatgaaaatgaccaaacaataagttatatttaggccatcatgcaaaagctttccaatggccatcgccattaatattgccaagttaattattaatatgattttagtaaaaactatgattagatcttcagattcttagtggacagtcacacatgaccctacggattacaagtatttagcatgtcgattgtcatgcgcgtatatatccaaagaatactgaataaaaataatatgaagtcaatcaaatgaataacaatcaaattatatgaagtcaatcaaacctttatgaatgtgatttgcttctttttccaaccaaaaaacttgtttgtttatttgttagttgttactcccaaaaaaatgtagtaagctttttatgccccatgtattatatatcaagacgatctccaaacatgactatagtttcataggatggattggatatcaggacatgtgtgaatttactaatttttagtattgaaacaaacaacatttcaaccaaaattttttaccattaaaattaatatatcgacgtccgatagtataaagcttgaataaactgaatttcgtatcagtagccagtttgaaaaataaatttgttccttgagattttggtgttcttttccaaaagaaagaacaaagaaaacaaaaggcccttgtaaaaggcggtttagttcataaagaaaactgggcctatctaaaaatttgaactaatgccatatttgggcttagtaagcccggcttacgatacgacgtttatagtcggatctgattcggatccaaacccgtttgatggatccggctcctaccaaatcacttcagatttctgtataagctaaaaatccttgaatttttcagtaagttactatagcatccgagaatttcattctttaactctggttcgtaatcggaaaactcaaagacctgttgtgaagatatattggagaagaaaaaaaaaacgatttcccggcactgaaatagcattatcagatctcgttcccaccgggaagatttcccggcacactgaaattctgacttggaatcgtctgtgaaact

SEQ ID NO: 10067 - DNA, 3000 bp, Unknown; identical to SEQ ID NO: 10060
  misc_feature (1)..( 3000): cDNA_ID_3035180_gDNA_ID_2213622_Annot_ID_195748 3000 nt of promoter + ATG

SEQ ID NO: 10068 - DNA, 3000 bp, Unknown
  misc_feature (1)..( 3000): cDNA_ID_2714731_gDNA_ID_2213622_Annot_ID_195746 3000 nt of promoter + ATG
tgatatgtggttataataactaaccagtattttaatagattcgatttgatttatgatgctcttcgcaccatcaaaagatataaaattctactttggcaaagttatgttatgctctgttgtttcgttaatcatcccgctcaagttttaacagattacaaaatccatctcaggtgcatccgctgcggtcgtaggattaatagctgcgagcatattttggtatgtataccatcgtagaaaaacaaaaagttacagaaattcttcagcattgcttccaagaaacatctcatcagatccatctgcaaagtcttttgacatcgagaaagcagaggaattattagtcggagttcatattttctcttacgaagaacttgaagaagccactaataacttcgacccatctaaagaactcggtgatggaggctttggtactgtctattacggtaagcttaaagatggacgaagcgtagccgttaaacggttatacgataacaacttcaaaagagcagagcaattcaggaatgaagttgagatcttaacgggtttacgccatccaaacctcgtggctctctttggatgctcctcaaaacagagccgggacttactgctagtgtatgagtatgttgcaaacggcacgttagctgatcatctacatggtccacaggcaaaccctagctcacttccttggtctattcggctcaaaatcgctgttgaaactgcctctgccttgaagtatctccacgcctccaagatcatccaccgtgatgttaaatccaacaacatccttctcgaccaaaacttcaatgtcaaggtcagtaactcacactggttattactcaatctggtgggattttatcggatcataatcttaacttctttctgtgttttttttactgttttcgacattttaggttgcggattttggactctctagactgtttcctatggataaaacgcacgtatctaccgctccacaaggaactccgggatatgtcgacccggattaccacttatgctatcaactctcaaacaaaagcgacgtgtacagctttgcggtagtgttaatggagcttatctcttcacttccagcagtcgacatcacaagaccgcgccaagagatcaacctctcgaacatggcagtcgttaaaatccagaaccacgagctccgcgacatggtggatccgtcacttgggtttgacacggatacaagagtgagacagacggtgatcgctgtcgctgagctggcgttccaatgcttgcagtcggataaagatcttaggccatgtatgtcgcacgtgcaggatacgttgacgaggatacagaacaatggatttggttcggaaatggatgttgtagatgtgaacaagagtggaccgttggttgcacagtctccagatagtgtcattgtgaaatgggacagtaagtaaaattagtcgcacggccactaacattgtatgtgtttattatttgtatgtttaaaattgtcagttaacagttagagaatggtgttcgtgttctgtattagatgatatttttgggaatgtatataatgatgatcttgttccgattccacctagagagggaccgtaacatacaaaacttcgtgattgggcctgaccggactaaatcagcaattttgtattgctatttgctgccaactgaaactatttttttattagtggttaattttatttttttacggaaaaggtaaaaatatttgagacatcaaaataatgatggtaattaagtaacgccagctcagcgacggcgatgactatccaccaatttaacgtcagaagaatatatatatgtatattgagcttatcttctgtttccaatgtaagtggaaagtccactgctgcaatcacaatgtaagacctgcatctatgaagttttaatgaaagacactttcagagaaaaaaaaaaaaaacttctgtttccaaaatttcctaattaaagcacaccaatttgggcatggatgctttactacttctattaatgaacaagttaaagagtaagttgtcttgaatgaatgaaattgcatgtgaatcaaatccctccaccatacataatagataatctatagtaatggcccaactaaacattgacatttgttgcaacctaactctttcctaaaaggaagaaaaaaaaaaaaaaaaaaaaactctttcctaaaactcaatgtgtttgatcatcacaaggacaaacaaaggaaatctctagtatgccgattaaagtgaaaatttgtcttcaccaatataaataatttggtaacttaaactttaactaaagattcataaattggcgtcaacttatgtaaaagaaccttcatatatactttcgtttatctccctatatttttatacatacacatatttatagtatttttgtcgattaattggcattggccatttggaagttataattaagttggcaaatggatgtgatctcttaccctatacacctacataaaaaaccctccatgcaaaacattaatggatgttttcattaaaacaagttttgatatcaacttagtttgactagctacatccatttcaatattttcttcccaatattaataataaatttaaagatagaccactagttcttaacctcacaccaaactgactagaaatgttcttcccccttgcaaacagagaaagcctaatggaacccacgaccaaacattggtcctacttttccttgtttggacatatctccccgacacacaaatcccagaacgttcacttgcccacgtggctctccctttatttctctctttttctttcttaattttctccacatttctttttctaaaatcataaattaaattaataaaaaaatccaatcgaacaatataaaagtctcaagttttgtatcaaccagtctaaagaagttgtcagaaaaaaaaaaaaaaaaaagtgtcaagaagatcatatctcaattcattatattatggcaaatttcgagaatctttcttctgattttcagacaatagccatg

SEQ ID NO: 10069 - DNA, 3000 bp, Unknown; identical to SEQ ID NO: 10058
  misc_feature (1)..( 3000): cDNA_ID_2714739_gDNA_ID_2213622_Annot_ID_195744 3000 nt of promoter + ATG

SEQ ID NO: 10070 - DNA, 3000 bp, Unknown; identical to SEQ ID NO: 10057
  misc_feature (1)..( 3000): cDNA_ID_3035192_gDNA_ID_2213622_Annot_ID_195743 3000 nt of promoter + ATG

SEQ ID NO: 10071 - DNA, 3000 bp, Unknown
  misc_feature (1)..( 3000): cDNA_ID_3035196_gDNA_ID_2213622_Annot_ID_195742 3000 nt of promoter + ATG
tccacttctgctctatatgctgtgaaagtctaccttgttctgtatggtgtataatttgagaagcactgatgacactttattgtatttctagcggtggaggatccacaaccatttcaccggtgcatgatggttatgttcttcagaaggtacttgtattacacgatttagtaagaattcagctttgtgatgctgtttctttgggtttggattttgtactgcaggagaaagtttcccatctctcgtttccatagtcatctgtagctgctataaattctcatccatgtgaattatgacctacagcattgatgtagattgtgattctccgattgttgaccatacttttattcgcaggctgttgtatcgtctccacttggaggggaatttctcactgactgcctactgaaaagcttggagagtaaaggaattaaagtaggttaaaaaaattcttcactgttcttttcttttaagccaaattatctgagtgatactggttattttttctgcagataagacctagatactctttcaagaggaaggaagtacgagcaggggaattccaggtgcatatgtggatcagtgaatgaaactactagcagtgaatagtctctaatttcctccctttgaatccttgcaggttgaagatgtggatattcctgacaccacggaaagctacaaactcttctgccaggtctgtaattgattatgaaacttcgtttgaaaatttcagttgtgataatttggtgatttgtttcaacagaggatgatagtgggtgatatcaaggattccatttgtcgagttcctgatactccctatgacggtaccttatgttattctgtctgtctctggtttcataaatttgttttatttcaaagtttaaagttgcttgagagttgaacgttagatactttttatctttcaatgtcatttgatcgcatagccttagtttttctgatgtgatgcatttatctgcagataaatcatattcaaacatccctactacgtcgtacgagcttcctgatggccagtaagctcagtttatatgtctatttcggtttatttgtgcctcaaatgtacatgctactgttgcttttgttttctacgtataaggtttgagcttagtttctagccaaatgtaccactgctctgaaccttgtttaagctgagataagtgcttagttggatctgagtcattaaagccattgggcataaaagtttagaagagtcagacattgctttggaaacctgcatggaacctaatgttcataatgagaattaagttaaaagaaaaagtgctagcttcattgaagacaggaagctgcacctgtaatttttgtagtctttctcaatatcttattaaccatgtctgttgaaggacgctcgagattggtgctgataggttcaaagttcctgatgtgatgttcaacccgtccatagtccaggtacaccatttgagcacgataaattcaacagaagattctgaagacattttgtttcttatcttgagcgttttgagcctcgaattatttatcaaaggtttcttctccgtttttattgcaatttgcagacgattcctggaatggagaagtatgctgagatgattccttccgttcgtgggttaccacacatggtatatgcatggtatttagtcattgcaaagcttccatctcttaactttttctaactttactctccattttactgacttgtacaggtcatggagagcatcaacaaatgtgatgtagacatccggagagagttgtatagtagcatactggtaaaatagcaatcaatgccaactcttaaatacccctacttttagtttcgttggatgtggatgattaacatttcctttcttctcgcattatgccagcttgctggtggcacatcgtcaatgcaacagctgaaagaacgtctcgaaaaggacttgatcgaagtattgtgtcctaaactcttttcctctgtctttaaagctatcccagtttttatgatggcgaaaatcattcattggtccctctatctttgtttcaggagtctcctcactcagctagagttaaagtgttggcaagcggtaacacaacagaaagaagattcaggtctggatttagtgttcacttcttcctctataatgagacccaaatttttttgcttggatcaaccaacaaacatgttatgtatgtgcagtgtatggataggagggagtatattggcatcactaggctcatttcaacagatgtggttctccaagtctgagtaagtctctgttctgattttccattaatcagactcgcaaagaaactatagtttgttttctctcctgacactcggatttggggtcttggtgtaaatggcaggtatgaggaacatggagcttcctacattcagagaaaatgcccttaaagcaggcagtttcagattatgtggagtctgacaagacgaaacttggaaactaatgtgttattttcattgtgcatcgttgttccttgaagattattagtattccgcctgaaccttttagaatgagtgtcattaacaagcattatagtgctattttaaaaacataaaaacatgtggaagaagtttcgttgctttattagattttcgcacaatcaagaccgtccacgttttgttactacgaaccaagataatccacaaaattaacaagaaaataacaaatccgaaactacaaaaagcagcttcataagttttctttttcttttttaaaaaagaagaaaaaatcagctttatcgtgcctctcaaaaagctaatgacttcgaagttccaaaattccggtcttcgaacatattttatagaatagcaaaatgttttgaaccacaagattattaataatataaataatgtaattgatattggtaagtaataatacttttattaatcataaaatggtctgaataataataaagacaaaatggacgtaacttctccgccactacagacttacgtgtcatgtctccatatccgcatgcaaaatccaatagatg

SEQ ID NO: 10072 - DNA, 3000 bp, Unknown; identical to SEQ ID NO: 10054
  misc_feature (1)..( 3000): cDNA_ID_3035216_gDNA_ID_2213622_Annot_ID_195737 3000 nt of promoter + ATG

SEQ ID NO: 10073 - DNA, 3000 bp, Unknown
  misc_feature (1)..( 3000): cDNA_ID_2714711_gDNA_ID_2213622_Annot_ID_131993 3000 nt of promoter + ATG
gaagggttctatgggtctgattggcctatacaagcaaaggtgaagcgtaaggagatgtcttccgctgatgcacattatatctttgtgcgtgagctgcgttttggtaaagcctatgagacatctactcaaagaacttgcatggaagggtgtaatcagatagctggatttgtgcattaccggtttattttagaggaagagatacctgtcctttatgtgtatgaaatacagctggaatcccgggttcaaggaaagggactaggagaatttttaatgcagttgattgagctcattgcttctaaggttgattccaaaattagtctcttatattcctatttttcgatattgatggcattagcttctgttttcagattcatagcctgatgataatattgttatgttcgttttcatcttctcagaatcggatgagtgcgatcgtgctaactgttctaacatctaatgcattggcaatgactttctacatgagcaagttagggtaagaggtacaccttttggaagatgatcttatttcatgtaacaactcagatgatattttttgcaagtgttcatgggttcctaatatttctgtttcttgctgtagtcagtcatttctatttctcgactctttactgatattggctcgtccaaacatctgaattcccattcgtttttatacagatacagaatatcaagcatttctccctcaaaagctaatcttccggtacagaatcagtagtcttatttttcattattttgtataaggcattcactaaaagaacttctacaattttttgtgtttgcagactctctcggtgaagtatgagatactttgcaaaacttttgattccgaagctaaatctgtgttggaggtttgccctttcgctgcaccactcacatttatgacaaaactgctgatctaatataatatgtgagtgcttcttttgctttttatcttggtattgtattattaagactgctatgattgctttattttgcaagaagaatgatgaagaacctaccaaagattgagtatcaagcatggaatagcacatatagattcactgtaagtttccactttggtctactggagatatcagcaatcgtttattgtttagttttctgaaaaatctgttgcttgaatctgacagaccacagaggggtgtgataagatgcatttagaaaacagacgaatccgatgaagacttggttcctccaatgacttggttcacaccagaggcagatacagaactccaacaatgcctagcaactgccaaattgaccattttgaaacctgagtcctcgcaacaaaccagtcgtttgcaaccagcggagactaaatttggtaagctgtgagtacttctaggctttcttaaccttacggggagattgtgcagttatatactaggactaggacttagtagagtgagaacaattgttgaatttggttttgatataatgaatcagagagatatcttttcttttacaaaattgccaaaagtattgaatcatgagtgcttgaaccttaatttattgtagatagacaaatgtgagatagaatatgaattgcgtaacatagaaggacttaaggacctcattatcatataattaaattgaggaaaagatcttgttcttttttcatagtttggggtcagaaagcgatcattttaatttaaaacatataatgtatatatcaaaaatgaaacaaaaagataataataaagagaggaatggggtgatctgtccgtatcaaaattgtggctctaatagtttgtgtgattaagaaatatagttgtcacatccgacaccatgtgatgcgacttgatttgcccattatcccaaccattttataatcttttgtcatgaacttttctttcatacagttttataagactaaagagatattttgaaatcgaattactacataatacatatcaattactcaagtatcaaatcatctaattaatcaagtgatttttttaactcaagaataatgtatttttccctttacaaaaatcgaaggttacaacttacaaaactgaacaatgagactagttttggcctttttgggggcaaaccggcaaagagtaatatcacgaaagcaagtggaagtcagagacggatcggaaacacacaaaaaaaggatatcttccaaataatcacaaaaaaatatcttcttcataatttgctaacgtttcacattttttatccacagaatctttttctgtacggattagagaaacagatcagattctttgaagaagacacagcgcgtggtgtacactagcgagagtgagtgttagctttgttctgagccacaagatatctctctctcagtgtcaaccttctcgaaatttccatgaacattaaataatgataaaaatctgaatctgacgtggcacatctctgctatttaatataaaaaattggtcacttgctatttctagtaccttctttctttcttcactctctcctgtctcctcttctcactgtttcctatttcgtaattttctcgagaaatcgtcttttcttgtttacgctaatttgatttctcgagaaaaaaaaaaggaagcagaagaagattcttattttatctttacactgttcagaaatcttcggtggacggataacttgcagagttctgattgaggtttctttttcttttccctgttttctcttggatcttgtttcttcatgtgcggactatacaaaaaactgattcggtgaaattaatcagctttatgctctgttttgttcgctttcaggctggttttgtgagaattatagttgcagcaagaaagcgtttcagatattttttaatggccgctgaggtaataattgactagagattgatgaattaagagtagttattgacgcttatagaagaagtagattctatatgaagaaagtttctttttttggaagaacttgaagtaaaagccatttaatttcatttcttgtttccacttcaggatcgaagtgaggaactaagcagcaatgtagaaa

SEQ ID NO: 10074 - DNA, 3000 bp, Unknown
  misc_feature (1)..( 3000): cDNA_ID_2714708_gDNA_ID_2213622_Annot_ID_131994 3000 nt of promoter + ATG
atccattgcagatggctcaggaagctgacagtagaagtgaaggatcggttaaagcgattgtgatcccgcctcctcgtccaaagagaaaaccggcacatccttatcctcggaaatcgcctgttccatatactcagtctcctccaccaaatttgtcagctatggagaaaggaaccaagtctccaacctcagtgttatcatcgtttggttcagaggatcaagtcaatagatgctcttcgcctaattcgtgtaccagtgacatccaatccattggtgcaacttccattgataaaaagaataactacacaacatccaagcaacctttcaaagatgattctgacattggttcaacacccatttcaagcattactcttttcgggaagattgtccttgtcgcggaagaatctcacaaaccatcctcttacaatgatgatgatcttaaacaaatgacgtgtcaggagaatcactactcagggatgctagttgacactaatttatctcttggtgtatgggaaacgttttgtactggttctaatgcatttggctcggttacagaagcatctgagaacttggagaaaagtgcagagccgataagttcttcatggaaacggttaagctccttagaaaaacaaggatcttgtaatcctgtaaatgcaagtgggttcaggccatacaagagatgcctatcagaaagagaagtaacatcatcattgacgctggtagcttcagatgaaaagaaaagccaaagagcacgtatatgctagttttagccattgtacagtttggagtcaattttgatgatccgtgaacattgttttagccatttgctgggtgacttggatcatagcattccacgaaccaaatcctaaatccgagttggtaagtggttttacttgtccgccacatgtaattcttgtaatgaagtttctcctgctgtctcacgttaagaagacacttctttttttcttcatatacaaatcagttttaacagtgtatttgtttggccaactattcctagctctgtttcaatcttaggtctggtttatgattattagccttaagaccagtcttaatgttaaaaggtttttacattaagcagattaatatacgagtgaaacttcaaactctgagaattgaaacattgtgcaaagggaaccccctaaatttctgtggacacttgcttaaaaattggagccctcaagtctaattcacttacttaaatattggagccctcaaagtctaatgaaatctatgataaataacaacaattgaagtatatgcaatcaacacaagccttgcttattctatattgaaaagtgtaattctagcttctatctccctgggttcaggtgatgaactgtatcactatcacagaaaagaagcagcaaaaaaatctcagcaatggcgtctgttagatatctcactggtttatgtatgcctatcaaagaacttctctatgagtacagagaaaattgcaaatccagcgcaacctatacacgcagcttttggcccacctgaaacaagaccaatccattaagtcctcaagaacacatgtatcatgtaagagaaatcaaacctctacgagattacagtttgggaactaggccgttgcatattgataatgaatctctaagatttaaattccatgcacagaagataataggtcttacctcgggcggacattgaaccaccggtaacacatccagctatagcggtgtttacagtgtcatgcttagctcttgcctttttcagagaggtaaaccaaaaaagtcgataataaggttttgaagttacgatacatgagttagtagtggaatttccttgtttttcttggtcaataaacaaggtattaccttttcgacaatgcattctgcagcagagaaaaccaaacccataactgcaaatgtcttacaggaattccaactcctttgccccatttgttttgccgtgaacacaaactgctacctagccgtcatagtatcatgcgtaataggattatctaatgcccccaggaacaaacccatcatcaacccgagtcctcctcctacaccacaattcacacagaatgtgaacaaatcaattgaatatccttcacatgtctaactgtcatatcaactctacaaccggcgagcatttatattagtagctttataccttttagagtatttataataatagattcgatttgagatttcacatcatcaattcacctaaccaaatccgattattaagtgcaatctgaaagtgactcaataaccagctcagaagcatatcaccattagaaagctaatcactttaccaatttcactattctcaaaccaatcaaagtacctagagcttttagcatttttggaaaagcaagagcaatggagcaatatagatcgagaaagagaggatatttgaactgacccatgactccactagttacagcacgaacggcgcagttgttccaaacctcttgagctcggatctcctcgatggttggcatccggatcggttgaatctggtagagttctcatcagaagccgcggggggagaagaagcaccggttgttgtttcagcagcactcgaatcagccatttcaaaggttaagagagtaggatccgacaagggacaatgtcatcaaaagcttaaaagaaggggattgtacgaatcagatcaagcgtgttcgttcgcgtgcctgtgagataaaattaatcagggtttatcccgaggttctagggtttaagctacagctagctaccactttaggcccattagtctacattttgggcctgtacactcgagccttactaaggtccaatatatgtatccaattaggttttgaggatatcaagatgtgccacgtggcatattgcttttcgaaagaaaaaacgtctacctagttcctacatatgcatgccgcttcaaattccccctccatatatgctgctctaatctcttttcaaaacaaccaaagacagagatcagaaacatcaaaaatcaaagagcgaaaccagagcc

SEQ ID NO: 10075 - DNA, 3000 bp, Unknown; identical to SEQ ID NO: 10065
  misc_feature (1)..( 3000): cDNA_ID_2714705_gDNA_ID_2213622_Annot_ID_131995 3000 nt of promoter + ATG

SEQ ID NO: 10076 - DNA, 3000 bp, Unknown; identical to SEQ ID NO: 10064
  misc_feature (1)..( 3000): cDNA_ID_3443646_gDNA_ID_2213622_Annot_ID_131997 3000 nt of promoter + ATG

SEQ ID NO: 10077 - DNA, 3000 bp, Unknown; identical to SEQ ID NO: 10063
  misc_feature (1)..( 3000): cDNA_ID_2714698_gDNA_ID_2213622_Annot_ID_131998 3000 nt of promoter + ATG

SEQ ID NO: 10078 - DNA, 3000 bp, Unknown
  misc_feature (1)..( 3000): cDNA_ID_2714694_gDNA_ID_2213622_Annot_ID_131999 3000 nt of promoter + ATG
tttcgtagccatagatggacagatgaagctatatcagaaacgtttggtgtcgtctgtttggtgtcttattaagctgtaagtaacggaaacgttttattttatttataggtttatgaaacccttgctggaattaaagtcgaagggagacttcctgttctgaagaaacaagacctactgaaatctcttccagctgaatggccttcagaccctacaactgacatacatagactaaatatgggaaactcgaagacattggttgttcttgatgatgatccaactggcacacaaactgttcatgacgtagaggttttaactgaatggttagccttgcatctttctctatgaaaaactgaacttatcgtgtcaacaaaaaagatatcatgaatctttcactgaaataattggcaagtcgctagcctagaaactaatggaaggaattgataattgcttattgcttttccctacattttgacaggagtgttgaatctatttctgagcagtttagaaaaaagcctgcatgcttcttcattttgacaaattcaaggtccctgagccctgagaaggtcaagacaatttttattttgtgtaatctacttattgcagagtcccaatttcatggaacaatgaaactttatttttacatcaacttcaccaatgccaagctctaactgcatatttcatcaacaggctagtgaattgatcaaagacatctgttccaacctatgtgctgcatcaaaagaagttggcaatgctgactacacgattgttctgaggggtgattcaacattacgtggtcattttcctcaggcaagtttggtaaccctatcatgaaatagcagactatcatgtcaatgttatgatttcagcttggcatctgtttctgtcataacttgatattatgatccacacacaggaagcagatgctgctgtctcaatacttggggaaatggatgcatggattatttgccccttcttccttcaagggggacgttatactattgatgatgtgcattatgttgcggattctgataggtatgtctttgtgagcaacgtgtgtgtgtgtgtgtgtgtgtaattttttcaaactttcagaatcagggaaaagttcccttcagaggatgaagattgatggtcttcattttgaatattgcaggctcgttcctgcaggagagacagagtttgccaaagatgcatcctttggatataaatcctcaaatctccgtgaggtcttaattcttccaacaagggaatcatcttatgttatttgaccctttaagaaattaatagtaaggaacaatttgatatgatttcagtgggttgaggagaaaacagctggcgtcattccggctaacagcgttcagtcgatctcaattcagcttttaagaaaaggtggccctgatgcagtgtgtgagtttctgtgcagtttaaagaaggtaaatttttctaagcagatttcgcgacgacttctggatgttgctttccgtgaacttttggtcttcatagttgtggaatcagttagtcccagttgtgtagaaagtcttaactctatttccatttcatatgtaaatcaggggtctacatgtattgtcaacgccgctagtgaaagagacatggctgtatttgcagccgggatgatccaggtaagccgcccaattattcttctagtctttttagtttttgaggcatattcaattagaggatacatttatttttctcttatattcttggtcccttcgttcgattgaacattatatttggcaggcagaactgaaagggagatcctttttatgccgcactgctgctagctttgtgtctgctctaatagggattattccaaaagatcctgtgttgccaaaagatttcgaatctaacaaagaaagcagtggtgcactaatagttgtaggctcatatgtcccgaaaacaacaaagcaggttagattatctactaacaacactaatttctttgatatcttctcaatgaaataaaattaaagagccctgagtcattttcttctaactaacaggttgaagaacttcaatcacaacataaccagaatttaaggagcatcgaggtaagagaagtagatgtaacacgggatacttatattagtatataccacatgttatgcatgctttgtttgctaagttctagcaatgatcaacagatctctgtagaaaaagttgctctcaagtcatctgaagtgagagatgaagaaatcagaagagcagttgagatggccgatgctttccttcgggctggcagggagactctaattatgagcagtcgtgaactcatcacgggaaaaagttgttctctatctcaaatctttatatatttgtgtcgttggtataaaatcatgactgaggaatatcatcattaacgggtctatattcattttgacagcatcttcggaaagtcttgatattaacagcaaagtgagctccgctctggttgaagtagtgagccagatatcgaccagacctcgttatattcttgctaaggtatttagcttctatatttatctttccatctcataaacttcctgacacactctgtcaatccccagttgaaatggtaactgttctatgatccaaagcctttcgatttttttttatgacactgtaacgtcattgtttagggtggaattacgtcatcagacacagcaacgaaagccctgaaagcacgacgtgcacttgtgattggtcaagcccttgctggtgttccagtatggaagttaggtccagaaagtagacatccaggggtcccctacattgttttccctggtaaatcttaatttgtattcaaaacatttaactgaataaaaataggtattcttaatcaactctttttccttatatgtaacaggtaatgttggtaacagcacagcgcttgcagaagttgtgaagtcttggtcagtggtagcaggacggtcgacaaaagagctgcttctggtgagtatccttctcgttctctagcttcatatatctcttctcatattg

SEQ ID NO: 10079 - DNA, 3000 bp, Unknown
  misc_feature (1)..( 3000): cDNA_ID_2686953_gDNA_ID_2213624_Annot_ID_132001 3000 nt of promoter + ATG
tagaattcatagatatacatgtgtacatacgtgactttgtgacgatatatcgttttaatttgttaaattttgatcccttctcttaggtatgcaacaccgtaagagatgtcgattgagaggtcgaaactacgtaaggccagaagttaaacaacgcaacttctcaaaagatgaagacgatctcatcctcaagcttcatgcacttcttggcaataggttcgtattcattcttcttattctttaattcaatagtaatgtgaacggtacgtgctaataatcattttgatgttatgttttttcagatggtcattgatagcgggaagattgccaggacgaaccgacaacgaagttaggatccattgggaaacttacctaaaaaggaagctcgtaaaaatgggaatcgacccaaccaatcatcgtctccaccatcacaccaactacatttctagacgtcacctccattcttcacataaggaacatgaaaccaagattattagtgatcaatcttcttcggtatccgaatcatgtggtgtaacaattttgcccattccaagtaccaattgctcggaggatagtactagtaccggacgaagtcatttgcctgacctaaacattggtctcatcccggccgtgacttctttgccagctctttgccttcaggactctagcgaatcctctaccaatggttcaacaggtcaagaaacgcttcttctattccgatgagaaatggtgtatttgtttgtacacatttgttatattacaaatgcacatattataatattcactagagagatggtataacgatgtttgaaatatgttaatcctgaattggaccggctggtcattgaacaactattctcttaaatgtccggttctgttttcagtgattagtattatagtagatcgttaataactaaccgacgataaccgctgcttatttgatcaatcaagctgtaagaaattatagctaatacagcaatgttaacggtgcacattgacgggaagtattaattaactctcttaaaatggacaagtatgttcattttcctccaaactacactttactctttattcaaaagcaatttcaaactctcgtttcgcacaaaggaatctataaatacgaaaattacttactaaagatataaaggaagcaaattagttaacttataaaataatgaaatgtatcgatttaaggatgtcttaagcatggagactatacggtcaaatatgcaccaactagtacaaacacgttcacatatattttgaacaaaactcacaatgaatttgtttaaagtatcttcatacatgcttaaaataaaaattagaaagtaaatacatttgtacaaccgctattcaaacatcatcaaatattaaacaaaattgcatgaccaaagaatatgaatgtttgacaagtatagaagaggagattgtttgctaagaaaatggaccaatatttatcatcgaaactacaatcatcattaaggttgtttctacgattgcgggatctacaaccatcaaagaagttgtttccacaactgtataaactctgatctcaccttcactttcatattgttccgcaagtacaactacaccataaatttcagaaataacggtgagtattgtggttaatggagagttgtgtgtggatgtgcaagcaaaaatcacatgcctcatcaaacacttcaaggttattaatcttcatctgattcagacgaataccctcttctttatgtagatctttttatttttgcatatgtccaaaaataattatgaaaccagccagtcaaacttgccaaaaatgtctaaaagataatgttgtctatttttcaagttgctatcggttgttatgtaggacgcagaagtcacgggcatggacgtcggccgatatgatgtggatgtcgtggttgaacctttcttttgttaaaccgagataacttttcaatacaagactgtcacaaactatatgtaagtcatgtttataaattttaatcaaaagtatactaaactgtggtaaaacagttttaagaaaattataggtcccaatttgtatacatgcttcaaattatctaaaatgttgttaaaattcgatctaccgggtcatgttcgaccgttccatttgcaggctatataatactcaccaaaattatgttaattgacataatttttctagaacatttttgctgtaagagatattaaattttcttacacatacaaagttatttttaagggaaaataaaacatgtaaagctatatttagttaattacaaagaagattttttccatcttttaataaacactagggtaagacagatcatatactagaaacacatgtcaatacaatgcatctaaaggcctggaaattttatcttagtttcttttcaaatagaaaaaataactaatttgactatttattaccatttaagattacataaataatacatacagataaatttcataactccaacataaatttcaacacaactataaaatacaatcatataagatctactttacaactaagcacacaacaaaccattttcttcaataaatagaaaagtggatttttttattgaatttaaaagtatagttcatttctattatacagttttgatctaatataaatgataataattgattatttttttgacaactgtatcattttctcttcaacctctacttgcaccgtgaatctcgctctcaattatctagtttgttctattgtattatttaaatgtatcacataaacttttatctaaaaatataaagccagtaaactaaaaagaaaagaaaaaaccatttttagagttagataaaaagtttaaaacaaaaaacactaaaaccaaaacggtgtcgtaacagcgacttatcctttttcgccacatggcttcgttggatacataaaagcgatagagacgcatctctgagtcagaagcgagccagcgagagagagagagcgagtcacaaaaattcgaattttaagccgccgtgtgagacggcgtaatg

SEQ ID NO: 10080 - DNA, 3000 bp, Unknown
  misc_feature (1)..( 3000): cDNA_ID_2714376_gDNA_ID_2213624_Annot_ID_195788 3000 nt of promoter + ATG
agagaggagagattacgggttacatataatcagttaatcacaaatattaaagaaatgtgtgtactgtgtactacagtttagcgccatttgtactgcataaagaccccccacgtacatacatacaccaaaccagagagacttacattagaagaaaaaactatggcaacctctgcattcttacaaagaagtagaacatcggaggagatgaatcaggtaagaaagcctctgtaaatcctgtctcacaagttttcctcttctctaaaacaaataaaactgtttttgctcttctctggctcgctcgctctaggtcttatcatttacaaattcttatgtactgcagatatacgaccatttctcttctaataacttgctgtgacctgtgattccctgaacctctttattttttaatcttcaagcattttaatattcaatattaatgtttaattctgcagcttcattgcattgtgccattcttaatttgttatatattactgcgtcaggggttgactttaggctaaggctaccttttcctatatatatcattgtcatgatcatcttgttaacttaattagggttttagacattaattgcagttctaagtttaacttaggaccatcggtggtaggaaagagcacaagcctcttttttgttcctcttgccgtcgtatatatatgtcttctcaaccgaatcatcagacttcaatatcaagtttactccatgatcgcttgcatatccctcctgcagaaacaatcgttgagaaagagtctgcagagaaggacacttgtcaatcacaaagaaaaaggaaagaaccagttttgcatgaggttgatggctcaagtagtggtgcagcaaagaaacaagaccataacgctaaggagcgtttaaggaggatgagacttcatgcctcttacctcactcttggcactcttcttcctgaccattcttcttcttcttcaaaggttttgttttcactgttattattacaagttaggtatgttctgcttgttgttgagctatatataacttttcttgctgattggcagaagaaatggtctgcaccatctataatcgataatgtaatcacttacattcccaagctacagaatgaagttggagagctaactctaagaaagcagaagcttgtggagttagagagacgaggtccttctattcgagcaatctcggttcttgaattgggggaatcaggttatgaggctgttgtacagatatgcttgaagaaagaaaacgaagatgagttctccaacttgcttcatgtaatggaggtgcaaggtttgagtgttttaagtgcttctacttctcaagtttgccgagagcaaagggtggtttgctacaacttccatgtcaaggtactgtgtctcatcttatcttcttcatttctctttagtttatgttttgatagaatggagacaatgtgctagtcttcatggatatgaacaatgatgtaacttttcttctccaaacaatacatgtttagggtccaagtcatgggaggattgtgttttaactttagctaagcattgagattatgttaagattatataacgtttagaaaagatataggactaatggtttatcattaagttcataaaccaatggtttttgttcttaagatatattgattctattggtgggagagagactgtttcgacctcaatgaacctggatttgagtgtagcattatgtataaagagggatgatttacatatatttgcatgtattatcaatggctgatcctagatctatggaccaaaaacactaaactaaattcaaaattagtttttagcaattcgatagtatggcactaaaaagtcattggatagtatttacatatatacattggatgttcttttttgagagaactaacaattgcaaaatgtatatgggaaagtgtagatggatgagaagccatgtgaaggtgatgactacatcacagtgttaaagaacaacatcatttcttcgcttcgtgacaacacaaagtgcaaatgatatatagtgaggtatagaatcaacagaatatctttgatgatgcatatcgcaacttataatattcctcttcttgcttagatcatgtttggtttcgtgttgggaatctcataaatcatatatagatgtagaagttatgtttatctccctatggtaaacctcttcttagtatgcctcaagatcacgatttacatgctctagtacccgatccgagaggattatctaccaaaggcccataacttgtaatccaaatagaaatttctttgcgaagctaaaactcaagttttccaaaacaagttgttagaatgccgactaaagtttctttatataggtttaacaagaaatgtataacctaaagatttgatcccatggcataaaaaaaataataattaaaaacatggaagcaaaatatatacaacagatagactatgatcttgcagtctaaaggtgagaccactctttgatggaccacaacctcaactttccgaatcagccggcttttgtttcaggagccaagagaaagacacaacaaccaaatcaaaaatgacaacacggctccaaaagaatatggagtttggcaaggcttacctttgctataaataagttgagcattggacttgaaataactttgtctaatgaattcttacttgtattttataagacgaaaacgtaaatcttgcattaagaattcatacaaattttcataattgataaaattcttacattatcgtactagaaatcggaaatgcattccaccattatgcgtgttagtactaatcggagttttaacttgtactaaatttaacaaatatgacggagagagttgaaagcttatcacaatggcatttaccgttttgcccttgtcgttgtaatttcaacatttccaatttcttaacgcctttactgacatcgaccccaaaaagaaaaaaaaaaaagaagaagagtcaaacctgagaatctcatctctctctgaagtagaagaagaagaagacgatg

SEQ ID NO: 10081 - DNA, 3000 bp, Unknown
  misc_feature (1)..( 3000): cDNA_ID_3013579_gDNA_ID_2213624_Annot_ID_195779 3000 nt of promoter + ATG
tttcacaagggggaaactggaagagctatttagagattcgggatgtgttgcgaagctgaggatgaaaatcggatctaacggcgaagaggcggcgccggctgtgacggataataggaattatgtggtggatttgtatttggagagagatattggagatttagaggtggcgagtgaggcgatattgaggtttcctggagtagtggagcatgggatgtttctgggaatggcgactacgttgatcgtcgccggcaaatttggtgttaccgtcaaggataggtttggataaaagtgtcatttgaaaaccattagggtttatggtttgattttgattttcgatggattctctctggttctgtaaaccctttcctcctattggtttaaaactttgacttattttttaaaactttgtagaattttgacttttggaggctgtttactgcattgcccctgaccttatagtattcactaaattgccccggaactttttcaatctacaaaacgccaggaacttttacgattttcttaaaaagtccttgaacttctgatatataataaattgccccggaagttttgatatttaagaagtattactgttttgagtattttccagaacttctgatatatatactaattgtccgaaaacttttaatattcaccgagtctgtcccaaaatcaaaatgttcgagtctcttcattggtgtttcgggaatatttgccgtcactgtcaaatccattacgcttatgttactggactttgtggtgtagtttcgtgaaagtaaacgagcaagatacaaaaaaaagaaaagcataatgggcctttttatagaacaatgggcttttgggtataaaattattttcaaattgcatcgaatgcaatttgacaacaatctatatgttggcagccaaacctcatcaacaagggtatatattgctcaacttgcttcgtttgtgtaaagtggattcgtttcgtgtcagattttagtttcacttcagaatattcacgtaacatttacagacttatagggtaaaattttaagaaagctaattcatatgccattgtagaccagcgcgaagaaaacaatttaataaaacaaataacatgatatgatattatataatattcatctagatcttcatattctacatgaaatatgtggttaggtagactcgataacaaaagaaattgaaataaaagacacttttttcaaatattttaatgggagaacaaaatatcatgttatgggttgtttttggcacaaagcaagaaagttgcatcctcaataaaaacagatctcagacattttgggttcacatgatcctctcacatgcttcctctcacgcatttgaacactcttgactctaccaaataacccactccaatggcatgttaatattttatgaatcacaaccaaacatatatcgactttaaaaacaaattagtatcttactttaatgttagaaagaaaaacttttcatataagagatacacttttttcttttcgtattaaagataaaagtagagacgtatatcaaataccaaacccaccactcatacacattaaagtgattttggtataaaaactgttatcagcttctttgtaatatagctctttgttggttgtaaaatgtcctagaatagtttcataaaaatgtaaggcattggagtgagacactttaatagtttaattgcccacgtcaaaagaaaacttttatttccgtcgatgtggagaaaaatgttgccgtcactaggaagagtctaaaaagtcttaagatcacataacccaaaccgcaagttatggtaaaattcaaagtcttaaagtcaggtccgaaagcaaatacttatttaaaaataccctcttttcctgcaaattactttgaaaaaaatatatataaaaattctatctcacgtaactcttgaaggcaacctacaataacactactcatgtgatagaaaaacgcaatccatgtgaaaataatcatgtcctaaattcaacctatatcagtaaaaaatttggtcaaaattaagaaaataaacgctattttctttaatcaaacaaacgccacacatccaacattagttactgataggttgtagtggcgattgttaaacttgtaatggcgattgaattagatattcaggtgaattgtatagactatagacacaaaacaatgcatgattgatagaaactaatacaaacttatggcaaaatacataaacccatagtaaaaaaacaaaacacatgactctcgaataataatggtccaatcaatgtagcagcgtcccgattaaaggaccacgtggctacagaagatacagccacaagagacaccgagacggaagggagggacgccaccaccacgttaagtttatttagatccatcgagtcgagtcccctagtgggacccacttgtactcaatgtgcataatcaaattaattgaatcttaatttttaaacaaccatgctttaacagaattataaccaaatcattaattgtcaataaaaatctttatatttttattttaccattttaatttttaaaaattaatttctttatcttctctcagatttcttcctatataaacccaatacattaccagtttaatacctaacaattactcaattagtacaagttgttatacaactaaatcttcatttgttaaatcatctttactcaaattgaatagtagtgtgcgtgtgaaaacaagaaaagtggaaaaggacaaaagagagagtaaaggacgcctcctaataaagcactcttcttccttttcactttcctcattgaagagagagccaaattcagcttaaagccccataagcgtaagcgtaagcgcggggataaatctctctcttcctcacctgcgttttcgtggagcatcttcttcaacaatggctgcttctccgatctgatcatatcctgatttgaattttgctatctctcatgcctcgaactcgttttgtcgacgtagcatcctagtgactgaggaagaagaagaag

SEQ ID NO: 10082 - DNA, 3000 bp, Unknown
  misc_feature (1)..( 3000): cDNA_ID_2686576_gDNA_ID_2213624_Annot_ID_195776 3000 nt of promoter + ATG
gtatttgacggttctttttagagaagtaaagaccattttaaaaaggttaggctaaattttatagatacggaaatttctgaattttgaaaagattatctttaagtattgaaatatgaatttaatacattaaatattttaccaatcaggagcccaacataatcagaggccatgccacttggatatgactaaatggtgagaagagaggcatgatttttactatctagcaaaaacttacttccattcactcatttccataaaatcggatcttgattcttcaacgaagccaaaatgatttatcttttctctgaaactataattaaaagattcacattccaagaaattaacacgtttttctgtaagttccacgcatattccaatcgcatctctctaaagcagcctttctccaccattggatattatgacggtccatatctttgatttcttttgtttaaaattctataacaaaggtcactgttacgttacgtgtatacatatctcatctaaaaccatgtgaatacgatgatgctctatttaaaagatgatttaggccacgaaataagatcaagcaagtgcacggttcatgccacttttggtacaaaacttcttaaactttgaattggtaatactccaccaacactcaccaacacacaccattgaagttcaatgtatttgataacatcacattctttacaaacaaagttgacatttaactttagatttattgcataccttggacagtagtctcaacggtgagtttgaagaagatgacaatgtagaacgtaagagacaacagtgcaaagatgtgttgccagaatagaagtgccgaggcttctctaacagcgtaacctcttagactcgcgatggctccaagtaaaatggcactcggagtcgaatactgcaaaagaagcacaaacttgaacattggatctgctgaggaaatgagaccaagtttatcagctgacatcacaatccctattcccactaacggaagcaccaagagtcttgcaacacttattccaatcgtagtacgtaacccaagagttgattcatttggtccttcagagagcataccaccaagtacaagcatcacagagggaaccattgcacttcccattatattcaaactatctgtgatgaaagaaagcggagcatcatacccaaagacaacacttttcagctgaggcactgatccgataatgatcgctaatagagatgcgattgttggaggttgaagtatgtgtttgactggagtctgttcagccacaactcttattctcctcattactctaggctcagccaagcattgaatagacctagggctggaactctctcctccatattctcccccgagatcaacttcaggaaaagaagtctgagagaaactagatatgctgttgaagactctagcaataaaaggtgtcttgcaatgttctgtctctttgtcctcaatccctggccactcagcttccactagaagaggcctactagcatcatgattctccacattgatctcctctatctcaaccccttcttcctcaacgacctcatagtactccaaaggcggctccatcatatgatacacaacagtataaacaagaatcacagcaacccattgcgcaaacgatacatacgaaacccctctcgagttacaattcggtccaaaagggttcgtcttcgtgtgacacaccgagctaacaatagctaacaaaagattcccagtatttccaaaagcagtcataacaatggtgaatctattaaactcaggaggtggtctgcatatgaggactaccaagtatcctatcaaggacccaacgaccgcactgagtaacacgttgaccggtataaaccaccattgaacaatgttatcaagagtaatgctttctccaagctcagtgaaaatcaaacaaggtaagaacaaagcaaacacaagcttgcttaagagcctaaacgtggctcttgggactaattgagtcttgggatgagcaagaagtagaccaatcacggttaaacagataagcttcaacaaaggcacaacaccactgagtatatccacaaccctagaattaacatttccactggagaaacctgacatctcgatctcactatgtaaagctcgaagtcaacgatagaaaaaaacacaagaagatgaccaaattggtgatttaaaccacaacccaagtaattgaatgagaagaactatacacagcagtgaagaatctgaaccaggaaatagaagaacactaacaaatcaattagaccacagtcgtgaagatggttggatagagataaagccgattagagaacaacacctggagctacacaatacacatggaacttgtcaatgaagaagaagacaagattgcgatgacagatgcatcatccacgccaaatctactgattgcaataattttgtatcttgaagtttcttcttgatttgaaaattttgtatttatcacatcgtgcgaagaagataatctgtggttgaacgatactgtcaaagattatccattgggctagcgacaacacgagtctaaaaaagaagcccaattataagcccattaatgcgtcaaaatatacaaaccaaacactagcggctgaatgatcggtcatttccggtttaatattaaatcagaacaagacgacaaaagggaacgcttggcttgagatttgatcagtaatcgcacgtgggaataaaatagctgccgcaaaccaaacagatccacgtggaacccaaaaccagacatactaactcgtgtctgtacgtaattggttaagaagattaaaaagcatgaatcggcgggtaccggatccaaaattctgatctcggattcgtcttctctgccctaaaagaaaaaccctacgtgagctgcgtcagttctgggtcctccgcaatttgagaatcggagatatctcaagtttcgcaaagtctcgtggatttgatcttcgtctccttgatcgatggattcaccttgagcaatcgttgatcgagcttcgaagatg

SEQ ID NO: 10083 - DNA, 3000 bp, Unknown
  misc_feature (1)..( 3000): cDNA_ID_1393962_gDNA_ID_2213624_Annot_ID_195772 3000 nt of promoter + ATG
gaaaaatatctattggtttatagtactgacgaatcagtgctcttttataactagtcaaatttaatattattttgctctcctaccgaatgaatacacattttttttatagtttctataagctctttaagttttgttctgataaattatactaagaacatcatcaaatctaatgattaattgatagaaagttattacccactaactatataattatgattgcttttctaccactttggcctagctaattgtgctctgttcctttaaactattttattactctgctaatgattcgaatgatttaagtttttgaatttctctaactctgtcacacactgatatgagttaaatcattgtgaagtacagaaattccacagagacttgcctgccacgccagtgttcgcatatggtacatcaaagcgttcagcaacagttcctggaccaacaatagaagctgtttatggcgtcgacacctacgtgacgtggcgaaatcacctccctttacatcatatcctcccttgggacccaacaatctctccggcaatccctaaacacggcggcattcccacggtggttcacttgcacggaggtatccacgaaccaactagcgatggaaatgcagattcatggttcaccgctggtttcaaagaaactggttccaaatggaccaaaaagactacacattacgtcaacaagcaacaacctggaaacatgtggtaccatgaccacgcggcagggttgaccagagtcaaccttcttgccggtttgttaggctcttacattctccgtcatagctcagtcgaatcgcctcttcggttacctaccggacgcgaattcgatcgtcctttggtcatctttgaccgatcttttcgtaaagatggttccatttacatgaacgctacagggaacaatccaacgattcatccacaatggcagccagagtatttcggcgacgccatcattgtgaacggtaaagcatggccgagattaaccgtccgccgccggaaatatagatttcgaatcacaaacgctagtaacgcaaggttcttccggttcttcttctccaacggtctcgacttcattgtcgttggttccgattccgcttatctagcgaaaccagtatcgaccaaatctgttctcctagctccgtcggagattgtcgacgtactcgttgacttttcaaagtcaacatcgaaaacggcaattcttgccaacaatgcaccttatccttacccgtcgggagatcccgtcacggaagagaacagcaaagtcatgaagtttataatcaactacaaatcagaagttgacacgtcgattattccgaagaagctaattgaataccctcctgctcatgtatcaacctccacacgtacacgttacattgctatgttcgagtatgtgtcaagcattgacgagccaacacatctatacatcaacggtctgccttacaacgctcccgtaaccgaaactccaaaaatcggcacaagcgaggtatttataaccaaaatttcactattcactaaccgtatagttcaaatctttaatgcttacaataatgaaggtgtgggaagtgataaacttaaccgaggataaccatccgttgcacattcacttgggattgtttaaagtattggagcaaacggcattggtgaagagtgaggagttcatagagtgcatgactaaaagaaacgatgccgtcaagtgtgagattagcaaatacgcacgagggaacaagaccgcggttacggtacacgagcggggatggaaaaacgtattcaagatgatgccgggacatgtaacgaagatactcgttagattttcttacattcactcaaacgaatcttactcctttgacgcaactcaagagccaggctatgtttaccactgtcacgtaagttggtaaaatactaaaaagttgatgacgaatttagctttttcttttagaactaactgtatgatattggcattgcagatattggaccatgaagacaatatgatgatgaggccctttgcaatggtgctataattctaaaacgaaaacaatttacaattacgagtgcagaatacaaacgagttgatatagattgagatttcagattacataaatatcttatacagaaagtgttaaaagataattcgattggattgatgttatatctctatcattgtttttcacttggcctcggagattagaagcagcttgttaatgggcttttaacagttacgggctttaacgggcccaataacaaaactcttttgcttcttatatgattttggagtagatggtaagtgagatagggaagtggtgagtgaaattagaaaattcctcgtatacaaagtcctaaccaccagtcaaattcaattgaatgctcccatgtttctcccttatctgttcctgaacctacactctttaatttcatggtttcctattttctcttaatttgtttattttcatgtcatattcggaagcttcagatattttatcaaataatgcatccaaataattttgagccactagtcaaatatcttcttcgtcttcttcttgcttaatatatattttagtgaatctattattgataccacacacacatctttgatatttcacaaaaggtatctatcggagccgtacatatattttacgaaaatgtggataagagcgagatttggattggtattggtaaggcaaattaaatgcgacacacttccacattcatgattccacaaattctaatggatttgaacaaatatgggaccaatttttatttgtttcaactcctaaatgtgggaccaattaacaaggttgatgtattcttcttgttcttcctcgttcattaatagtttgattgagcatgcacgcttctctcaacccaccagtccaagtcaaacctcctcaagccatcccctaatcctatatatcagtttcttctcgcaaaccacctcacaatctatcaacagttttaaaaaaagacataactcaaccaatctcactttgaaaaagacatg

SEQ ID NO: 10084 - DNA, 3000 bp, Unknown; identical to SEQ ID NO: 10079
  misc_feature (1)..( 3000): cDNA_ID_2686953_gDNA_ID_2213624_Annot_ID_195771 3000 nt of promoter + ATG

SEQ ID NO: 10085 - DNA, 3000 bp, Unknown; identical to SEQ ID NO: 5986
  misc_feature (1)..( 3000): cDNA_ID_3033680_gDNA_ID_2213624_Annot_ID_195769 3000 nt of promoter + ATG

SEQ ID NO: 10086 - DNA, 3000 bp, Unknown; identical to SEQ ID NO: 10083
  misc_feature (1)..( 3000): cDNA_ID_1393962_gDNA_ID_2213624_Annot_ID_132002 3000 nt of promoter + ATG

SEQ ID NO: 10087 - DNA, 3000 bp, Unknown
  misc_feature (1)..( 3000): cDNA_ID_2714418_gDNA_ID_2213624_Annot_ID_132006 3000 nt of promoter + ATG
gtcaaagattatccattgggctagcgacaacacgagtctaaaaaagaagcccaattataagcccattaatgcgtcaaaatatacaaaccaaacactagcggctgaatgatcggtcatttccggtttaatattaaatcagaacaagacgacaaaagggaacgcttggcttgagatttgatcagtaatcgcacgtgggaataaaatagctgccgcaaaccaaacagatccacgtggaacccaaaaccagacatactaactcgtgtctgtacgtaattggttaagaagattaaaaagcatgaatcggcgggtaccggatccaaaattctgatctcggattcgtcttctctgccctaaaagaaaaaccctacgtgagctgcgtcagttctgggtcctccgcaatttgagaatcggagatatctcaagtttcgcaaagtctcgtggatttgatcttcgtctccttgatcgatggattcaccttgagcaatcgttgatcgagcttcgaagatgtcgaatcactccagagatgagcctagtactgccccgaagacagatcaatggtatgatcttgtccttggttcctctgccaaagatgactcctcccataaattctgcactttgcgatgtgagtttctgattatgttaccattcttaattttgggttaattcgacctaaattggaatacatagaataagatgtttgataattgtgtacttgcagatgaatttaagccggcttcaatcgataagaacaggtcaggatcaatgcacaagaagaaggataacagagtttcagttgagtttcagaataaccaaccaggtaaacccaaggtgacatttgaaggtagtagtgaggattacaaagaaagcgatgcggtgttgtttttcgatggggagaagtttcgtttagagaggttgcatcgggctgttacgcagctgcgacatgttaggacacctggtgaatctgctgcggcttctcaatctgcggtgcctgtggagcatcggttatctcctgttggtcgtgctgctaaatctccacaagtcaatagaagtttgcttcctgatgtgcctgtgagtttccaaatgccttttactttttccttatccaatttgatgtgttcaggttttgtatttattgaatgcttgatggtataaaatgttgctgctactggtttaagtttacattttctgtaatgtatgcaggttgaggtggaaagaatcgaaattgggaagccagagaactcaggttagcagttattgaagtgatttattcatatgattatgcattttaaatcccatcttattgctatttttgttttgagaagtggattttgattcttggatcataggcaaacgtatcatagttttcattatttgttagtctctttggcttaagatatagttggttgattttggttgctagtacatagacgtctgatttccaattaaaactacagctctgttccccaattcgactactactttttagtagtcggattattccgtcatttcttaatgccgttatgagtactcggttctgtattggtgtagtcaaatgagactaggcaggaatatcaaactgttgattcaagtgtacatatccgttctactgttctaagcatgtatatggtatttctggtctttgttttaaaactattttaacagttttaaaatctaacataaaaagtggttgcagctgaacctgccaacactggaaacgtgcctgcaacctcaccagtcgaggacaagaacgatgatggagatgagcatcaagagatcgatctggttgaaatatttggctcatttacaccagagaacgacaatgcagagaaagagaacgctgatggtggagaatatgtagaaagcttaaataaacagcttagcatgacggaagaagagattgcagatgtagatgacgatagcggcggtgaaggagaaaaaggtcttaacgcagcagaagcacttagagcacaagtgaacgcagaggtgcaaaagagtcaaacctcaagctcaagcagtagcagtggaagtagcagcggaagtgacagtgatggtcgtagcaaaagcgtaagcagcggaagtggcagcggcggccaaagcagtagtggaagcagtagccgtggaagtggaggaagtgacgatgaagatgaagtcaactccgtataacaaccagctcccaacaactttgtcaaacaatatttccatatttgagacactttgtctgaataatttggttgaagaatccaaaagggtaaaaatttatgttttactacgaaagtagtaaatacaaatgatataaagatccagttactattccaggagtagcaattttccattttttaaaatccagaatctcgtgttataaagctgtccttattagttagtaatcttgtattactctttaattaattcaattagtaaagtaaatctctctcctcgactggttaaccacccgaccacaccacccttcacttttattttcactctctgtaataagcgcgtgaagaacagaacacgcaggtttctttgtctttttctacaagagcgtgtataacacgcgcctgaaattggaagtggtggaagaaagttagctattactgttaacaatggagttattaaaagtttgccaaagttttttctttttttctacaaccgaccgagtcggagatcgaagttttgaacctaagaatctcgttgtcttcttcttctgcagagcctccaaagtctaaatcttttggttacgtctctcaaaccccaacctttatactcactctctttctttttctctcttacctccattggcttcttcttgagatctcgtcaggctctgatcccaatctatgttcgatctcactctcaccgagatctcatcttcctccattttttcaaagatccatatatgagctctaaaaccacagatttcaatctgtgaatccgtatatatgctcaatcggagccagattctaacaaatcaaagaaaggaagaagaagtgaagaacaatg

SEQ ID NO: 10088 - DNA, 3000 bp, Unknown; identical to SEQ ID NO: 10082
  misc_feature (1)..( 3000): cDNA_ID_2686576_gDNA_ID_2213624_Annot_ID_132007 3000 nt of promoter + ATG

SEQ ID NO: 10089 - DNA, 3000 bp, Unknown; identical to SEQ ID NO: 10081
  misc_feature (1)..( 3000): cDNA_ID_2714406_gDNA_ID_2213624_Annot_ID_132010 3000 nt of promoter + ATG

SEQ ID NO: 10090 - DNA, 3000 bp, Unknown; identical to SEQ ID NO: 10080
  misc_feature (1)..( 3000): cDNA_ID_2714376_gDNA_ID_2213624_Annot_ID_132018 3000 nt of promoter + ATG

SEQ ID NO: 10091 - DNA, 3000 bp, Unknown
  misc_feature (1)..( 3000): cDNA_ID_2714812_gDNA_ID_2213625_Annot_ID_132022 3000 nt of promoter + ATG
tctccgacatcggtggtttctttagcaccgttggtcggcttcgttcttcaaatttagtttttgcctttcaaccttgttcgattctattttgcttcggttttaattggttttgatttctctttctcttcatttcgatctaaatttgtaatttttcgatcctcccttctttaaggggcttaatttgttcttcaagcttattgagttttcattttaaaagatcaaatttttagttacggattgaagtttaatttagtgtcttttgtttgattttgatgaaattagagctgttgtttgtctttcttgttgccgatgcttgttgaatcgtttgggtttatgttgtttttcctttaaatggcagaagtcgaagtcgatagtttgtgagctatttctttcttgaaggttttaaattttacagtcattgtcacagaagatttgtcaattgtctcatcggatttgtagctgcttccgatttggcgtttacagcaattccggtgaacttaagttttttgtggttatgattctccacctgcgacattctgcaactcatcattttctgtttccacgtgtcctctttaccgtgtctctagtgccatgtgggctttgacttattagcacattagctttctcttcttcagaaggtggtctttgggcttttgtccgtttatggcctgttatatggctttgtaaaatatggcttgttaaaaggctttgtaatataaataataaaacagttgtgacaaaaaaaaaaaaatatatagtttgatggtgattggtgaacttcttttttttccaagattgcagtaaacgtcgtctttagctccaaaaacaacctttgtcttgttcagctaatggcgatttttgaatggcggcacagaagacggccattcgacggcggaggaactcgtcgccgtcgtttcttcagcccattgtattcgagaaatttcaagagaacgattctcttcgctgtgattttcttagctatcttccctcctctctacttccatttcaagctccgacgaattcgtcagattgtcgcgcaaaagtgcgattggcttcaccatcctccacttgtctgtgctcacggcggcgattccaccctcgctttcccaaacactgtacgtacactctcgatctcttcttcttcacactcttgctactaacctttttaaaccttaatctcttggactcttctcaatcgtagatggacgcttacagtttcgctatacgttctcgagttgattgcattgaagtcgatgtttctcgttcctccgatggtgttttattcgctcttcacaacaggttacagactctgatccttgttgtatcatcttcttctaatgtttctgtgtttggattctcatcggtgttcttcttattcatcttctgatcacacgcacagtcagggatctgcagcgtattgctcgtaactcttctgttcaagttggagatctgagtatgaaacaggtctcatctctccctctctctctttaccagcttttgggatatgcttttttgcatccatttttcataaaccttttgatgatctttttgcagatcaaggaactcgatgtctcggagattgttaaaggaaccttgggaagtagtaggattcctactcttgaagaggctttagcggtaatgcctgtttttttaattactatcttgtcattgctttgctttgtaatttctgcttagtaacaagtggctgaagctagttttgatcttgaatcatctagttgatatcgaattcagtccggaaagtgatccttgatgccaaagttggaccgccaatgtatgaaaaggggttagcacaagacatcctttctattgtaagtactatgtttttgttagctcttgtacttgtaaagctttagtacaatgtgctcgagatttataaacatgttttgattccttaatagcgttgcttaatcatttatttcctggtatctttgtacacaaagctagaacagcttactatagatacttgaaaaaacaagagtatggataaattgttgatgtttcaatggtggtatttctggctttgctcacatgaatcgccaatcctctgttgttagattgagagagcgcagtgcaataattgcatcgtatgggccaaaagcgacactttggctagggacataattagacgagcaccagatactatggtaaacagaaatggattgtcttgtgaggatcagatagagaagtttcttgctcatttcctagtgattttggcaggtgggatacattgtgatggtagatcctttgactggggcgagaaacagcctgctgagaatgaagggagctagggttgtgggagtttatcatcccttgatcgatgaagaattagttagagttgtccgtcggtaagcaatcgatttcaatgttttcaaataaaaacacacctgctcatgtgtttacaaccttgctcgatctgatcaacaggagaaacaaagaggtgtatgcatggactgtggatgatgctgatcccatgaaaaggatgcttcacttaggtgtggatgctgttgtgacgagcgatccatctatgtttcagggtctcatggaagatcttagaactgagtgtcttgaagaaggtttttcaatacggacgtgagaatttctttttcgagcattcttaatgactgtaataccaactcagaagtttttggcaaagatctttctttatgttgttttgctgatccacaagtttttgacaactacacactacgacgccttgatacacagtaagacgagtctttctcaagaaaagcaaagtatggccggttcttgatgaagccattgcttctatcgatacagctactgataatctgatccaggagactctgaggcaacacttttcggactgcacagtgaaaacaatctcacacagatatcttcttttatacataacgatatgagcctgctcctagaacaaggtctaatacacttgtatttaagtttaaataatcagatgactgatattaagtctgtttatataat

SEQ ID NO: 10092 - DNA, 3000 bp, Unknown
  misc_feature (1)..( 3000): cDNA_ID_2714808_gDNA_ID_2213625_Annot_ID_132023 3000 nt of promoter + ATG
gatccgattcacaatgtgcctgagaatcaacacaagaaaagagtataagtattgacccaaaaaccccaattaaagaaccctaaaccctgaggaaagagattaccaagggatgtatttgatggagcacccatcttcaactcgagttcggatgactgaatctggaacctttttgttaagctccttgagaatctcagcgagtggtctactgattcctgaagttggaacatcgttctctgtttcagtagagaatcgacgaacacctttccccatctccgacgaccattctctcgatacagcacctgatccgctcctcaacgtccattttgccgcctttagccgtaaccctaaccccgccatttctgtcgccggacaaaattctcaaaggtcgcgtttttatgtaagcgtgtagggtttagttgtcgtctgataggcacgaaatgggcttatcaaagaactaacagaattatgatgagaagtagaagaaagaggtgagaaatcagaagaagatgattgttgattttgattgatctttttgatactcgtttacagagaagaagaaaagcttaagtacacgacaataaagaggaaatgggctttaaacactaaacccaaatagaagcccacgaaggcccatccagggtcactaatcttcacttcggtttgtatcatcgtcccgcttcctttaattagactttttatttatttaatcttcactacggatttatgtattactatttactaattgttttatataatgtatgttcatataaagtaaagttgaatgcatctgtttttttaaacataaatatgatttgtaattgttttcaaaaagtccaactatattagttcatctgaaaacgaaagtgcttgaattgttttttattgttgttctagattctccgttgtttttttaatttatatatccttgttcttttagttatatatttagtttgtgagacggtgaaattttagaaaatttaattcttacattaaaaatataacatgtctttattaaccatgtctctgcatatccaatataatcatattcaacttgatgttcttgaaaaatttagttaaattcttgtcataatttgtattagttataaggatagctccttaaacatctttcaaattacttgttttcttagcataaatctcaaaaagcttagatatatttaatttgcatattcatttagtttctttcataataatcgtctaatttttaggcaaggaatctatatatacatttttgcagccattttgtgaaataaatcctgtagttggacttatttacaatagttgccactggattttaatgtttgtttttgataattaaaaagaaaatcttcgaattaaatatttgacatttaacaatcttcccaaaatctctccacattaactacacgattatttactaaaatattacttccaacatatttaatatcatttaattactacaaaattatcatttttgatattgcttctctccataactataacaattcgattataatcatcaaagcgcagagatataatctgatagcatttaattactacaaaattacaaaatatttagacaatgattcataaacatatcataaataagatcaacattaataaaataaatggttttttttttagaggacgggtttggcaggacgttacttaataacatttgtaaactataaaataaaattattttatagatagatacaatttataaacttttatatatactaaatttaaaaaataaattgttccctcggtataccgcgggttaaaatttagtatgtgtaacatgtttggatctcaaaattaaagagaatatattgaattaaaaaatgtagaaagagtgatggttcaagttctgattaattatatcctcctattttagttattatgttgaattaattactaattatgtattatttattttatgaagtctaggtgccaagctctcatgtgctgatgtgtcaaattgtgggagagagttgaccaactttcatatatatgattaggttaattagataagacctaaaacgacgacgtttgctgctctctctgtaatctcaagattctgattagggaaggatttcaaaacggtacgtagtcggtttagttagggagcggtaaattggtcagaccggaccaatggttttattacattgatttggttaaatgtaaatttaattcctaggttctttcaaaacgctgcgtattgatgtcacccttctctcctgaagcctctccatctcctctctatccctcggtctgcagaagaaaaaaagctcggcaatttcacattatcaatatgttattagatcaatgttacaatcattttacagtattcaaattgtaagatttattgtaagattttcatttctatattttaaattattgtaagattatattatatatatttatagcctattatacatatttattatttctaattcataattgtaaactaaattattagtgttaaatcttttttagagtgttaagactttagagtgttgcattgttgaaggtgattaattgttaaagaatggatgatacatgcatcgttatataccacggtctattgcacatcggacatgttctaatctagttaattaggattaaaaaagtagataccaaacctttttcaagaatttgtagatgaaattttaaaatctatcaaagaattaattctaagggattaattgctaaagaaaattaaatgaaagcatatttaatcataaattgtcttaatttattttcattatttttaggaataatataaacatatattaatcaacatttattatttatagcataaacaaatacatgtttatttatttgctctttattattctaatataaattaatagtgttatatatttttcgccacagttaatgttaaatctaaagttaaaaatccaacattagatcattattttctttatatatagagatacacaaatctactccaagaatcatcatcgtaggaaaagaatg

SEQ ID NO: 10093 - DNA, 3000 bp, Unknown
  misc_feature (1)..( 3000): cDNA_ID_2714805_gDNA_ID_2213625_Annot_ID_132024 3000 nt of promoter + ATG
ttcgtcgactggatcaccagaaaaagtgtagtaactagaagaagaaagacaagtttttctgttgttttgatcatctctagaaaaagtctccaaaagaaaagttattgagtttgaatattcttcaacaaaattcgctgtaaagtgttgactaatatgaagaaatttcatattaggggttggtaagcctgtacgaatgagtcgtttgtgggaaaagtaggttgattcgatcatcgatgtccatttttttgataagactttgaatctagccagtgattttattggaagatggtgaaagatcccttcagctatatcatctggtataaatattgtcttgggattattatgtttatcattctccattcttttcctacgatgatgattcttggagtagatttgtgtatctctatatataaagaaaataatgatctaatgttggatttttaactttagatttaacattaactgtggcgaaaaatatataacactattaatttatattagaataataaagagcaaataaataaacatgtatttgtttatgctataaataataaatgttgattaatatatgtttatattattcctaaaaataatgaaaataaattaagacaatttatgattaaatatgctttcatttaattttctttagcaattaatcccttagaattaattctttgatagattttaaaatttcatctacaaattcttgaaaaaggtttggtatctacttttttaatcctaattaactagattagaacatgtccgatgtgcaatagaccgtggtatataacgatgcatgtatcatccattctttaacaattaatcaccttcaacaatgcaacactctaaagtcttaacactctaaaaaagatttaacactaataatttagtttacaattatgaattagaaataataaatatgtataataggctataaatatatataatataatcttacaataatttaaaatatagaaatgaaaatcttacaataaatcttacaatttgaatactgtaaaatgattgtaacattgatctaataacatattgataatgtgaaattgccgagctttttttcttctgcagaccgagggatagagaggagatggagaggcttcaggagagaagggtgacatcaatacgcagcgttttgaaagaacctaggaattaaatttacatttaaccaaatcaatgtaataaaaccattggtccggtctgaccaatttaccgctccctaactaaaccgactacgtaccgttttgaaatccttccctaatcagaatcttgagattacagagagagcagcaaacgtcgtcgttttaggtcttatctaattaacctaatcatatatatgaaagttggtcaactctctcccacaatttgacacatcagcacatgagagcttggcacctagacttcataaaataaataatacataattagtaattaattcaacataataactaaaataggaggatataattaatcagaacttgaaccatcactctttctacattttttaattcaatatattctctttaattttgagatccaaacatgttacacatactaaattttaacccgcggtataccgagggaacaatttattttttaaatttagtatatataaaagtttataaattgtatctatctataaaataattttattttatagtttacaaatgttattaagtaacgtcctgccaaacccgtcctctaaaaaaaaaaccatttattttattaatgttgatcttatttatgatatgtttatgaatcattgtctaaatattttgtaattttgtagtaattaaatgctatcagattatatctctgcgctttgatgattataatcgaattgttatagttatggagagaagcaatatcaaaaatgataattttgtagtaattaaatgatattaaatatgttggaagtaatattttagtaaataatcgtgtagttaatgtggagagattttgggaagattgttaaatgtcaaatatttaattcgaagattttctttttaattatcaaaaacaaacattaaaatccagtggcaactattgtaaataagtccaactacaggatttatttcacaaaatggctgcaaaaatgtatatatagattccttgcctaaaaattagacgattattatgaaagaaactaaatgaatatgcaaattaaatatatctaagctttttgagatttatgctaagaaaacaagtaatttgaaagatgtttaaggagctatccttataactaatacaaattatgacaagaatttaactaaatttttcaagaacatcaagttgaatatgattatattggatatgcagagacatggttaataaagacatgttatatttttaatgtaagaattaaattttctaaaatttcaccgtctcacaaactaaatatataactaaaagaacaaggatatataaattaaaaaaacaacggagaatctagaacaacaataaaaaacaattcaagcactttcgttttcagatgaactaatatagttggactttttgaaaacaattacaaatcatatttatgtttaaaaaaacagatgcattcaactttactttatatgaacatacattatataaaacaattagtaaatagtaatacataaatccgtagtgaagattaaataaataaaaagtctaattaaaggaagcgggacgatgatacaaaccgaagtgaagattagtgaccctggatgggccttcgtgggcttctatttgggtttagtgtttaaagcccatttcctctttattgtcgtgtacttaagcttttcttcttctctgtaaacgagtatcaaaaagatcaatcaaaatcaacaatcatcttcttctgatttctcacctctttcttctacttctcatcataattctgttagttctttgataagcccatttcgtgcctatcagacgacaactaaaccctacacgcttacataaaaacgcgacctttgagaattttgtccggcgacagaa

SEQ ID NO: 10094 - DNA, 3000 bp, Unknown
  misc_feature (1)..( 3000): cDNA_ID_3035243_gDNA_ID_2213625_Annot_ID_195836 3000 nt of promoter + ATG
ctcaccaagtgacttcatctcagggatcttatcttctatatttctcatccgtgtccatgcttcatacacccctttgctcttcattgcgttatgcaaaaggacattacctatgaaagctgtaatacgacgcccacttttcctaaattcattgactaatccaactgcctcatcatacttttcttcgttgcacaatttttgtatgtttacttcgtaacattcgatactaggctgtagtccttctcccttcatttcttccaagaaatgcatagcatcatccaatttatttgctttacagagaccaacaatcataacttggtacagtctttttttggtcttaccttgttcacgcaggtcatggaaaaagtgaagagcatcggcgattttctcattttttagataactctgaagcatgagaatgtttgaagctactgtgggcgtgataccatctctatccatcatatcatacactagtcttgcaagttttggttttcctgcaaacccagctccttcaatgaataagttgtaggcctgaaccttgtgttcccaaagagacaactgaaactttagcaaagtagtaaagaagtttttttcaccactttccatctcacaaacacattgaataacatttcgatagagactacgggtcggggtgtagcccttttcctgcatcctgatgataagtttagcagctatgtctcccctcattagtgtgattgagccatatatcaaactggtgaacattttaaaggaggtgtctacaccacttttattgaatagctcattaatcataagagcgtcctccactttcccaacatcgcaaagagctgatataatcttgcaaccagctatacgtttaggcaataagtcccgttcagcggcagcaataaccagctcccttgccatgtcaggcttccccttccagcacaaggcattggttagtgtactaaatgtctttccaccaagaaaatgccctcggtcaattgcccctttcaagacatcataagcttgttcaacactttcattggcacaaagggtatgaatcagatagttgtaagacatggcggtaggagcaaacccaatttctgacctcgaccggtataactcgagggcttcatctacaaatccagctttgcaaaagaagcataaagcagcattcatcgttttcttattcggcgaaactccacgtaccatcatctccgtaagaatatcatacacaccatcaagattgttctccttcaaaagttgaaagaccatagagttatacctgaaaacttcgagttcacaaccttccaaaggactaatcttctgcaagaaatccgcagggttattcaagaatccagctttaataagcgccctaatccaaatgttataagcacggtccatattcactgttcccaccagtttgatctcgtctaacaacttagtagcttcctgaaactttcgtttggaacatagagcatcaaccaatatacctaagccagaaccacatccagcaggatcattaggcagcaaggctcgaagataatcttcagcctcatcaagcttcccttgcttgcaaaacttcttcaccaaaatcgaatgcgtaacagcacatacgaagccacgcacggagatctggtcgaagatgacatcaaaactatcaaaacacttctcctcaacaagtgcattcaaaagcacatgatacccaaaagaatccaaatccaaacctcgaaatctcatattaccaaaatgctgaagagctatatcagtacgaccagctacagcataaccaacaacaagagcatcacagagacgaagagaatgacggcaactttcaaaaccaacacttcgatccaaaaagtcaatcataagagtcacaagcttcgcaccacgaaggatcttgaagatagcatgaaaagtagcacgcgtgtgatgaaacccaggctgacgagcagcccaatcgaagaatttgagacaacagaggatatcgtaacgagtgtgtgaaagcacgtcgaggacgaatttctcagtgagacgaagtcggagattggagaggtggagataaaaagctctatcgtctccatcgttagaaggagctcgaaggatgtcaaagattcgatcgattaattggtggctctgtttcacatctcgatgcttaaaccagtctttccattcacggacgaggaaatctccgggagcgattgaagaagaaggtttcgtgaaggtagagaacggaatagcgtcgccgttgttaccggaagtaaagtttctgaacgacgacgcagagagcgatagtatcctccgcctgaggagcattccttcgcatgatctctcgacggtgactgaccaacaccgaagcatccaaaaactcgaaaaaccctagcatttttcaaccaatcagtggcgcccacgtcatactcgatgtcgtggcttttgtacgttatttacgaaaatgtccttttagtgttagtaaggatatttcgattcccggctcgttcgttactggtttttttcttcttctccgtcgcggaaaagatggggaccaccaccaatctgagatcttggctgtatctcattcttctcttcatcgtcgtcgtcggcgtcaacgctcagaatcggagacctaagaatgttcaggtggctgttaaggctaagtggcagggtactcctcttctccttgaggctgggtaatgcttcttcttacttttttgtcgagcaccattgttactgatcttaagctgaatctgagtgatttttgttgttgtgatagtgagttgatttccaaagaatcgaagcagttgttctgggagtttactgatgcttggcttggttccgatggagatgattccgattgtaaatcagctagagattgtcttcttaagatatctaaacaggcttcgactctgttagctcaaccagtggcttctctcttccatttctcacttactctgagatctgcttcgcctaggcttgtgctttaccgtcaattggctgatgagtctctatcttctttccctcatg

SEQ ID NO: 10095 - DNA, 3000 bp, Unknown
  misc_feature (1)..( 3000): cDNA_ID_2714779_gDNA_ID_2213625_Annot_ID_195835 3000 nt of promoter + ATG
actttactcgaatagaagatttacaataaaactattggtccttaaaagtgttggttatatattctctaatgacgctcttttgttttagcagggaagctggaactcaaatttcttgaaatgggcgtctggttttgttggtggtcgtcaacaatcaatgaagggaggtcctgacaaagtgagtagcttttgtaatatggactaacttttatgattgttgtaaacctgttgcatctcaattctgcatgattctaacatgtgggctacctttgcaacaattttaatcaagttatttctatttatcatcttttcaggagcatgagaagggtgggcgacaagggaaaacgataaatatattctccattgcttcagggcatttgtaagcgctatcatttttctaacctgcttgaccgcacacattgacttaatataattacgtgcgttgaaccattttagaaaatctgaattactttaagtgcatcaatcatatgaaaagaaaatcatatttggtatttctacgtctatatgtagattggatattcgtgtgcataagagttttaagtgtattatgtgaacaaaaaaagtttaatatatgatttgctggtatcaattcatttctgacgctgaggcactgcttatgacagatacgagcgtttccttaagattatgattctcagtgtcctgaagaacaccaatcgtcctgtaaaattctggtttattaagaattatctctctcctcaatttaaggttggctccttgtttctttgcttccacatatgccttttgtgtttgtatctatatatgtcttcttatctctagatgtgaacttatcttgtagccacattaacttaatgtgtatcgcattctaatcttgcaggatgtgattccacatatggcacaagaatacaactttgagtatgagctgattacatacaaatggccgtcctggttgcataaacagaaagaaaagcaacgaattatttgggcctacaaaattcttttccttgatgtcatatttcctctctcattggaaaaggtacagatgatcatattttcatttctttcttgcgattttgatgcttggaagatgtcactataaggtattcgacatgtgttctgtaggttatatttgtcgacgcagatcaaattataaggacagacatgggagaactgtatgatatggatattaaaggaagacctctcgcgtatactcctttttgtgacaacaacagggaaatggatggctataaattttggaaacaggtaaacattaatctttttgttttgcttgtagaggtagttttggtttccatactcttacattctcaattgctttgaacagggtttctggaaagaacatttacgtggtaggccataccatatcaggtaaaaaaacctacttgaacctcagtaagttgttgcttttcccattcttaatgtgccttgttctatctgtagtgctctatacgttgttgacttggttaagttccgagagacagcggcaggagataatctaagagtattctatgagacgcttagcaaggatccaaacagtttgtccaacctagatcaggcaagttgtataatatggttctctatacttagggctgtaacctttctttggtggtcacactatcgttttactttatttgaaaggcttttgcatttgactcttaccatacaccatgctctgaatctttagagttccaggttcaaacatattgatggcatgtcattattttgtttcaggatcttcctaattatgctcagcatactgttcctatattttcacttccccaagagtggttgtggtgtgaatcctggtgtggaaacgccacaaaagccaaggccagaacaatcgatctttgcaataatcccatgacaaaggaaccaaagcttcaggtaaaatgatggctttcctcatatctacaacactcacaaagcgttgtttgttataatgcggtgttcttctgcagggtgcccgaagaatcgtaaccgaatggcccgatcttgatctcgaagcacgaaaattcacagcaaaaatcttgggtgaagatgtggaactcaacgagccagtagctgctcctgctacagacaagcctaatcctcttccatcaaatgacatctctgaagatacagaacaagacttggaatctaaagcagaactgtaaattcaatgctcctgaagtttcaaaagaggagaagataaattagacaatcatggctattttgcatttgctagataaggtttctagttttgtagctacagtttcttagacatctctcacataaattagacagaagataaagtcaacagattgcaggagaataagaatatcagtataatatgattttgaatcaattacaaacatagtcactcataacgtatttgtaaactcgtccgtccaaaatctcaaatcaaaccaaaccgacaaaccagtaaaaaaaccgaaccggaaaactgacgtgtcagtgtctgtataaaaagcaatacgtgttcttttagcaaagggtctgacactctgatagaaaagctgaagtaattcaataaattattttagaagagggaagaaatctacggttttacaaggggacgttatttattaatggattttaatagaaagaaatccaacactaatacactgttatttaattaatgattttaaattcaattttaaaatttagtgttattggagtttatatctttgtaaatcatgtttaatagattttaaaattttgtgttattcaattaaaagattttaataccgtcaaaaaaaaaaaaaaaaaaacaaactaaaaggattttaaattttatttctaaattagagaagaatccagaggaattaattttcaccacttttctcttcttatatataagtcaatccccgaagtaacatttttgacacagttttcaattcttcagcagacagatcgatcacactccatcgattccgtatgaaaccctagatttctgcaactgaattcctaattcgaaaaagaatg

SEQ ID NO: 10096 - DNA, 3000 bp, Unknown
  misc_feature (1)..( 3000): cDNA_ID_3035250_gDNA_ID_2213625_Annot_ID_195833 3000 nt of promoter + ATG
cgatcacactccatcgattccgtatgaaaccctagatttctgcaactgaattcctaattcgaaaaagaatggagggttcgtcgtcgacgatagcaaggaagacatgggaactagagaacagcattctaacagtagactcacctgattcaacctccgacaacatcttctactacgacgatacttcacagactaggttccagcaagagaaaccgtgggagaatgatcctcactactttaaacgagtcaagatctcagcgctcgctcttcttaagatggtggttcacgctcgctctggtggtacaattgaaataatgggtcttatgcaaggtaagaccgatggtgatactatcattgttatggatgcttttgctttaccagtggaaggtactgagacaagggttaatgctcaggatgatgcttatgagtacatggttgagtattcacagaccaacaagctcgtaagtgagattcaagaaacttcaaagttttgatttttttctttagaaagtttgtatataagtcagaacagtttgattgattatggttataataacttgacctttataaggcggggcggctggagaatgttgttggatggtatcactctcaccctggatatggatgctggctctccggtattgatgtttctacgcagaggcttaaccaacagcatcaggagccatttttagctgttgttattgatcccacaaggactgtttcagctggtaaggttgagattggtgctttcagaacatactctaaaggatataagcctccagatgaacctgtttctgagtatcaaactattcctttaaataagattgaggactttggtgttcactgcaaacaggtacattttcttgatttttctcggtgcaaggtcccaacatgattcttatgtttggcttttggttttggcagtactattcattagatgtcacttatttcaagtcatctcttgattctcaccttctggatctactatggaacaagtactgggtgaacactctttcttcttctccactgctgggtaatggagactatgttgctggacaaatatcagacttaggtaaactcttggatatggcctaaatcattcactcttacttttttttctcaagtcacagtcaagtaatgtgttatataatcgttttcgtaattttaccaatgaagctgagaagcttgagcaagccgagagtcatctggttcagtctcgctttggaggagttgtgccatcatcccttcataagaaaaaagaggtatgtcctagtggttcatcaaattttaattgcgattacggtggctagttaagtgcctctgtaaacatctagctactaagaggatatatcttcaaatgttttggttattgggacctggaggtgttctgtttagttgaaatgaaagtgttgttgaaggttgtacagatatataactttcgagaatgttaatgggtgttgcttgttaaagatctcatttgacgtgtgttctaaatcactttcaggatgagtctcaactaactaagataactcgggatagcgcaaagataactgtggaacaggtccatggactaatgtcgcaggtgagtaataatattgaaacgaaatggtgacatatctcccttaaggttcgtgtatttcacagactcaaaatccatcattgttgtacttgtaggtcataaaagatgaattattcaactcaatgcgtcagtccaacaacaaatctcccactgactcgtcggatccagaccctatgattacatattgaagttgctcttcttttggtttctagttttggattgacccatcatttgttgtcctttcatttattttctgttgtgtaaagaattataatgctaatgagaataatacagaagaagattttggttaaagaaatgtttttaagcccattcgattcgtcggggttaaaggaataatcttaagcccttaaacaaaaattgtatttatggaaatcagaaacctagtgatcttttccaactctatcccctctctctttccttctctgcactcacgttgtccgtgaataggtggtactaaaacatggctaacaatggcaatcatctttctctgtctttgtttgttgatgaaaagtgttccttatgggactgtcgacgacgacgcccacaaggagctatgtactgccaacctgaccatcttcaacaagcttatcaagaacgcacttcacacaacatggcaaacttatacacttgaagacgtagtattgcggagaatcttagaaagccttagttatccggagcttcgtggaagtccggggataccaaaccttcaagaaaacagtcagttattgtctatagctccgcacggatatgtttcctacaaatttgacatgtagcgagaaacatagcatatggctgtttctcgcgctgttcgtgcccgaccaaggggtttggaaactggttaaagaacggcatcgaaggaactatgtacgtgataaatttataccacgttttgctatgaacaatggttcaacatgggagctatataggtttacagtgaaaagtgactctgtagcctttttcactatggaatatcgcaaacccttgcttcttggggtggaggatctcagcctttttgatgatgatgttgatgatgattcgcattcgaataagaggaaaactccaccttgttctgagagcaagagaactgacaaaagatcttcatatggacatgtttccgagtattcctctaaataagattatggaccttaatttgatgtttaccttttattttctgttgtgtgacacaaatttgtaggcaaatgggaatgaattaaattggaataatacagaaaaaattgtgttaaggaatcgtcgacatggtttgatatttatttgagaataaagacacaaaagatgaaactagaaagcaataatttagtaagaccaacaaaaaaaaagggtggtgttttgctattgtacgcctctttctctccaaagctttttttttttcagctacagaaatg

SEQ ID NO: 10097 - DNA, 3000 bp, Unknown
  misc_feature (1)..( 3000): cDNA_ID_2714791_gDNA_ID_2213625_Annot_ID_195831 3000 nt of promoter + ATG
gcataagattcagaccacctgactttgccaatctacttctcagtcaatacgctcgccagcttctggtaatgttttacatcaaatcttcatatggtattattttattaatcaatcttctgataatcttttgaatctatgtgtagactctttacagcctaggtctaagaaaaatatttatacctggagtagcaccactaggctgcataccaaaccaacgagccagaggtatctcgccacctgatagatgtgttgacagcgtgaatcagattctaggcacatttaaccaagggctaaagtcacttgttgatcagctgaaccagcgatcacctggagccatctatgtatacggcaacacctatagcgcaattggtgacatcttaaacaacccagctgcttacggtacacttattctcggataacatggttgtcaaaggagtttcttctatgatttctactctgatcaaacatggtttatatggtacaggatttagcgtagtagacagggcttgttgcgggattgggaggaaccaaggacaaattacatgtctgccgttgcagactccttgtcccaacagaaatcagtatgtcttttgggatgcattccatcctactcagactgctaactccattctggctagacgagctttctatggtccaccttccgacgcatatcctgtcaatgtccaacagatgacactccttcactagtatattttggttttcgtgtttctttgaagttgtatgttataatgattgaacctatctatctatgagtatcgagtatcaagttgaaaccaaaatgcttgtactaaataacatatgtgctaatgaaaacaagaagacccatgatttagaagtcttagagaggacatattagtttcaaaacagagcatgccgagtttcgtgtgcaccaaatgccagaaaaaagaacacatgcattttcaatttactccgttcctactactctcatcatttcatttatcccactccagctctaactgtggttcagtctttagatgagaaacattcctcgacggcagagcttcagtattaacgtgaccagttaaccgattccaacccatgatgtgtggaagagcaaactgcacaaaatacaaaatctggttaaaaaacaatcaccaatatcccttgaagaatatatacttgatccagattcatgtgctaaaactgacagagaagcaatgcccttggtttttctagtcaatgtttttggttctcgaactgatataatagtaacagaatatagagaacgcagaataaaaatcttatcttacactaaaagctgtcttcatcactgcaaattcagcttttgtgacaggaaccacaaaatagtcattggttttgaggatgctattgttaacgcctgcaacaaaaccgcagaaggtaagtgtttatacagcattaagaattcagcattcctattgttataagacagctattctgtgcgaaaactgttatcgccatattacaaaactaatacaagtgcaagcttctaaatttactaaacagaaagctcccataactaagtatttcagtactgattatccatgttaatttgatagaagccttactcaatgagatgaagtagccgctaccatctgcgtggggcttaactgacagtgacttcctgacttgaccagcattactgaggagtcaaagacaagtctatgtcagaacatgaaaatgctgcgataaaaatataatgtattgaagcaaaaaaagacaaaccttgatttcatggaagggtcatggaaaaactcggagctgtctttggaacccatgctaattaaggatccaacttcagtaggtgacaaagcaaatttctgcaataatgtaggaaacaaaccaaatttatcagaggagaaagaagagacaagtgaagaagatagagagtgtgaaaaagatcaatacctgtttcttttcccagtcgtacttacgctcaccaatagcaggcataaaagtcatcattaaggatccacgacgatctatccgaagatttcccgactaaacaattgtactcacagtaagtaatgagaatctaaaagaagcctttaaagagaacacacaaaactaaaaagaaatggattttgggcttacatcgatttcagtgaaactgggaagaacaggttcaacagagagagcagcttttcctttgaagatagaataaggtgcgaacaatcgaccactaggctttgcggcatcttctcaaatcaagcaaacaaaattagggcaagtacacttaaactgacgaaacggaaacaaaccaagttcttacctttaccagggaatccacgtccaggggttgaagaatttgaccagcttgcaaaaccacgcaacgtcgaagcttcgaaaagtgacttactttggtcacaaaggctcctgctttaacaaaaacaaaccaacccagagaagccattttaagagtaatgaaatctaaaatctgaattttgagaggaactgaagtaacctggagagcaaagagcgggcttgcttcatcatcttcttctgtctcgagtaaaaagcatcacttgaggtcttccgacttctgaggttttatgatttatcaaaacgggttttatcgggcgacccatattttaacccgtttgttttatatataagtcttttaacggcccaatgggcctttattgttgattgggaaattaaaaatcagattagagaagacgaacgaatctgagaaaggtgaagctgaagaagaagaagaagaagaagaagaagaagaagaagaagaagaagactctctaatggcggactcaaactgatttcgaggattctgatttcgttttctagttgaagatctttcaactcttaatctcattaggaagatgtccgacatttccattgacgcattggtacttcattttttttgcattcgtgatcttctagccttaatcatggatcctttatgatctcttgtctaattcgctttgctcttctatctgaaattcatagggccaaactatg

SEQ ID NO: 10098 - DNA, 3000 bp, Unknown; identical to SEQ ID NO: 10093
  misc_feature (1)..( 3000): cDNA_ID_2714805_gDNA_ID_2213625_Annot_ID_195827 3000 nt of promoter + ATG

SEQ ID NO: 10099 - DNA, 3000 bp, Unknown
  misc_feature (1)..( 3000): cDNA_ID_3038936_gDNA_ID_2213625_Annot_ID_195823 3000 nt of promoter + ATG
aactagtgcatctcctgatcgagaacaaaaataaaaagcttgtcgtgtaagttttgtcacaacgtacttatcaaattaagcatccttttacagatagtctaactagtatctcttctgcagattcttcatgacatgtgcttgtgttgattactggggactcgtactttcaaaaattcctaccctcaagtccatttccttcttttccacccatgggaagatggatcagaaaggtagagacacggcattagcttcgtttacagaggcatcaagcggtgtccttctatgcacagatgtcgctgcacgtggacttgacattccaggcatcgattacgttgttcaggttgattgattaatgcttgttatgccatctttgttgcaatggattttgacaggttattgtatgtaactggtgcagtatgatcccccacaagacccagatgtatttatccatagggttggcaggactgcaagaatggaaagacaaggtagggccattgtgtttttaatgcccaaggagacagactatgtagagttcatgcgcattcgaagggtccctcttcaggagagaaaatgctctgagaacgcttctgatgtcatcccgattgtaagaaaacctccacgtatctcttttttctctctttctctctctcgctctcggccacagggtggtttaataataagtgctacaatgtaaaatgcagatacgttcactagccatcaaggaccgggcagtgttggagaagggattacaggcatttgtttcctttgtccgtgcttataaggagcatcactgctcttacattttcaggttcatttttcgccttgtgttgttaaaatatgttagcttttgtaactccattcttttgttccccttaaatttacagttggaaaggacttgaaatcggaaagttagccatgggatatggcatcttgtcttttccttacatatctgaagttaaacaagacagaattggcattgtcggttttacacctgtccaaggcatcacgtttgaggacataaaatacaagaacaaatctcgggagaaacaaagacagcaaaacttactagcaaggaaagacaaactgcaacaagaaaagagagggaaacgcaagaaaagctccaaagaggcggttgatgattctaacaaagcgtcgagaaagagaaagttaacggggaggcaaagacaaactatccaaacagcgcaagatgaagaagaaatgaatttgagattatagcttactggaaaaactgaagaaaggctcaattatagaagatgattttgctaaacttacaggagctcatgattttgtctgataaagaagcaagaaaacatttcaggcttcagcagagatgggaaggtggacgactatttattataactgagatcatgttttgtcttttggttgattctaaacatattggtcagaaagaatttaacaaaaggattctcaaatttaaaaagctctggagtggttttgtttttggtgagaacaagggttggaaaagttctgtaattagaaacgaaagctcaagacacatgtctaaagctattttcaatcctggtgaacataccagccggatttcagagtagagaatatatagccactgttgagagtcacaaaatacctcaacgctctttaagagatgtcaatctaaaatcgccccattatttttccagcttagctttcggcccattatatatttatttgaaaaaaatacccgctcttttattttaaaattttcataatctttcatgatcatgatccactgatccaggattaaaacatggcataaccagcaagtgatccgactaattctagaggtgaaacctacctgataatcataagaaatctattaatccatgtaattagcaagatggattactatataaaatgagatgaacatcaatgtttgtaactttgagaattgtcatttgaaacaaatctcatcttcatgattttatatctcaatctattaatctattataacttggtgatttcattctcccctttttaaaaaactttcttgcacctaataaaattctaatttatgttaataagctcatttgagcataaacctatcttggtttggttacataattgcttttcgttaacaaacatatgaaggttgctggtgtcacttgatttataactttcaaagactttcgtgtacaactccaaataaaaagagtaaaaatgaaagaagaggtcggccaaaggcgaggtcgacgcagatgaaaacgccaggtgtctcagaagaagggagcaatcgaagctggatctctctttacgccacgtcatttttagtcaacatcatgtgggacccatttccttaaccgtcattctccttctctaccgttcactagtttcctaattttgaatttcaattatttattggatttttaatttttatgaagtaatttcacactgacaaatatagtactgtaacttattcaactattcaaacttgctactttggttgctgctatatacgataacactgttatagaaaggtgtatactcattgctcgttggttttaaattggaatacaaacaaatttccagaagataaacaaattattgaaagataacttatgtcctaagtaattggtatgatggtttttactctgataattaaattagtgattttggacaaacggaaaaatcaggaaatcttaaaaatatttgtttattttgtttgatcggtttgttgttgctgaaagtttttgatcgaaaattttgtgattgaatatttagagttactttgtcaaagttggatacctaattaccaaattgcatttccaatctaaatctaacttatacatatgtctgtatgtttgtaactaacataggaacacatatgtcttgttttaacgcatatataattttattttattttgttgtgatgttttgttacaatctaaaatatgtaatagaatttttgaatacttttaatttaaaattttgggatattcctaatgatgatattaatagaccaaa

SEQ ID NO: 10100 - DNA, 3000 bp, Unknown
  misc_feature (1)..( 3000): cDNA_ID_2994697_gDNA_ID_2213625_Annot_ID_195822 3000 nt of promoter + ATG
cgcatgcattaaccttgactaaagtaagaaaaaaactaaaaataatgattttaattctaaactgcatctattaattagtcctgatgtgcaacaagccaagatgtattaaacaccaccatatacgtttattacaactcatacaatagaaaagtacaacacaaacgagtcttttggaggacacacctgaaaaattcaatacaaatatgaacaagacgttacacaatgcttcacaaaggcatagagactacaagaaatgggtttagcgaacacttggggtgactatgactttttttttttttgggaccaaacttttcagcgaaccattcttgcttgtgtgaagaaaagatgtatccgatcaccaaaccacagaaaacaccaggtccataagctattgcagctgctacacagttaaacattttttcctcctcctctaactactagatccttgggttgttgtgatgtaggattcaggacaagggttaattctccacagtctttttcgagaccatagagtttagggtatatctattaaagcttagccaatttctattcctaaacgaattatatcatcgttctcaacagatggctagattatgtccatctgaaaatttgatttgacaaatcaaaagacttggaaattaaaactaccttttaactccggcaacatacacagatttcttcataacaagctgtgggataagataattgtcgttatatatcgtaattgactcaaacactagaccttggggcctgtgtggttggtttccaaattgattgcctgtgaaggcccattaatacgaatagcctacatatatgtgctaatttaaatccctaatacagtacatagtcgtgcatctatatataaatatataataaatctacatttattttggtgtagtttttattataaagaaagagtcaaatggttactagaggatccaagtccaactttagcaatcaaatcttcggctaaaaaaatttcctccaaaattttcctcgcatagtcgtggatggtatccactgtttgtcctcctcaacaaaatgtaaaagccattcagaagtacaaacatgaaagaataaaaagaaaacacctttttgacaaaaaggatacaaaaaaatcatttgccaacaaaacaaccgaaaattcttcgagtagtatcagtgggtagggccaccaggagtaaaaaaatcattaagcatgtgagtaaaaaacaagagataaactgttgcttaattctgaaatctctcttgatctatttattattctcatgcaaaccattaatctttacgggagaaaaatattagtatgatattttgagtcctgattgcgactagtgatatcgaatgattacaattactaataagtattacctgaagctttcatcacgcgtctgcttaaacattgataaatacattatacccaagttaatcattctcttaactcatataatgtcagaagatcaatgacatcgagcagacacgttgtcgcctttttactcgcttttgttattacacaagctaaacaaaaagaatgtcccatgaaagaaaaagcaaataaagagagtaatactataataaacacatgggataagaaagtggattaaggcatcaatttcgtctccattacactaaacacacacttttgattacgttccaagactcggcgccgttatcttggcgccattcacgcttcccttttatcttttgtctcctctttttaaattcaaaatcacttaatccccctaacctaattcaactatgcactccctaactatacccatatatgaacatattcttactacggtagatccattttaaccccgaaactgcccatttcaaaattttaaacagtctatgtatatcgtaactaggaaatatattaaaaacaaacttaggtttgcataaaaggaaaacgttacttgtttagcaagtattagatatcttagaaataaaatcgtttagttaggaatcatttccaattcagtaggtgtgattgaatgtcgattttatatggttcagttgatttatgagacaaatattaatggggtcataatttgtagcatttttataggaaacagtttaaatatcaaatattggtttgttaagttaatatacgttggatatttgctttgcattaaaatatgaaaccatttactttacaagtatattgtatatacacgataaattgaaaaaatcaatgattaaatgtcgtttggattttatgtaggaaaaatctcaaaaagggaacgatctgattcgattgcaaaaaaaaatcggatcaaaatctcatataaggaaaaatacgaatcaaagacttccgcttcaaatttttttttttgaaatccatccgattaatttttttaaaatacatagatatcagtatatcaaaaaactgaaaactcttccgtcttttgagaataaaagagtccaacttttgcattcgacatttgactataacagtatcttttcgagaagacgcaaagtcgttacgtgcgtttatatttcgtttattcatgtcccaatactacctcttaggaaataagagactattaagactttcttgcttcccaatacacccccactaatatcaaataacctagtttaatttcttccgtttctcaacacttttaagaaaatacttaacaattgacataaaagaaaaaacgtacagaggaatttgaatggacaaacaaaggtgaaacaactagaatggacaaacaaaggtgaaacaactagaatttaacaatagacaaaaaaaaaagaaaaggatttggttaagcaatattaaggtatgaactaacctaaaccataaaatagtaaaaaaggaggattaaggttactttgtttaggagcagcacgttgataaccaaaaagccataattatcgcttccttcagcgcaggatccttctctctcctatctctctgtatatatatgtggaccttcacgtaatagcttcgtacttcaaacctcaaaagcaatttagctctctgtcttcaag

SEQ ID NO: 10101 - DNA, 3000 bp, Unknown
  misc_feature (1)..( 3000): cDNA_ID_2717032_gDNA_ID_2213625_Annot_ID_195818 3000 nt of promoter + ATG
tatgagcttgacctagaaaaagagtttgcgtcggtggagcttgaagtcgccgctatcgctttagggtttcggttctgacattcaatttataattcccaaattatgaatttattaagtatcgaaaatattttacataacgtatatggaaattgtactaactacaaaatagtaacttccgctctttaaccgcttgttaaaccgacagctttgatttaccctacccggttggttcctcaaccgaatcgcagaagatctatcttgatcaagcagcaatacccggtttactttacctcttaacttttttatcttaccatctcttaaggaaaaacagaggatttagggacaataaagtagacacaattccgattagtttagttacaaaaggcgtttctgtcagacgaaacagttggttacttaatttgtcttcataaacaaggtaatgaatttcgagcgtcgatgattacaagcttatctcaaatctcttttgggacattgaggcgctttggctcttctgttttaccttctgcactgaaacgcgaatttgttgaaggattgcgtacgttagtaaggtctggtgatatccgtcgagctgtttccttattctattctgcgccggtcgagcttcagtctcaacaggcttacgcagctctgttccaagcatgtgcagagcaacgcaatctcctcgatggaatcaacttgcaccaccacatgctctcacatccctattgttattcacagaacgttatacttgctaatttcctcattaatatgtatgccaaatgtgggaatatcttatacgcacgacaggtgtttgatacaatgcctgagaggaatgttgtttcatggactgcattgatcacaggctatgtacaggctgggaatgagcaagagggattctgtcttttctcgtctatgttatcccattgtttccctaacgagtttacgctgtcaagcgtgttaacttcatgtcgatatgagcctggaaagcaggtacatggacttgctctgaaacttggtttacattgttcgatctatgtggcgaatgcagttatctctatgtacggtaggtgtcatgatggtgccgcagcatatgaagcttggactgtgtttgaagccataaagtttaagaatttggttacttggaactcaatgattgctgcttttcagtgctgcaatcttgggaaaaaggccattggcgtttttatgcggatgcatagtgatggagtgggatttgatcgtgccacgttgcttaatatatgttcttccttgtacaaaagctctgacttagttcctaatgaggtttcaaagtgttgtcttcaactgcattctctgactgtaaaatccgggttggtgactcagactgaagtggctactgcattgattaaagtttattcagaaatgttagaagactatactgactgctacaagctttttatggaaatgagtcactgcagggacattgttgcttggaatgggattataacagcgtttgcagtgtatgatccggagagagctattcatctctttggtcagttacgtcaggagaagctaagccctgactggtatactttctcaagtgtactaaaagcttgtgcaggacttgtcactgctcgccatgctttgtctatacacgctcaagtgatcaagggtggttttttggctgacacggtgctgaacaactcattaatccatgcgtatgccaagtgtggctctcttgacttgtgtatgcgtgtatttgacgatatggattcgcgggatgttgtttcctggaactcaatgctcaaggcttactcattacatggccaagtagactcaattctaccagtctttcagaaaatggacatcaaccccgattcagcgactttcatagcccttctctcggcttgcagccacgcaggacgagtagaagaaggattgagaatattcagatccatgtttgagaaacctgaaactcttcctcagctaaatcactacgcttgtgtgatcgatatgctaagccgagctgagcgttttgctgaggcagaagaggttatcaagcagatgccaatggacccagatgctgtagtttggattgcattattgggatcatgtagaaagcacggtaacacccggttgggtaagttagcggcagataaacttaaagagctagtcgaacccacaaactcaatgagttacatccagatgtcaaacatatacaacgcagaaggtagctttaacgaagccaatcttagcataaaggagatggaaacatggagagtacggaaagaaccagacttaagctggacagagataggaaacaaggttcacgaattcgcatcgggaggaagacaccgtccggacaaggaagccgtatacagagaattgaagagactgattagttggttaaaggagatgggttacgttccagaaatgaggtcagcttcacaagatatagaagacgaagaacaggaggaagataatttattacatcacagcgagaaacttgcgttagcgtttgcggttatggagggaagaaaatcgagtgattgtggtgtgaatttgatacagattatgaagaacacaaggatctgtattgattgccataacttcatgaaattagcttctaagcttttgggaaaagagattcttatgagagactcgaatcggtttcaccatttcaaagattcttcttgctcctgtaatgactactggtaattttctatgttactttcatcacaagacaaagacaaggactgatttggcaaataaataaaagtataagaaaatgtgttaattaagggaaaaaaagaaaaaaaggaaaaaaaacaagttgcagaaagagagagaggtgggggaagaagacgatcttcgatccagagttgagcttctcttctgccatcgtcttcttcctcgatctcggtcaattacgcattctctgatctgatttgtgagatctctcgtcggatcaccgttttttacatcgtcgccgacaacacttaggagtaattggatccagcagaa

SEQ ID NO: 10102 - DNA, 3000 bp, Unknown; identical to SEQ ID NO: 10097
  misc_feature (1)..( 3000): cDNA_ID_2714791_gDNA_ID_2213625_Annot_ID_132028 3000 nt of promoter + ATG

SEQ ID NO: 10103 - DNA, 3000 bp, Unknown
  misc_feature (1)..( 3000): cDNA_ID_2714787_gDNA_ID_2213625_Annot_ID_132030 3000 nt of promoter + ATG
atacacgagggacggaagtcacaccagactacagactttccgcagttgtcatcggagagacttttatgcatggccgccaacaggaaaggacctgttttaaagtgggagaataacgttgcatggcctggaaaacttactttaactgataaagccctctatttcgaggtaattagttcttttttttctaagtcccttgggaaggagcgagcgagtgaacactcttttctgtttgcttttatagatgaagaacacttcagttttacatatttactgcattgatatgcaacgttagctggaattctaagttgtttaattttaaactttgcgaacccatgtcttattagaatgttcttttggtgtagaaatgagaaccctaaacccttctcatggaaatgctcttttggtttcagccagttgacataaaaggaagtaaaggggtcttgagacttgatctcgctggagacaagtcaacagtggagaaagcgaaagtggggcctctgggcttttctctctttgattctgcagtttctgtttcatccggccccgggtgagttcatatgttcatgtagctgatcactgatgtcgttctgatatgtctctgacggtgccatttgtctgggtggtcgtttacctatatgctaacctgtaaatattcatttaggttggccacttgggttctggagttcgttgaccttggaggagaacttagacgagatgtttggcatgcaattattagtgaagttatagcattgcacacatttctacgagaatttgggccaggagagggtgataagtcgctgtatcaagtgtttggtgcaaagaagggtaaggaaaaagcaattgcaagtgcatctaactgtattgcaagacttcaagctcttcaatatatgcggaatttgcctgatgatcctatcaaactagttcagttctcttttcttcaacaagtagcctatggtgacatcgtgtgtcaaactttagccgtaaatttttggggtggaccactattgaccaaagtttcagacaaacgaggtgatattgccagggcttccagagagtcctatgaaacttttgataacgtgtctgatctagatggaagtgtttacttgaaaaggtggatgagatctccttcctggggttcaactgcatccatgaacttctggaaaaactcttctctaagacaaggcttagttctgagcaaacaccttgcggttgctgatcttacacttgtagagagggcaacagaaacatgtagacaaaaatacaaggtggtcgaaaaaactcaagccactattgatgctgcaactatcaaagggatacctagtaacattgacctctttaaggtaacactttttctccattgatagttttgctacaaacattgttttggacggtttcctaattcgtcatgtttagacaactttcatctcttgtgtcaatggactcggtatttgtagtatttttcattaccttgcaaactattacataaaattaaataagtagagaccgtagtgactcaatgttgtcctgctactcttattttttaatcccaggaactcattctaccactgagtataactgccacagagtttgagaaactcaggtgctgggaggagccttacatgacggtctcttttctagcatttgcatcaacgataattttcaggttggttgacacttagacatgtgataaatgtgatatctcgtgcacattaatgattcttaggtttaagacttgtaatcgcatgcagagaaatcatattatcattgctgcttcaagttagatattattatcattgcttcaagttagacttagtaatgatctgataccactgaggatacttttctgcgcctcaggaaccttttgcagtacgttcttcccgtgtctttgatatttttggcaactgggatgcttacgttgaagggactcagacgacaaggccgtctaggaagattgtttggaataattagcattcgagatcagccatcttcaaatactattcaaaaaataattgctgtcaaagacgccatgcaaaatctggagagctatctccaaaaggtgaatgtagtgcttctaaaactacggacaattgtattatctggtcatcctcaggtatgttctaatcactggatcaggtttcagagctttttattgcattccttctcttacctggtgacgcgatttgaaacttttctcagataactactgaagtagcactggctatgctatctattgcaacggttctagtcattgtccctttcaagtatgttctggcttttgttctctacgatcaatttactcgggagctcgagttccggaaagaaatggtcaagaaatttaatgctttcttacgggaacgttgggagatggtaccagcagctcctgtcattgttttaccgtttgttaatgaagagtctacaccagcaactcaggaaaacaagcagctcagaaaaccaacaccgagaggtgattgataaaaagtgccaaatttgtataatctagtggcgtgtgcatgttttaactagaagctcaagaaggaacaaatatcaaattgtagttgacaatgattcattaaatgtatatgaaaagtagtatagatgttagttgtttatgcttattgctcatcttcttaaaaatctatttccaaaacctgtcagccttaagaaattcattatgatccgctcgtggcaactctatccgttagtctcagataatcctgtgctcatttatttcttttgatctttatctgaagaggtttagaaaaaatttcgtcatggtcatgtctccttgcgtatgcagttttagtctcttattatggaaatttcaagcatgatgcaagctttttgactcgcttacatgcaagcagtcgaaacgtgagagagtaagcagttacaaagtgaatcagaaattccggaagataactcctttgtgtcacatgcagcatgttttgcttagagccttttatataacaatctttccatattcacaagttaagtaaaatg

SEQ ID NO: 10104 - DNA, 3000 bp, Unknown; identical to SEQ ID NO: 10096
  misc_feature (1)..( 3000): cDNA_ID_2714783_gDNA_ID_2213625_Annot_ID_132031 3000 nt of promoter + ATG

SEQ ID NO: 10105 - DNA, 3000 bp, Unknown; identical to SEQ ID NO: 10095
  misc_feature (1)..( 3000): cDNA_ID_2714779_gDNA_ID_2213625_Annot_ID_132032 3000 nt of promoter + ATG

SEQ ID NO: 10106 - DNA, 3000 bp, Unknown
  misc_feature (1)..( 3000): cDNA_ID_2994632_gDNA_ID_2213625_Annot_ID_132033 3000 nt of promoter + ATG
cagagataaaaaagctcctgcaagttacaacgtccaggacatataaagcctcaagaagaagaatctggcttttctcattcatctgttgtccatgatccaaatcccaaaacagatactgaatccaaatcaactcccttgttctctctattcaacaattctgacctctctgtgacatacttttcatcattcaagttgcctctgtctactattccaaccattcctccctaagtttgaccttgaattccgttcctctagtatgcggttagcccgttcaaggatcatgtcagtccgttcattaggcacatatcctctccgagctattctttcaaccatctcatatgcatcttccgcctggttcattacaatcattctcaacagcatattgtacgtgtacatatcaagaggatagcatttctctataacttcatctaaccgcttcagttctacttccatatctattcgtcctgagaataatcctatcaactcaccaagtgacttcatctcagggatcttatcttctatatttctcatccgtgtccatgcttcatacacccctttgctcttcattgcgttatgcaaaaggacattacctatgaaagctgtaatacgacgcccacttttcctaaattcattgactaatccaactgcctcatcatacttttcttcgttgcacaatttttgtatgtttacttcgtaacattcgatactaggctgtagtccttctcccttcatttcttccaagaaatgcatagcatcatccaatttatttgctttacagagaccaacaatcataacttggtacagtctttttttggtcttaccttgttcacgcaggtcatggaaaaagtgaagagcatcggcgattttctcattttttagataactctgaagcatgagaatgtttgaagctactgtgggcgtgataccatctctatccatcatatcatacactagtcttgcaagttttggttttcctgcaaacccagctccttcaatgaataagttgtaggcctgaaccttgtgttcccaaagagacaactgaaactttagcaaagtagtaaagaagtttttttcaccactttccatctcacaaacacattgaataacatttcgatagagactacgggtcggggtgtagcccttttcctgcatcctgatgataagtttagcagctatgtctcccctcattagtgtgattgagccatatatcaaactggtgaacattttaaaggaggtgtctacaccacttttattgaatagctcattaatcataagagcgtcctccactttcccaacatcgcaaagagctgatataatcttgcaaccagctatacgtttaggcaataagtcccgttcagcggcagcaataaccagctcccttgccatgtcaggcttccccttccagcacaaggcattggttagtgtactaaatgtctttccaccaagaaaatgccctcggtcaattgcccctttcaagacatcataagcttgttcaacactttcattggcacaaagggtatgaatcagatagttgtaagacatggcggtaggagcaaacccaatttctgacctcgaccggtataactcgagggcttcatctacaaatccagctttgcaaaagaagcataaagcagcattcatcgttttcttattcggcgaaactccacgtaccatcatctccgtaagaatatcatacacaccatcaagattgttctccttcaaaagttgaaagaccatagagttatacctgaaaacttcgagttcacaaccttccaaaggactaatcttctgcaagaaatccgcagggttattcaagaatccagctttaataagcgccctaatccaaatgttataagcacggtccatattcactgttcccaccagtttgatctcgtctaacaacttagtagcttcctgaaactttcgtttggaacatagagcatcaaccaatatacctaagccagaaccacatccagcaggatcattaggcagcaaggctcgaagataatcttcagcctcatcaagcttcccttgcttgcaaaacttcttcaccaaaatcgaatgcgtaacagcacatacgaagccacgcacggagatctggtcgaagatgacatcaaaactatcaaaacacttctcctcaacaagtgcattcaaaagcacatgatacccaaaagaatccaaatccaaacctcgaaatctcatattaccaaaatgctgaagagctatatcagtacgaccagctacagcataaccaacaacaagagcatcacagagacgaagagaatgacggcaactttcaaaaccaacacttcgatccaaaaagtcaatcataagagtcacaagcttcgcaccacgaaggatcttgaagatagcatgaaaagtagcacgcgtgtgatgaaacccaggctgacgagcagcccaatcgaagaatttgagacaacagaggatatcgtaacgagtgtgtgaaagcacgtcgaggacgaatttctcagtgagacgaagtcggagattggagaggtggagataaaaagctctatcgtctccatcgttagaaggagctcgaaggatgtcaaagattcgatcgattaattggtggctctgtttcacatctcgatgcttaaaccagtctttccattcacggacgaggaaatctccgggagcgattgaagaagaaggtttcgtgaaggtagagaacggaatagcgtcgccgttgttaccggaagtaaagtttctgaacgacgacgcagagagcgatagtatcctccgcctgaggagcattccttcgcatgatctctcgacggtgactgaccaacaccgaagcatccaaaaactcgaaaaaccctagcatttttcaaccaatcagtggcgcccacgtcatactcgatgtcgtggcttttgtacgttatttacgaaaatgtccttttagtgttagtaaggatatttcgattcccggctcgttcgttactggtttttttcttcttctccgtcgcggaaaagatg

SEQ ID NO: 10107 - DNA, 3000 bp, Unknown
  misc_feature (1)..( 3000): cDNA_ID_2714915_gDNA_ID_2213626_Annot_ID_132034 3000 nt of promoter + ATG
tggtgagaatagtttgggtcattcttcatctgcctctggaaatgatcagaagaagcagaaatcgtctaaaaacaatgagctcattcacttgtgagatgtgttttgtttttcttagtggatttggattggtgtttagtctttgggaatatgcatcaacagttgttatgtaagtaaactaaaattagcagccttgtgggattgaaatatatttagggtgtaacctgtatatttcgctgctctgttttggtgttattaatttatctaagtgattaatcgttaagacttaaaattatatcaatattttaattgacaaaatatctccaaattcccctaaattacgcactccgtccctctcttcttcgactcattgaggagttgccctaatttgtagtgttaagagttgtgcgaaaatttgcattttcaatgttgttggtgttttcggtgtcacagcctcaaaatcaatttcctactcgcgttgttgttgttgttgttaagtcataagtgttaggtttgaatcaaccgctgtagtaccagtggaactgttttgatttgcttagcgagaagatggatctagtgagcagtttaccagacgatgttcgttgtcatatactgtccttccttaccacaaaggagtctgctttgacatctgttctgtctaagaagtggcggaatctgttcacgcttgtccctaatctcgacttggatgactctgagtatcttcatccggaagagactaagtgggaaagagaagaaattctggatagcttcttggattttgtggaaagagtattgtctttgcagggaaatggtcccattcgtaggttctccctcaggtgtgaaagcggtgttcctccagctcgtctgaatcgttggttatgtaaagtgctgcagcgtggtgttgcggaccttgaacttatcatcgacttcgaagatggttatcttctgcctcgagagttgttcgtcagtgagacactcgtcaatctcaggttaaaatctgaatttggttgtattcattggtggcctggagctgaaggcactttcttaccaaggcttcaaagtcttgatataagctctgcgatggttttttgtgatgataagcttcagaagcttcttccttgtttccctgtgattgaggaattacggttggtaggtatggagtggattgattctcatgtaaccgtgtcgtgtgcaaccctcactaatcagctacttcttagctccaccggttccagaacctctaaaaatccaaagagcgtttcttttgatactccaaatctgctttccctagcctactctgatttagttgctgaggactatccgttggttaatatgaaaagtttattcaaggctcgaatcatccttggagtagatgacgatcaaatcgcccgaatgcgagccccaactaactatttgtcagaggatgatgttgttcgccgatttggcaatgtggtgaagctcatgaagggcatacaaaatgttcagcaacttcacttgcattctgatacactcgaggttagttttccattttcttctttctggtctagttgtaatgtattgattgcaagatgattttagctgcgttttgtttcttgtttcaggtgctttcaatgtgctgtgaatcgatgccggtgttcaacaacgtcaaaacgttaggcattaagagtgactacgacagaggatggcaagcagtgcctgctcttctaaggaattgtccacatctagaaaccctgacctttgaggtggaactataaaccatgaaactaactacttggacaaaacatgcagttcattcttatagtaaccttattgtctcgtttctgctttcagggtctcgtgcaccatgtgacagataaatgtggagatgcttgtgactgcattttccggaaggataaaggccgttcgctcaaatcttgtccagtaaaagtggtagagattaaagagtttagagtaacaatgaaagagatgcacctgatagagcatttcttggacaactttccatgtttgaaggagatgaagatctatagagaagagtatgatccttcaccgtttggaaacgaccctcaagtggatgatcttatcttggacatgatagaagagtacaaggatatatatagttgcaatgtccaactcttggagccgtgtgacaagtgggatgaacaatgaagtctttgaacaaagtccccctaggaatttgacttatcagatccgatccttgttttgttttagttatctatgtgtatcttttaatcacactatcctcggctcggctagactgattgccacacctattttgctttagtccttggaaactttctgattgcttttggttaattttcaagactctgaattacgtattgcttaagggttactgattttcatcctctgactcagtcttgtgtgcatttaacactctttgcatctgatcacttgttggtttcattagatcttgccgatatcaaattataaaacatttgagtaaatcttgttgttgttgcatcaagcagttatcaggaaaagtggtgaacatgaagcttccttcatacgaggaggtcacagtaaatggtgaaaggaagtcgttggtaactttcttaacttggtttacatgatggttagagcaagtcgtttagagtgggttttactttttcagttgcataatattttcatgttgggattgaaataaaagtataatcacatgtatacaaaaaccaaacagtataacacgtcaaatcacattagaataattaattaaattttatcgataaaaatcaccaaaataccaataaattccgcactccgtctcttccagtctcagtcagtcgctattctctcatcgacgtttcattgccctaatttgaagattggcctctgtagcaaggtatgatgttgctctcagtctcaaaataaacaatctctctgcttcaatttcgagtggaactgtttggtttgggaaattgatttctttgctttgcgttgtgtatttttttctcttcagagaagatg

SEQ ID NO: 10108 - DNA, 3000 bp, Unknown
  misc_feature (1)..( 3000): cDNA_ID_2714911_gDNA_ID_2213626_Annot_ID_132035 3000 nt of promoter + ATG
gcgatctgtgtttttcccgcatcaatggtgatatgggttggcagtttcagggtctttgctctttcctgtcggtatcaacaagattgttacactcttcacataggaggatcttatgactttttcttcttctcttattcaatacctaggaaactgcaatcttgcaaagggcaagtatatttacgtagcacatgttcagtaaactcacttgcaaaactagcatctcttcctcactttcaattttgacaacaacttttggctgagcacaatattcccatctgcaagagcaataagtaactgttaattccatccgtagcctgaaaaagaaacatagaattgaagtagagtatgagatggtgtggcataccgcatacctacctgttcaaggcttttggcgcccgttgaaggagtttcttgtataaacctaaagttgcatgactacatataatatgcaaaacaagagaaaaggagttgttaattgaattcaagaaatgcaattgaaaactgaaagaggattgataatcacctgcattgagctgcaatcttccctttacccattttaagatcattcctcacaaccaaaacctacacagacaacaacaacaacaacaagaagcatttatatcagctactggtatcttggtgcaatacaaagacaaggaggcagagtgaggctaggtaccattttgaaatttttgcgaaaatcagcgagtttctctatctcgaggggttccttggacttggttttcttattcccgctggatcctgcatctatggcgacagatttggaggagagaaagattcggcgggtttgtcgtaaagtgctgatgtaatatccaagtgcagctccaacaagtaaaacacttaataaccacaccaaatccatacctcctacaagaattagcaaacaaaattcacaactatcattaactcaaacaatgttgaatcaatgtggtaactaaaatcagtgttctgataagaaaataacatagtaacaaattttgggaatctaaaagtgaattaagaaactagtgcattagtacttgtttctctcggaatcaagtaaaaaacataagctagttttaaacatacaaaagctgtgttggagctattgaatcgataaaaaagctacttgacgattctggggtttcaccaatagggaatttaagtagacaacaaactaataagcattatcaattgtagaaataaatctacgagggacggttaatggaagattcgttaccttaaagtcttccggcggctgagctgtgacaagtctgtttcttcgttcaagtttcaacgattttggcgatattctggtgtttggccacacgaataggtctctccttaatatgtttaaaagtgttgttcccaatcttttttatatcggcaaaatttgggcctttgagatgttgaacggcccattttcatttttaaaaacaattactttctggcattttcgaaatcatatttactttccttattattgttttttttcataaagcaaaggaaattgtttttgtataaaaaaagttgaaaccaacaaatccaagactcgtggtttcttcatgccatggagataaaaaaaaaagaaagagtccaaatattcctttaaagttaacgcgtcttctcacttgtcgtacggcattgacctcctcgtagattatttttcttctcaattaaaacctctgtgtcacagtctcaaaatcagtttcctactcgcgttgttgttcttaagtcataagtgttaggtttgaatcaatcgctctagtaccagtggaactgttgatttgcttagcgagaagatggatctgagaccctgaagatgatctggagttatcttggtccgagcagttcatatgtccttaacatcttcggggaatgtcaaaaccattttataaacacaaaatcttcttcttcttcttcctttctctctctccataattcttgtttgcgtcattcattcatcacatatccacataccacagagacagaggaatcgtcctttatcagaaatggcaggcagtaatcttctccaaggtatactctatttattcttcttctttgatggtactactatttgatctgatctattttgagttcatttttctctagtttggacctggaatcagtttctctcttgttagctatttctctcttctctattgtatgaaatcaaatccaaatctattttgctcttgaagacaacctaaagctttcacctttctctcttctttacatttcaataaagctcattgagctattttgcattttcagtctcttctaataagctcaatgagcatatatctattttcagtctcttctaattagctgcaacagagccagccatatgattcttgttgctactaaacctaaagactctcgcggaagcagcagcgatgagatgatgatgaatgatctggatgagataatatttggtgagaatagtttgggtcattcttcatctgcctctggaaatgatcagaagaagcagaaatcgtctaaaaacaatgagctcattcacttgtgagatgtgttttgtttttcttagtggatttggattggtgtttagtctttgggaatatgcatcaacagttgttatgtaagtaaactaaaattagcagccttgtgggattgaaatatatttagggtgtaacctgtatatttcgctgctctgttttggtgttattaatttatctaagtgattaatcgttaagacttaaaattatatcaatattttaattgacaaaatatctccaaattcccctaaattacgcactccgtccctctcttcttcgactcattgaggagttgccctaatttgtagtgttaagagttgtgcgaaaatttgcattttcaatgttgttggtgttttcggtgtcacagcctcaaaatcaatttcctactcgcgttgttgttgttgttgttaagtcataagtgttaggtttgaatcaaccgctgtagtaccagtggaactgttttgatttgcttagcgagaagatg

SEQ ID NO: 10109 - DNA, 3000 bp, Unknown
  misc_feature (1)..( 3000): cDNA_ID_2714901_gDNA_ID_2213626_Annot_ID_132039 3000 nt of promoter + ATG
tgattttgtttttggataattgccaatgaagcaaaagagctattttcaaccaagctaactattttaagaagggtggtgaaaaactcataagaacttccttacaccttataaacacgtaatgatcagcgtataaaacccaaaaaacagtacattaacggtgactatttaccttttcattacagagttcacaatgagaaatcaaatgaatgggaaatatagttttaagttaaatgaattcgtacgctgatgatgaccctagcttcggtttggtttgcgagggttagacacaatccgtgtctttgcaaaacagccatttcaaacctttctcatccttgttagccagcttagatgccactgacttgataccactcttcatataattcacaacaaacatcgccacctctctgcaaattacagtaaattgttgtaaaccattatagagtacaagagaatcaaagacttgttttgtctgtgagtaaatctccttacaagggtgagcaaggagttcgagaaccgttgatgaagtagacaaacaagaacgcatcaaaatgatgtcgattgattagataaaatccatgtaatctccgcacgcatctgaacatcaatcttttgtacaaacagatcgcagcattgttgtgtgcaatcacatgaaggtaaactccgcgacacacagataaaccggaagcatatttaattacctcactaataagtgacattgctgagagttaaaaaaagttgcagaaacatcagaaattataaaaccaagcaatatatagaacatgtttcagatacttattagtattataagagtcatgtaccgattccacggtttctgtatgtttctacaactccgagtgtcaagatgtatatcaaagtctcctctcctttcgaggaatcgtaatgtataagatcatctatctgtgcaagacacagaaaccatctgccagctgatgaagatagataataagaagataaaaacaacactagactcaattgcattaccagagctcccaaaacagattattcaatcataattcagacattattacaagccgctgttctaaagatttttgacaagtgaaataacttttatttagtgtacatgatcacagacgaaccaaaaaccataagcattatgaactagttcaacattcaaggtgattacaggacctgaaagatcattattgttcgaattacaaaaagacgaattcatagaatgaaaactaacctcgctatctttggcaagcacaaatttggcagtaacaaaaccaataagttcatcagagtgatcatcaggccggctccgatcaacagcagcccatgagacgatatcaactccgttcacaacactctggaaaaactcagactcatacctgacaaaacaaaaatcaatactttagaaatcttttcacaagacaccaacataggaaaatccaagtagatggatgcatacttgatggggaagatatcgcgatggatttgctccaaacgatctagatcattagggtttataggtctatagtgaatacttgggcaaagagagattcctgcatcttccattgatgaatcatctatgaatcttcgaggaaatcgcgacattgtttggtatccgaagaaccagaaaagccacttcccattgtgaagtgccagatcactggatccgacccgttgaagtaaatggatccggatagatttaacgaatctggatctgagtgggtttgtttggatttgattggttaatcttcggcgaaggaatcaatcaagaaccgagtttcgagcatgggaaagaaaaaggtgcttgcttgctttgccctctcctctgtctcttggggctttttctcgttccaagtgaagcatcttggctcgtgtgctttgcgacaaccaatcacgtgcctcttttagaaggagagtactaatgtactatttatgaatggaatattcgattctcttaaatgaaaaattgttccattttcaataatataaccatttttaacaataaaaattcgtactgttttttctatctgaaaaaaatggatttgaaaaaattcgtactttcgattcataatctgctttttattattattcgttataagtctgtactatggtaagagaaccttaaaatattcccctccacaacaaaaaataaaaatcaaactggagaagagttaggcagtaaaggagaatttccttgccctattaactcgattaggcgggccaatacacttgttatgtgttttccacttttcttcgttacaaatttagattagtcttacatgatgagccgttagatatcatagaaagaaataatcttataaaatttgataagatttctataatccacaaatctggatcgatgtttatttcagatttataaatattgtcttaaaaaaaaaattattggccgtctcggcggcaagcagagagagagagactcaacgttttcgtaacaacaaaactttgagtagcagaaaattatccaaaaaaaaacgtgaaacgcaaatggaaaaaattgagaaaagtaacgcgagtccagtgccacgtatgaaaaaaagagcttaggaccagatacgttaatcagaaaaagaccaggtacgtacgttaattaatgtttttttaaaaaggccaagcacgttagtccagcccacgtggtatttcttatcttaacaacaaaactaattttttaatttaataatcggacgttgcagaggtaatcagatcaacggtagagattacgacacgttatatcactctgcgaaactccaccgctttctggaattaaaaaaatcagagtgtataaataaaagagcagaggtaaaagctatctccagagtttaatataagtgtagacagagagagagagagcttctttcttcttctcttcgtcgctaagagatgatcttcgaatataaatctctgtaaggtttgcgaagaccggagtagtgaatctcggaattgttgaagaagacggtacaccggaatcaattgcgattttgatttatg

SEQ ID NO: 10110 - DNA, 3000 bp, Unknown
  misc_feature (1)..( 3000): cDNA_ID_2714898_gDNA_ID_2213626_Annot_ID_132040 3000 nt of promoter + ATG
tctgctgagaaaattggtttaagaaacctggactttggacagcctttgctagaaaggacatcatctgttgctgcctctgctccatcacatgaactttctgccccacattctgcagatgatgttcggtaacttgttgttgctgcctcaaccttacaagttcctgcataaggacgttcttatcgcgctgaagtctttccacttcctcttcgagtccaaatttgcccacttcaacgcacgcacccacagatgagtgctgaacttgaggttgttgtggaggctgcacttgtgcaggttttcgccggacaatactctttagtatttgcttttggcctcttaaaaagccctcgtttgcaaactcccagcggtctggatcaacttttctaaaaccctgaaaaaaagaagcatggagaatggaacagtcatcaaccgcaagaagttacttggattccgttgcaataggaagccaacatagaagatttgtataaacataaagaccattaaatacgttaataacaactattctagatatggtatgatacgttcactgggtctagctgcagcaccaaactaccatggtccaaggaaactaatacagttgttagtgtatcggcatgtacctggacggacaaatacaaacgaatggaaagctaacatgggacaactgatagaaattttgttttgtgacttaagaggccagaaatggaagtgctgaatcaaccaatcgtcagacacatatgagcacatgtccaaataagcctgcaaagttcgtggaaccttttggtaagtaaataagaacaggggaggaacaagctacgcaagagtatacacttgttagttttgcttgacctaagaaaattcattccagcctcacagacacggatgcaagctcagatacttagaaaaacaaaaacatatatgcctgcagttcacagggtatacatgtacaaaaaacaactgaagaacaatacaaatatgtgaaattatcttgcacgagtttgtcagaacccaaaaagatccaatcttaacagttagtgcaactaaaatcaacattaacacaacctactagacgtgcatagttcaaccaccagcgtcaacaactatataggaacatcaatcagtagcatcatactatacactaaataggagtcgacttctcaaagcaccttcttgcaaccttaaatcattcgtgagttttatcaataactaatgcttaattcaaccacaaaaaaaacaagagagtaaaataaaaatgaagcacataaagtaagattccctaaaatcgaactacgaaattgaagaaaatcgaatcaatgaagagaaaaacaaataaaaaagaatcgatcgaagttcactcacataagtattgagctgtctgacgaagctggagaaattgttgtgcttgaaatactttggtagaaactgtttggcgaactcaggcacgttccaaaccacgaagctgttgtttccgctgctccaagacaccacgtcgtccgtcaatggatcgtcaaccatatcgtacgttttgctcagaaaaggcggaatggagctcatcaccgccgtcgaagatttcgccgtcgctacagattcgcaaaccgttcccataaatcaaaatcgcaattgattccggtgtaccgtcttcttcaacaattccgagattcactactccggtcttcgcaaaccttacagagatttatattcgaagatcatctcttagcgacgaagagaagaagaaagaagctctctctctctctgtctacacttatattaaactctggagatagcttttacctctgctcttttatttatacactctgatttttttaattccagaaagcggtggagtttcgcagagtgatataacgtgtcgtaatctctaccgttgatctgattacctctgcaacgtccgattattaaattaaaaaattagttttgttgttaagataagaaataccacgtgggctggactaacgtgcttggcctttttaaaaaaacattaattaacgtacgtacctggtctttttctgattaacgtatctggtcctaagctctttttttcatacgtggcactggactcgcgttacttttctcaattttttccatttgcgtttcacgtttttttttggataattttctgctactcaaagttttgttgttacgaaaacgttgagtctctctctctctgcttgccgccgagacggccaataattttttttttaagacaatatttataaatctgaaataaacatcgatccagatttgtggattatagaaatcttatcaaattttataagattatttctttctatgatatctaacggctcatcatgtaagactaatctaaatttgtaacgaagaaaagtggaaaacacataacaagtgtattggcccgcctaatcgagttaatagggcaaggaaattctcctttactgcctaactcttctccagtttgatttttattttttgttgtggaggggaatattttaaggttctcttaccatagtacagacttataacgaataataataaaaagcagattatgaatcgaaagtacgaattttttcaaatccatttttttcagatagaaaaaacagtacgaatttttattgttaaaaatggttatattattgaaaatggaacaatttttcatttaagagaatcgaatattccattcataaatagtacattagtactctccttctaaaagaggcacgtgattggttgtcgcaaagcacacgagccaagatgcttcacttggaacgagaaaaagccccaagagacagaggagagggcaaagcaagcaagcacctttttctttcccatgctcgaaactcggttcttgattgattccttcgccgaagattaaccaatcaaatccaaacaaacccactcagatccagattcgttaaatctatccggatccatttacttcaacgggtcggatccagtgatctggcacttcacaatgggaagtggcttttctggttcttcggataccaaaca

SEQ ID NO: 10111 - DNA, 3000 bp, Unknown
  misc_feature (1)..( 3000): cDNA_ID_3035344_gDNA_ID_2213626_Annot_ID_132041 3000 nt of promoter + ATG
agagaagaagaaagaagctctctctctctctgtctacacttatattaaactctggagatagcttttacctctgctcttttatttatacactctgatttttttaattccagaaagcggtggagtttcgcagagtgatataacgtgtcgtaatctctaccgttgatctgattacctctgcaacgtccgattattaaattaaaaaattagttttgttgttaagataagaaataccacgtgggctggactaacgtgcttggcctttttaaaaaaacattaattaacgtacgtacctggtctttttctgattaacgtatctggtcctaagctctttttttcatacgtggcactggactcgcgttacttttctcaattttttccatttgcgtttcacgtttttttttggataattttctgctactcaaagttttgttgttacgaaaacgttgagtctctctctctctgcttgccgccgagacggccaataattttttttttaagacaatatttataaatctgaaataaacatcgatccagatttgtggattatagaaatcttatcaaattttataagattatttctttctatgatatctaacggctcatcatgtaagactaatctaaatttgtaacgaagaaaagtggaaaacacataacaagtgtattggcccgcctaatcgagttaatagggcaaggaaattctcctttactgcctaactcttctccagtttgatttttattttttgttgtggaggggaatattttaaggttctcttaccatagtacagacttataacgaataataataaaaagcagattatgaatcgaaagtacgaattttttcaaatccatttttttcagatagaaaaaacagtacgaatttttattgttaaaaatggttatattattgaaaatggaacaatttttcatttaagagaatcgaatattccattcataaatagtacattagtactctccttctaaaagaggcacgtgattggttgtcgcaaagcacacgagccaagatgcttcacttggaacgagaaaaagccccaagagacagaggagagggcaaagcaagcaagcacctttttctttcccatgctcgaaactcggttcttgattgattccttcgccgaagattaaccaatcaaatccaaacaaacccactcagatccagattcgttaaatctatccggatccatttacttcaacgggtcggatccagtgatctggcacttcacaatgggaagtggcttttctggttcttcggataccaaacaatgtcgcgatttcctcgaagattcatagatgattcatcaatggaagatgcaggaatctctctttgcccaagtattcactatagacctataaaccctaatgatctagatcgtttggagcaaatccatcgcgatatcttccccatcaagtatgcatccatctacttggattttcctatgttggtgtcttgtgaaaagatttctaaagtattgatttttgttttgtcaggtatgagtctgagtttttccagagtgttgtgaacggagttgatatcgtctcatgggctgctgttgatcggagccggcctgatgatcactctgatgaacttattggttttgttactgccaaatttgtgcttgccaaagatagcgaggttagttttcattctatgaattcgtctttttgtaattcgaacaataatgatctttcaggtcctgtaatcaccttgaatgttgaactagttcataatgcttatggtttttggttcgtctgtgatcatgtacactaaataaaagttatttcacttgtcaaaaatctttagaacagcggcttgtaataatgtctgaattatgattgaataatctgttttgggagctctggtaatgcaattgagtctagtgttgtttttatcttcttattatctatcttcatcagctggcagatggtttctgtgtcttgcacagatagatgatcttatacattacgattcctcgaaaggagaggagactttgatatacatcttgacactcggagttgtagaaacatacagaaaccgtggaatcggtacatgactcttataatactaataagtatctgaaacatgttctatatattgcttggttttataatttctgatgtttctgcaactttttttaactctcagcaatgtcacttattagtgaggtaattaaatatgcttccggtttatctgtgtgtcgcggagtttaccttcatgtgattgcacacaacaatgctgcgatctgtttgtacaaaagattgatgttcagatgcgtgcggagattacatggattttatctaatcaatcgacatcattttgatgcgttcttgtttgtctacttcatcaacggttctcgaactccttgctcacccttgtaaggagatttactcacagacaaaacaagtctttgattctcttgtactctataatggtttacaacaatttactgtaatttgcagagaggtggcgatgtttgttgtgaattatatgaagagtggtatcaagtcagtggcatctaagctggctaacaaggatgagaaaggtttgaaatggctgttttgcaaagacacggattgtgtctaaccctcgcaaaccaaaccgaagctagggtcatcatcagcgtacgaattcatttaacttaaaactatatttcccattcatttgatttctcattgtgaactctgtaatgaaaaggtaaatagtcaccgttaatgtactgttttttgggttttatacgctgatcattacgtgtttataaggtgtaaggaagttcttatgagtttttcaccacccttcttaaaatagttagcttggttgaaaatagctcttttgcttcattggcaattatccaaaaacaaaatcaccagcttaggatgtcaaaaaataggttaaacgataattttatttacttccctcaaaaaagcctgagaaaatccccatcaaaggccaaaagaacagaaaaaagtttttttcacgcggtggca

SEQ ID NO: 10112 - DNA, 3000 bp, Unknown
  misc_feature (1)..( 3000): cDNA_ID_3035342_gDNA_ID_2213626_Annot_ID_132043 3000 nt of promoter + ATG
tgacgtaaagaaaaaccatgaatcttcgtcaatgtatattgtggaccctgcaaccaagtgcactcgggtttttggatccggagcttttccaggtttcactggtagaattcgggttgacccgattactggtggagcctttaattcacacggaatcaaccacttgaaattcttgattccttctatttgggaccctaagaccaaatcttgctggactcctatgtaaaccgttattattacgacatgttacacagtttttacccttcatgaacttttaaggttgttttgttattggaaatattcaatatacttggaaatacttcatgaacttctagttccaagtcttcatgaactagactttgaacgatcctcgtgtaaattaaattctgtgagaaagaaaatccatgatttagcagataatactacagtatttgacaacaacaacaacaaaatgttgataagtaagaaaataaagctcgaagatttgtaactattcatgattttagaaaatcggaataatgaatagtgtacttatttggacactgaataagaagttacacaagtcccgattgaaatttaatttactaatgatcgttacaaaattatttgtctctttgtcatcaatcctgttagtgaatattagaattattattcattgtaaacaaataggatcatccagattgagaagtaaataattttatgtatgttacaaatgaaataattaattgatcgtaaaacctctctgaccttatatatatcgagtctcactattcaactttttcattgcacttgtcgtacaaaggagtaaacattgatatgggaaaggtatgtgcattcctgtctttggtaattccagtaatttgttaagtaaattatgtgaacttatattttgtgttttggatttggttctaaagaacaagcaaaatggagaatcagacaacaagtctgaaaagaagaaccagaaaaatggagattcatcagtcgataagtctgataagaaaaatcaatgtaaagaaattgttctgaaggtttacatgcactgtgaaggatgtgcatcacaagtttctcattgcttgaggggctatgatggtaatactctattaaaagaaacattattagattactttccctctttaatggaatcatatatatatggtctcgatcataagaatcaatgtcaaatatttaatcatttatcattgagtgaaattgtactataatttaacttaagcattatctagtctggtttcagttttatttttctttcctgtaatctagagaagttgtctattaattcccacaatgacataacgaatagtaatctctagttcttaaagcatcaattaaaaaataggattaccgtttttttcttcttactcatgactcataagtagctattatcttatttgtcttataggggttgagcatattaagacagagataggagacaataaagttgttgtgtctggaaaatttgatgatccgttgaagatattacgaagagtgcaaaagaaatttagtagaaatgctgagatgatttccccaaaacataaccctaaacaagatcagaaggagccacagcaaaagaaagaagtaagttatttccaattatttcgtgttagaacttagatatatactctcatttatatcataccttgtctaattaatctgagaataacaactaacatatctaatcatttctaaatattttttgcatgattttagagtgctcccgagatcaaaactgcaattttaagaatgaacatgcactgtgaaggatgtgttcatgaaatcaaaagaggcattgaaaaaataaaaggtaatctttgtatatacatatagaaataatacgatatcgaaagttaaaaaaaacaacttagaatatgtttgtttgttttgacaaattaaaaggcattcaatcggtggaaccagaccggtcaaagtcaacggtagtggtacgaggagtcatggatcctccaaaacttgtggagaaaatcaagaaaaaacttgggaaacatgcagagcttctaagtcaaattacagagaaaggcaaagacaataataagaagaacaataataagaaggaagaaagtgatggaaacaaaatctttagttaccctcctcagtattcatctcaacatgcttatccctctcagatttttagcgacgaaaatgtacattcttgttcaatcatgtgattttttgacccgtaaaattagagtctttttaagttatcttttatggttttgatttccttgctacacatttctatatctcaatagattttaatttaatttaatttttgagtgacactttatgaaagtaagatttggtgtcatgtgtatactcgattactagattatgtttgtagttgtgggccttttgtacaattatttgtaaaaaaaaattaacagggcattagagtataaaaaaaaagaatgtgggtatatattatattttaataacttagggtctattttgtaatataatataagttgagagtacttgttgcatttaacccaaaaagaaaaagacaagggaggacgaagatgaattgtctcaatttttagggttcatcaaaatttgaacaaaagggacctgttttgctcaatttttgatagcagaagacgaatctggatctggggtcacttcaagtaagtaaagagttaaccttttgcttttttttgtaccataaattgtgttcgaatggtacgattgagaaattgcttacgaatcaatgaaataacagttaagattttgatgatgaatgctcatgaaaatctatttaagtttgattgagaaattgaagaagagaataagaaatcgagagatttattgcgtaaatggtaatactttatgtttcagttctgctatttagatccaagcttgaatatgtatcccttagctttatttctgtaggttaagattgtttggttgttgaatgttctttgtttgtgcattgcctttgcaggattgaattaagaggtttttaagtaagttgag

SEQ ID NO: 10113 - DNA, 3000 bp, Unknown
  misc_feature (1)..( 3000): cDNA_ID_2714877_gDNA_ID_2213626_Annot_ID_132046 3000 nt of promoter + ATG
agagcctttgcacacttgaagtagcatcttgctccttctttaaagcctgggttttctcttcattcacagtttcaagctcattcttcagtttctctgcttctttttcactcttagatgattcttcttctgcaatacctagcttctgttcagatttctcaagatcaaccttttgactagcaactgtcatctccaataactcaattttctccttaagatcagtaatttcagattccatatcgtgcaatctactattgcttacttccagctgctttgtcacagataccagagataccgaagcacatttctccagcttgttagcttcttccaaccgtttctccagttctttcgctttgttttgccactcgtcagcaaagccatgcgcataagattctgccatttttgcagcttctaagtcaacattaagctgctcaatgatcatctctagttccttgacctttgcttccaaacttctcgcattctcaaggtctctttttagatccactatctccgcccctagctttaaagcaatctcattcttggagatgatttccttctctcgagttgaatcaagcaaagccttcaaccgtattaactctgacgacaagatttcaactttctctgcatgaattgcagccatcttactagcatcatctgcacgacacaaagccttactcttggcatctttagcattagccaattcttgattgacattctccagctcctgtgttaccaaaagaagagtagctgattctgaagcatgttggttcttgacattctctagttctttcttcaactcttcttcttttctctgaaccgcctctatccctgcctcaacaacctcaaatttctcaatttcgaagttctccagggactttttctgagcttctaaagcctcatctagtttctcagatgcctcttcagcttctttccgcgcttctttaagttgatcaagtgctttagctttttcattctcgagcgatgctatcagctcattggctttctttaaatcttccttgatttgaactgactgaggttgcgattctgatactctcacagcccgtatttgagttttctgcaaacaatcataagacaacaaaacaatggatatcaacatttgcagcatagtgtgtcaaaactaaaccaagttaagaccaggcaaactattatgaacacacttacttctggtggggttggagctttgggggacctcttatcagtactaggctttgagttagaagaagggcgctcgaacgaaagccgtgactgttgttgagtcggtgaaggagaattagaatcaggtttagtcacaatccgagtgagtctaggcactcttagagatgttgaagatgatttcctcaaagtagtgtcagataaaccatttctgcttcagaaaacaacaaaggtctctcatcaagcaagcaaaacaaaacaaaacaaaacaaaacacgtgagaattgattacacttgccaaaatcattaaaaaaaaaaaactaagaactctgccatggagccttagattaactaaattataaagtagaagagaagacaaataaaaatcaacataaatacaacatcacaacaacaactaagaactctgcaatgaaattattattattttttatatataagtgaagctgcttgtaagattaaaaaaatcacagaaacaggaacaatcagacaaatgtgttacaaatagaatcactaaaaaccaggagattaaaccctaaacccaaacctagtcagatctaccacatcatcatagacaacctcaagatagacccagatcggaatttgaatcgacgaaatattccaccgacatcaaaaaaaggatcggagaatgaatcttaataaggaaaaagacacttacttaatcttagaagccatagtcacagcctctgtctcgttgctgcggatcagtgagaagtaaattacgttagaggaggcgaccaaggaaaaattgagacttgatatacattattaaattatggaacctggaaactcaaatttgctcgaactctaactgggttcccatttttagcgtagagatcaagatcaagagagagagagacaatgattcggattaaggaaacgactgatgaacctaacgtagaagaaaatgatactcctagttggtgaggttttgtctcacgagtggccacactccccaaaaagtgtcaaaatgcaaactataaaataaattaaatgaattaaaaaaaatccgattcggtttcctacgtgataaacgcaaacaataacacgactaaataatcgcttgaattatcatcataaaactaaaacgtgagattagggagattaaaagactagtcttccccatagctaatgcggaataatatctgtataccgttactataaatattcgatatgtaccaaacttttttgtttgtttttttctagtaacaaaaagaagagtatatatatgcaacttagggaaatttctgaaatatgtaaaagatactatttgattgattgataactaactttgttatacatcgcattcgcaatatcttgttgaatacaatatctctacgactctaccattaggcaaactttttatcgggcccagtggcccatatttattaaggtccatttattaaccgcaagaaggactgggagtctcaaagttgacctggctccttccataaaagcagtttagtaaataaatggactgtaatcagattgatatttgaaaaaaaatgcttctgaaaacaaaaattcacttggaaaactttaaaaattagtcgcgggaaaatgagagagatttttggcgggatctctatataattttccattagttattaattatttattttatgagagtaacttgagatttgagaataagaaaagttgaaatttgtaaaagatatgagaaattagtaaattccagaaacttattagaagcggcggatcgaattcgcgacgagcgttccattagggtttcgaatcaacatcaacaaacgacgagagaaaactttttaaaac

SEQ ID NO: 10114 - DNA, 3000 bp, Unknown
  misc_feature (1)..( 3000): cDNA_ID_2714872_gDNA_ID_2213626_Annot_ID_132048 3000 nt of promoter + ATG
attccttatgcaaaaagtccccgtgatttgaaggatttgcagtctgatggtaaacaaggtagcttgtcaaaacaagccagacatctaagtcgaaaccgtctagaagatatagttgcttcgggtatgatgtccactggttataggttttttactccattagtaaacatttctctgcgttaaagatatcatgattgacacccagggatttgttttttacctatgcagtgggggattcatctaagaatgaaaagtgtagttcaagtgagcaaatatcaagtgaagcgaaatgtaaagatgaactggcacaagtagatggtgtaccccggtcgagggaattcagagaggcgggggagaaaaccaaagatgctgttggtaatcaccaaaagcgaaatattggcgaggataataataagggcaataggttgcgagcagcggttgatgctgcactgcgaaaaaaacccagctttagcaaaaacagagggttggagcaatctgatttgcctccagtgtctaatgtggattctggttgtaataaggctttaaaatgtttgtcctcaaaggtgccggtcataagagattggcctgtgggattccaaggattgccaggagggcatccaaatttacggacagacaagcagacaaatacagtaaatgaaaagcagtttacactcgctggtactgatgcaacgactgcttcccaatctgttgagcccgaagttaacgatccttctgtacaatcggtcatgagagatttgcctgtggctgccccaaatgttctgtcgacaacctcagccatcccaaagcctgagtatatttggcagtatggtttcgttcctttttatgaagatcacttttcttgtttaattacttctagataaaccttctatttcctttgaccagaggggacttggaggtgcagaaaagcagaaatttgtcagcaatgcatagtggaatacaagcgtatctttcaaccttagcttcacctaaggtggttgaagtggtgaaacaatttcctgaaaaagtcaccttgaatgaagtacccaggcttagttcatggcctgcacagtttcaagatacaggtgctaaggaacagcatgtggctcttttcttctttgccaaggacatcgagaggtaactgtatataattgtgttttgtttcacatgcttattctgtttttggtcgtttcaatgttttatttcctaatccactgacgaaatatattaaatgttattgtgacacacagttatgagaaaaattataagcctctggtagataacatgattcagaaagatttagccctaaagggaaacctcgagggcgttgagcttttgatatttgcgtccaaccagcttcctcaagattgccagcgtaagaatgttaactagattcttacgattaaactttctatgtgaagtttttggaatctcactgtctttacaatgcttgcttaccaaattaatatctatttctcccattgagaagcaaatatggctctttagtcatgctaaaacactctctaataagtttcaaaaatgtttcactgatgtgtcgttccgtataaatgtaaggcctgatctaacctgtagaaagtctattgcttagtgctacatcgattctgtttgcaggctggaacatgttatttttcctttggggtgtattccgaggaaaaaaagagagttgctctaatccaccaaagaacacacccctcccggcatcttgtgtttcgccaaatcgtgatacctttcgccatgagaatccaagcaacaaaaagtctttgactgatcgcacattgagcagaatgcaatcgtgtatgaaggtgggttgttctagacttctagtcctctgctaattatacatttcttctctgaatttacattggccattcagttttccgctctagttaaaaaaaatcttactctcaggtctgttttagtttcgagttttctagacagttgctatgtctatcttaacatcatgcaaatattgatgcattcatggatatgaaacaggaggaggatgctaaagagggtaaagcgtgcagtggcactgagaaggagaatgcattctctgtttcatatggagaaggtgaagtggatgtagaaactgaggaaggagagataggtgttagcccacagttgaagtatgagaagacggcaggtaatcaaaaggatttgctttcagctgtaacgagctctgagaataatttcgctgaccaggaaaaacttttagctgtgttcacgaatcgtctgtttttggcattgacagggcctgggacagtgaaatccgccgacatgaaccagagagtgaacgtggatgatctgaataaagaagggctgtgtgaaggtccagcgaataaaaagctgaagacagttacaggagtagaaactggatgtagcattgtcaggagggatacatctgttcataaatttgcttcaaggaaattcgtctagatgggaacacaagaagaagcagaatgtgaatacttgtttgtttttcgttagagacttccctgacaggtcctcataggaaacatatcttaaaaagtaaccaaactagtgtctcttaattttgattcatttgttatcatgaagaagacccaatcacagctttgtttgtacatattacggcgatgggcaaaagacatatgacaagatgttgattttggttgacttgactgatctgcttaagctaaagtgtgttttggctaatttcttttctctcttctgtttatgaatcttgttcattgaagagatagcatcggttcatcgaagcagttgattcgaaagtgaaatgttgtggtgtcatatttgcgaattacaaataataggaagggttttagcaaataagtaattccttgagtgtattttgggaaataagtaactcttaagggatatgttttagaaaatagataactcttctggtggacaaatggcgtatgtgttcgtcttcctcttgtatgttactcttctcagatctcttgttcgttttgatgtacaatg

SEQ ID NO: 10115 - DNA, 3000 bp, Unknown
  misc_feature (1)..( 3000): cDNA_ID_2714868_gDNA_ID_2213626_Annot_ID_132049 3000 nt of promoter + ATG
attaacaattacaacttaatgggctttatggctacatttttgtaggctcaaatcaattgataatgaagcccatttcataaatatgtaaccataataagttcggccatgacacattgggcgggcttacacgtataacaaacacaacagttaagagcaaaagacacaaaaaaagtgtagagacaaatcgccaacttgtagaaacagattaaaacagagtagtaagtgtttgataatccaaaactagatgaatattatcaaatatatctaaaaagaagttttaaggacattttggacggccttctttagtcttccagttgttgtaacatggacaagtttgtttgttgccgaaagtgccaggaggaacacaaagacattttttgcaacacttgaggcaaaagaacatgcatggcttcttgtgtgatgttgctgaacaacggaagctacactttgagttgcactctacaattgaagtttccatcaaaaaagcatatcacaacaaacaaacaaaaaacaaatcattgagatctttatgttcatgcttataattcacagcatacagtatactagaaaactgacatttcacaaaataaacaccattattgttactttaaagtttatttatcaacattatcaataattagtgattaataaattaatatgatcatatgaaacaacaaaagttttgagtccgtacgttggggtttgagtttgccaccaccacgagcagcctgtcatatatatataaaacttcaatatcagaaaactaatagccattaaatttttaaggaatgtatagcctttggtcatttttacctccacgagcagcctgtaatatataaaacttcaatatcagactttaataaactgaatctgttttgagtggtttacctgaacgaggttggagactgacaataaaaagagaagagtcaagaagaaaagagcatttcttctgatacaattcgccatttttttggttaaaaaatcttgattgccaatgaatgattcttaagaaacaataaaacggattaaagatatttatagagaaaatgattagtgtggatttccttcaatggtattcaagaaatttggtattgccaatgttcatgccgtgattctggggaagtaggtcattttaatttctaattacgtaccacacttgtcgtttttgtctcttagacaatgtcaaagactcaacagtgtaaattactaatcactaattacccacgtatagagaaccaaaagactaaaatcttgccttggaaaaaaaaaaaaaaaacatttctctcagtgaaaattggaaaattatattgtgtagttgactagtgtctaaacgctctgtttggaaaatgaaaatgtcactaatgataatatctgtatatagaaaggggaaaataagcgagtttaggaaattaattaagctaattgtgaagtgcgactaaaaagaaaaaaaagtgtaatagaaagcgaaaaatgcggcgaagttgagcatgtgatctttgtgggccatttcattgattttttgttttgtcatattatttgtgtttttagttttaatgtaaaaaaaatctgattaattttaaaaggactggacaattattaatggacatcaccataaaatctgtgaccataaatttttataaaaggcccattagcccaacggttttccaattacagaatttgggctgaaacggccgaaaataatcttaggatgacgaaatggccattttgaaattctcttcttcgtttggtctattattttattttttaacgttaacggcctaacaagttttcctaacttaaagataagtgggaacagataaaacaattaaaattaacttccaatgaaattaccaaattaacaattaagttaataatgtaattctaaattaggcttaagaagaaaacttaaatatttatgtttatataattatctgtcagaagtgcagaattcttatttttccagagtagagaggagtgctttcatggcggtaaaaggtaaaatactaatcactgtaaaaatctcttaactcttgcgttgtgtttaatactaatagactaaaattagtaattaatttataaataattgcgtgtgtatatgcacgtatgtccgtacgtatctacgtgtaggtcctagatatagagaatccttgaggtggctatttaatagcagctctcattatctgggctctgtgttttgaggaaaagcgatttatcgagaaacgaacttagggccacgccagagagagagagagagagagagagggaaatcgaatctggattttagaggaactagggtttgtatttgtactgcgaaaatcaattaatggtaagtttagggttttgtttcttctcgattggctcatgctgatagtgattaagatgatgattgcggaaatccaaatgtcgaggaagatgattttgagacctcaacaatgcaatcttatactctgatttttcggagtttttagagactaatttgcttgattatcgttagattccttgttttctggagttataatcgtgattttattcagagattggtcactgtcctttgacttttctttgtttttaaaaaaatagtaaattatgtgatttccttgagggttcttagttagaaattttgttcagtttgcatgttataccaatgttgttaagcagcatgattgaatcatctgggattgtggttaatgtttttgttgcagttattaattatgctctttgttctttctgttcacagttggattagcggattagaagtcagtgctcatcatttctgttgtttatggtaagtttatctgttttttgtattagcaattgtttggcttgttcttgcttaaagatggataatttgtatcgttttatgtaaattttgttattacgaaataatctttcagtagatttttcctttcatgcttctttttaattcactgacactattttcctaacattctctatatgatttgcttgaaggctgatagaagagttggtaatcgccccatg

SEQ ID NO: 10116 - DNA, 3000 bp, Unknown
  misc_feature (1)..( 3000): cDNA_ID_2714861_gDNA_ID_2213626_Annot_ID_132052 3000 nt of promoter + ATG
agaatcttagaaaacactaacccacatcgaaatgagttttaattgcagggcacagacagaatcattcaaaattatacatataaattgagtgaaagagaaaaaagagagaccttgatgaggtgttttgtggtttgaagaagcttagcagcaccaagaagcatagcaacatgagtatcatgaccacaagcatgcatctttccatctactttacttttcgattcccattccactaattcctttttttgtccccattttttcaaattcattagtcaaacaaagcaatctaaaaatcagagtaaaaatcggaactttgattattagatttcaaacctgtaacggaagtgcgtccatgtcggctctaagtccgaaaacaggtttcgaacaggatccgatccaagcgacgacgccagtcttcgccacaggatacttatacttcactccaagcgagtcaagctcgtctcgaacgagttgactcgttttgaactcctgaaaccctgtctctgggttctcatgaatctttctcctaattcctctcatccactcgaagaactcaggatccttggctgaatgaagcatcccgcgagcgagtgactcgagacccgaaccagaatcgtagctcccagctgaagacagaggagggagaaagaagaaggtaacgaagatgacaaagaagctccctgagaaatccattctgatttcttttgtttgtcgatgtaaactggcaagtgtcaatgaaagaaaggacaacggtgaatacgatgatgatgaaggagaaggagttggatcaccgatccatttttaatatttatatagtacgtaatttacacacgtttttggaaactcttttaatcgtttttaaatacgtatacgcctctaatgtgaaattcataatttatggttgtaatgtgaagaaaataatgaaataccaaagataaaatatgaaaatgatacaatgtagtatatttacggtataaaaggaatatttacttgaaatgaattagtacgtttaatacacgattttaccatttatgttaatgaaaattaacacttttaaaataaaacatggcatgaattagagttgtgagaatcacatgtaggcctttaaggttcttaaatttttaattccttataacataggcccatgtatttgattgacatataggccattgggttcttcgacttttaaattacttataacaaaggcccacctatttgaagcgcattgttaaacattttgtttatattttgattatgatcgaaaattctctagaacaattcgtacaaaagaagctgtttacgaaagtagctgtacatgcgaacataatcaataaaaatgtaaatgactaatgaaacatcagaatatccgtacaaaattgtgactttatattatttagttataggtacaaagttgtggagagtaaaaaaataaaaaaggtaaaaagttgtggaatagacctatgaaacaatcacaaacatacaaccaaaatgcaaattgtaattacgcaacagaggctttcttttcaaggaagtcaagtgtaagatttgcaaatgccccaattattatttgagagaaaaagggatattgctaatcacaattaacggtcacattacaattcccttttttctctgttatttcctcttctttcacaattaagttcttaacggtcacataaatattttgttttttatataatgagtttaattaagttgaagaatcaactgataaggttgatgatccgatcctcaaaagtatactaaccacaacactgtctacgttcatgttagtacctacttcaaagtccatgtacgttgggactggctgtatcttccgccgagagcagcagagagcgtcatcgctgtcttggaacgagagaaaggtcgagactatctctaaggcaaccaaaagcttagctatgatgaagacatctttctctctctctttgcctatgaatggagaatacaacaaataatataaagtgatggacatttctatgctttgcttctcttctccaaagagaaatagatgaaaaagattgttgattttcgtttctctcgaagaagaagaaagaagaagaaggtgaatagagacttttgatttctcaagaatgaacaagtagattgtagagtgttagtgtttagttctgttcttaggttgcagagattgtgtatgtgtggcgtttgatgtctcgtgttggagaggtggtctcgtttagagtgttagtgtttagttctgttcttctgttgatctgtgttttttttaaatgtaaattacacaagtatgcaaaacaaatctcttctcagaaaggggctactgttatatcatgagatttataagacaaaatgtaaaatatcggaaaaataaaacaacataattttggtgttgaatgagtttttcttgtccacacaacggcagaagcagtagacgattgttcctttgtctcttgatcacaaaccgatttcaaagtgttcttcgcatttttctcatcaatgtaagtgaaccagccagagaaagacaagtatgcaccaatatcattccggccccatattcagaataaattagaacatctttttccttccgtgttatgcacttgttctaaaaaaaaagaattccggcccatattcagaataaggagtccagtccaatagtctcaagtccaaacccgactcgggtctgtccgacccggaaaagagaactgattacagaatgcgggttttgtcaagagaaagttggatgataaaattgaggtgaaatctaatcttcaaatgatcattggttagctttttgtataacggattttctgaaatcctcttatttcccatatcggaccgtgattattgggtgatttcggatgcctaattgggtaattaatataatacagtataagattagatgcctcgaatattcgctctgtgcctaaccacaaaaaccgtaacttttggttttctctgaaacacatcccaaagtaaagaaagcatcactcttttcgtcttctctcgaaa

SEQ ID NO: 10117 - DNA, 584 bp, Unknown
  misc_feature (1)..( 584): cDNA_ID_2714819_gDNA_ID_2213626_Annot_ID_195883 3000 nt of promoter + ATG
ttcagttgttcatatcagcgatgtgatttagagaaggaaagaaagaagttagaaatcgtgcaaatggcttggtattattaacttccaacatgggaccagatatactctgtttatttcagagtcgagcaaatcactttttctggttttatagtattgtgacctttcaagtttcaatcgatttgggttacaaacttacttttttggtacttagatttatttagccttgaagcttactttcatatccgtgttacctcccagtgagaaactttttctttggagtagcttagctaagctgtatatttaattataatagatagttgtagacagacatgtggacgtgccggagtggttatcgggcatgactagaaatcatgtgggctctgcccgcgcaggttcgaatcctgccgttcacgtatttttaatttaattttgttcttttttaaaaaaaatctggcatacttgtgaaactgaaaccacatgacacatgtgctccctaaacgtcgccgtgaccagatagctccggtcagagtcattatctctctctcgctcgctctctccatcttcatctctcttgctgaaaaatg

SEQ ID NO: 10118 - DNA, 3000 bp, Unknown
  misc_feature (1)..( 3000): cDNA_ID_3035298_gDNA_ID_2213626_Annot_ID_195882 3000 nt of promoter + ATG
tgtcagaacaagaaaacaagaacacgaagttagaaacaggaacaagacttactcgaacttggaatagatattcccgaggataaaccgccaatgaaacagacttgtcaaactgaaaagtgacagttgggaaccgatctaatctgtgaatttgacagaaaatttcagagggtcaaaacatcaaacattatatactaggtgtataaaatcagtcattccatcagattcagctaaatccaactccatttcaattccaaaagcaaaaactagtacatttccagcaaataacagtaccatttcaaacattctcactaaacaccaagaatgacaaagcgatgagttaaattcttacttgtctgtataatggaaacaagtaaacgactcttgaactgtatgcaaagtaagctctggatgtgaagccaatatctgatggaaactcaagggaaaaaaacataagtgttaagaactttgtaaaataagacagaaagaattcacaagtaacagaatatagtactgacctcattcagtaacgggttataaacagcatcaggaagatacaccagagttgtaccactatcaataataactcctttgtcatctcccgaatcaaaagcattcgaagaaagttctaaaactgaattaccaacttcaattgcattgaggttgacactatagtgagctctgtgaaagagttgcaaacagtgtaagaaattcaaaacttcttgacaaagaaccaaagaagaagagctttaagagaaaggcattcacttacgatttagagagcataggtgtagtctttactttcggcgacacgacttctccaatggcgaatataccacctccattgttgttatccaaacaatgcgcaaaagaccttttgacctttccttgtgaagctagctgcgatataaacgatgaatttgattgtccaaatcccattatcccatcaaccgcagcttgtgactctccgagctgaccagactgtttagacccacatctgtataagaaccacaaataacagtgattcagagatttgcaagccacaacaagctacaaaattcatagaagaataaagctgtttttccttaaactaacccgaagataatagttccgttggtggaaccggtttgacgatttccagtaactaaatccaaatgaacaacatctttcaccaagtatccattagttgaactcccatcgccatacataataacatactgacaagtagaacctgagtgacactcagatctttggttaacgtaagagcaaaagttgtcactgcacgaaacagattttgcagtggacgaagcatccacatcataaggtgtcagctctacctgaaagataatgaaactatgaaactgaaaacataatgtaacttagagttctgtttttttttttggagggatagaattgatggtatataccagatcacttttcctaggacatctgatgcaaccagcacaattcacccataagatatcacttcctgtatcaacttgaacatggaagtctcttgatggagttccgagtccgattttagcgaagtataaactgaaattaaaaacaacaaacataaagaacaagaatcaacattttaccgtagaagacacaagaagaagaccatttcataatgagtcaagaaccaatcaaagagttgagaatctcaatagattcaaaagctttgttttttcttcagattccacatttaaaaaagacaaaaaaaatccgactttttgttaaaaaattcccaaaattacaggttctggtaaatggcgattcgaacccaatagactcaggctggctatcgccgccgagaggaatatcgatggcggagaggagtcttgagtgacggtggacgtcgtgagctctgagagctccaagatcttttactctttttccggcgaacttgcttcgaacttcaaataccaaattctccgaagccgtcgccgccgtcgagaattgcgggtcaatcagcaacgccgccgacagcaaaatagccgacaagaaccactgtctccgcctgagatccatgaccggagatatccctaactaagttagttgagaaatccaaacgaaaaaaatgaagagaagaaaaaaagcaaaagaaagaaaagtatagtttggcggtggagtacgatttaggacaaagaagaagaagaagaaaaattggtactttccaaataaaaaagtattttaatcattaactaaacaacattttgaaattaatttaagactggctagaaaattatgtactatataataagattccatgactacaaaaaaaaaaactaattaaatttcaagattgtaataattatttaaaaagaaaactgaaataactgctagaatacacttttggcagctgtaaattattttcacttgtataattcattttttcacatgaatatgcattgtcacattattaggctcatttttaacatttttttaccgtctaatgtagattttaacaaacaaacaaaaatcgactctagatgataatgagtaatgataaaatcatcagttgtcataaattgtaggattcaaaactgtttttgatcacaaatatgagagttttccttagatacaaaactagtaatcactgaactatcatgcatgttgttggtattttgtattttagtctaaaatagttaaatttatggaaaataaaagaattcatgtttgtctcatcattttgagggaccgaaccgtaatttcgcagtaagaaacataaatatcaatcttaattcctcaagaattctacacctcccgttccatctatcacgaaaacaaataattacagtaagtacccccgaatatccttgttcatccgaagcaattcgaggataataccgtctttttctctttaaaatccaattaacataaaataaatatttgctcagtccgttgagacctcacacacactctctctctgatcattcaacttttcgaaattttgcttcatcgtcttcgtcatcgtctctctgttgaattcctcaaaca

SEQ ID NO: 10119 - DNA, 3000 bp, Unknown
  misc_feature (1)..( 3000): cDNA_ID_1396296_gDNA_ID_2213626_Annot_ID_195881 3000 nt of promoter + ATG
tacagtgagaaaccaggccacacttttgctttaactactaactttgatgacctagtttcctcgagttatgatgctctggtcattcctggaggcagagcaccagaatatctggccttgaacgaacatgtccttaacatagttaaagagttcatgaattctgagaaaccagttgcgtctatttgccacggacaacagatcttagctgctgctggtgtcctcaaggtcagcactgttccttcgtagctctaattttatttaactatgtcctcctttttcttgccactacaagttgtttgaggaatttattctatgtgacctgttcactggctggtgcagggaaggaaatgcactgcttatccagccgtgaaactgaacgtggtacttggaggaggaacttggctagaaccagatccaatcgacaggtgcttcactgacgggaatctagtaactggcgcagcatggcctggacacccggagtttgtttcacaactaatggctttgttgggcattcaggtttcattctaagttccatgttatgtaaacatcgttatcaagcagaacccatccaacacacttgtctactatggtatatgttactgccatcttttctatctcgtcttttgactagcttactgtcaagtcaatcacttgtgtttcataaagaaccccactgttgatgctttatgtaaagaatgaattctataagacttgtgctagttctcacaattgtaattcataactttcaaactatatccccaattaaaaatacaaacttgctagtgcacattgcaccgaatcttccaaactcagttccgaattgcttagaaatccttcagaccgaatcaactggaaacctaaagataatcattttcatgatcatatttcttgaaacttttacacatacaagataatcttttgctgacgtttcctcatcacctatatatagggataacaccagatttcacattacatacaaacaattatggtaaagacatgagagactggttcatccggaagcagcagacctcgctgtttcaatcgctgcaaccagatcatcgtattttgcaccggtcacttccttgacaaccttgttatccttcaaaatcttgaaagttggaaccactcttattcctagctcttttgccaatggctgcaccaatgaagagtttcaatggcttagcagcaacaacaaagacaggtagtagtagcaacaacaaaaacaggtattgattatccttagctgctactagctatggttcaattgatatatggtttaggaaaaccgagttaccaaaagaagagagataaaagagcagaactcagacccggttatctggattgcagtcaagctttagaaacacaacgtcgtcgtacttctctgataaagctttgtatttaggggcaatcactttacatggaccacacctgcataaggtatccaagaatagaacatcttgaattgaaactctctttaaagactaccaacatcaaaaccaaaacattcactatggaatctaaatgaaccacatctgcagaagaatctaactgagaagatttttcaatcttagttgaaagccacggaaactttgattagtatcaaaattcaaatcaattggtaatctaagcattcgacatcgcaacgccattgatttcatcgattccgctatatacaatcagagatgtcgaatggtaaaaatttcaaagcagagagaggcatagaagagatagtaggtaccattgagtgtacatgtcaagtacgacaagcttttcaccggcggctttaacgatgggccagaacgtgtccttatcgacctccgtcacctgaccaacactgacattaacggtttctaagctacacctaacaacagaggaatctcctcttttcctagaatccaaagaacagaaaccaatcttcgtcgtcgggacgccggagtaaggaatccggcactgtttcctcgatggaccaaatcctccggtagtcggagataaagccgtcggcgaaggagaaagacggagagaaagaggcattgtttgaggaattcaacagagagacgatgacgaagacgatgaagcaaaatttcgaaaagttgaatgatcagagagagagtgtgtgtgaggtctcaacggactgagcaaatatttattttatgttaattggattttaaagagaaaaagacggtattatcctcgaattgcttcggatgaacaaggatattcgggggtacttactgtaattatttgttttcgtgatagatggaacgggaggtgtagaattcttgaggaattaagattgatatttatgtttcttactgcgaaattacggttcggtccctcaaaatgatgagacaaacatgaattcttttattttccataaatttaactattttagactaaaatacaaaataccaacaacatgcatgatagttcagtgattactagttttgtatctaaggaaaactctcatatttgtgatcaaaaacagttttgaatcctacaatttatgacaactgatgattttatcattactcattatcatctagagtcgatttttgtttgtttgttaaaatctacattagacggtaaaaaaatgttaaaaatgagcctaataatgtgacaatgcatattcatgtgaaaaaatgaattatacaagtgaaaataatttacagctgccaaaagtgtattctagcagttatttcagttttctttttaaataattattacaatcttgaaatttaattagtttttttttttgtagtcatggaatcttattatatagtacataattttctagccagtcttaaattaatttcaaaatgttgtttagttaatgattaaaatacttttttatttggaaagtaccaatttttcttcttcttcttctttgtcctaaatcgtactccaccgccaaactatacttttctttcttttgctttttttcttctcttcatttttttcgtttggatttctcaactaacttagttagggatatctccggtcatg

SEQ ID NO: 10120 - DNA, 3000 bp, Unknown
  misc_feature (1)..( 3000): cDNA_ID_2714825_gDNA_ID_2213626_Annot_ID_195880 3000 nt of promoter + ATG
agagattgcagacagaattggcaacttcgttaaggagaagggagctcctttggagctgttgtctaaactgagacaagaagggagtgagttcttagataaccagtcatcaagagaagctcttgatgagttgagtatcatgtttgaagctcttaaaagatcaaagtgcagtgagagaatagtctttgatctaagtctagctagaggtcttgattactacaccggcgtcatctttgaagctgtttgtataggagcagaggtaaaatcccgcattttggcttcctgcaattcaattaaagaaattgtagtgtatggcctttgaattcttctttctgcaggtgggatcaattggtgctggtgggcgatatgataaccttataggaatgtttggaacaaagcaagtccctgcggttgggatgagcctgggaatcgagagagtgtttaacataatggaagaacttaacgagaaacagaaacaagtaacttgccaaacccttatgctgtttgtcgaccttgttttaaaagaatggtttttgaagtttgtgttatttgctatgaatataggtgattcgaccaacggagacacaggtgttggttagtataatggtggataataaactagcggaagcagcagaactggtaagtcagttatggggtgctaagatcaacgcagagtatctagtgagcaagaggaaagaaaagcatttcaatcgtgcaaaggaatcagggattccttggatggtgatggtaggcgaaaaagaactcagtggaagttttgtgacattgaagaagctcgagaagggaagtgaagagaaagaagatcaaacatgtactagagatcgtttcgtggaagaattgaagaaactactctgagtcgttgaaaagaaatgaaaggtacacacactcactcctggttcgatgcccagacaaaaggaatcacagtgttttgcattcttttttgctgttttccttggtttgtttgataatggtgttttgcatgactcatgattgtggagacaagaacttagagattttgatgttgatgaagttttccgtatttaactaattagaggagatatacgtaaatgttaagccaattatcagaattacgtttctttcaaaaaaatccttatccctgataacctaatctgcgatcttatcagaaaaaagaaagaaaaaataagtaggaaatgaggtggaagaatataagaccgaaaagagaaaataaaacacaacaggtaaggttgtctccaaaaataaaaaaagtgatctgcagatctgtgtgatcgcatttgcatgagatgagaggaagaaagatggtacgtgttggtttctgtacctctctgccgacatgtggtggcttcaagtaactaaggtcacttgtgtattcacatctcacgtttccattgactattgtctctactcattttcgattcaactactgaaaatatttggtaagaaacaaacaggcgatttaccatcccctactgatcatttatataaaaaaacaatgagttctttggttccttaaataagaagaattcacggtggttattcttttatatacaatagtttactaagcgatacaataattaaatctgataaagagtctcaccctcatgggatgattgactgattgtgagaccctaaatatgattttgatctaaaaataaatgatctgttttattgaattttcacaattttaataattcttcatattatatattgatgatattctagtggatgtcggaaaattatgtgtaagaaacgtcttatccaagcccatgttaattctgccagcctgaaacaaaaaaaatataaatattttcatacattaatacgtaaaaaataataaaataatgattcatcagaaagaaaaaaatctgataacataatttttggatgtattattaatatagtttttttattattagagagagtgacccatctccattactgtttctatctctctcttctccattctctctctctatagagacacacaaaagtagaaagacgaagaagaagagagaacgggtttgtagttggtggttgcgtttctttctcgtttatattcttctttcttttttgttttcatctttcaattcctttttttcttttttgtttataatctaatcgacgcacgaacagagcaatctcaagctcttcttcttccccacaattgaatctgattctgagatcctcttaccttctgtttgatctctctgtttcctggtgagtctcctttcagctcgaattcgaatttggcaattcgatattaacaagtttagttttttttttctcaatgattcttcttttgattggttgcagacgaaggagatattgtagagaaagaaaggggttctcatgattctcgtgttttgagtctctttccagtataaattaaaacttacacttgtctttctttttctttttggtggaaatctacgtagatctgttccttttttctcataaaacttttgggtttaaatttctgtacaaataaaatatttgtaagaagaaaaaaacgtttttttaaacaagactcgaaaagggtcagacccagaagtctcatcttttaccttttttcttggtcagctttgaaaggcttcatcttttttttattccgttttttttttcttcattcaattttgacgatttgggtttaaaaatcactgcttgtgtatgtatgtatactggttgttgacgaattagattttgctcaaaagggttcttgcacaaagtagctggaactaaattttgaggtttgtttcttacaaactaaatcatcatatcatcctattactctttgtggtgatcattgggatctaaagacgggttttgtcttcttacagagatctcttttgcatagtttgaatcatcattgctctttccggtgagaattgtgatctaaaggttcaatctttctcgctggaggaccgtcggggtgattgtaccattgttggtctggagtgcctgctcaatataatcagggcccttaaa

SEQ ID NO: 10121 - DNA, 3000 bp, Unknown
  misc_feature (1)..( 3000): cDNA_ID_3035301_gDNA_ID_2213626_Annot_ID_195878 3000 nt of promoter + ATG
atcaaatctgcaggtcatctgatggaaaatattgaagccaagaatttgctgcacagggcttttagtgtatttttattcaactcgaagtatgagttgcttctccaggtatgtacatatgcttgctttgaagtctagataagtcaagtgctgtatacaaatggatcacaggcgtgtgactgggcatggctatgtcatatctagaatcacatttttgaagagaaaattaatttcaaaaatatgggaggttagatcataggcttgattctagagattttcttgcacatgttgggtgttgctatgatgatgggatgctctcgtgatcgtagatggttggtgggttttaataatctggctcatatgtcatctgactggtttcttctcgtttgaacagcaaaggtcaaacacaaaggttacgttccctctagtgtggactaacacttgttgcagccatcctctttaccgtgaatcagagcttatccaggacaatgcactaggtgggtatctactggcaaaacaatttagtacttctttttactatctatgtagaaaactgtagcttttctcaactagtgacctcactgttactcatcaggtgtgaggaatgctgcacaaagaaagcttctcgatgagcttggtattgtagctgaagatgtaccagtcgatgagttcactcccttgggacgtatgctgtacaaggctccttctgatggcaaatggggagagcatgaacgtaaataccatttctcaagactcttggttcccattttcttgaacagaataataaaaccttaagcttcttctgtgttggccttccttttgcagttgattacttgctcttcatcgtgcgagacgtgaaggttcaaccaaacccagatgaagtagctgagatcaagtatgtgagccgggaagagctgaaggagctggtgaagaaagcagatgcaggtgaggaaggtttgaaactgtcaccatggttcagattggtggtggacaatttcttgatgaagtggtgggatcatgttgagaaaggaactttggttgaagctatagacatgaaaaccatccacaaactctgaacatctttttttaaagtttttaaatcaatcaactttctcttcatcatttttatcttttcgatgataataatttgggatatgtgagacacttacaaaacttccaagcacctcaggcaataataaagttttcgtttttatcttaattaatgaatgaatgtcacaaagtttgtgagatgtacaaaaagcgtcgaggaaaaggataacaaggaaacagagtcgaaaccagagaaaaggcaacgcaaagattccttttttcgaagcttaacgacaacccaccttccatctgatttaagtaaagttaaaagtcactaatttaatattattgaacgaccgaaacaagtatgttgatgactttgttctcctttaaattatcatcacttcatttctcagagatttacgcacacagagttctcttcttcgtcctagtttcttctattccaggtaaatgaaataagattcgatcaaaacccagatggattttgaaatagttttcttgtgaattgaatgaaaagtgtgtatctttccttctgggttttgattgattgactgagaatatatatgatcactttatctagactaatctcgatttgtcttttgctttctgtgtttgagtaatttctcgtaaatctcatataatcaaatccccagattacttgttttgatcataattcttgattcaggtgagaagaaaaaatggcgtttgtgaccactgcggaagtgtgtgacgcgaatcaagagatgattcgaagtggccagctccgagctctgcaacccgtttttcagatttatggtcgtcgtcaaatattttcaggtccagtagttactgttaaagtctttgaagacaatggcttaatccgtcacttcctcgaagagaaaggtattaatgattcttgcttataaaattcaaaagactgaaactttactcgtagagctatgaactttcagagtatctttgacatggtttattggtattgttacattttagattcaattcttgtgttacttacttgtcaaatagtttcaattgttctttgcttgaaactatgtttgaagaagtcttaagatcatctctctatgatttagaactactgctcagtgtttatatacttcttcagtcactttgctaatcaagttcttgaatactagagacgagataggtctttcaaaaacccgagtcaataaaccaatctgttctctgtagcattcacatcaaaagctcaataatgttttaaatgttaaaacaggcaatggtagagttcttgtggtggatggtggagggagtttacgctgtgcgatactaggaggaaacccggtcgtacaagcgcagaacaacggatgggcagggatcatagtgaatggatgcatcagagacgttgatgagatcaatggttgcgacattggagtgagagctttagcttctcatccaataaaggctagtaagaaaggacttggtgaacaaagagtctctttgaacattgcaggcactcggatatgcgatggcgaatggctttatgcagatactgatggtatccttgtttctcagattgaattatccgtttaaaaggacacaagtgatgttgttgatttgttaaaatctgtaagctactacttttgtgctttgtgtttctgtaatggctatcagagtaaaagttggcttctttgaatatgattattgaactattgaatccgtttcgagttgataaaaaaaaacatttcgtaaagtgaaaattgcaaaaagatccttgaagtatccatacaagcatttttcgtagatcaatttccaataactggatacttcgagggtcattttgcagtttaccaattttctaaatccgccttcttgcaatttcacagtgcttcgttttaggtcaaacacaacgaaagacagaaaaccctaatcactccggcttcagctctgtgtgtgata

SEQ ID NO: 10122 - DNA, 3000 bp, Unknown
  misc_feature (1)..( 3000): cDNA_ID_1566217_gDNA_ID_2213626_Annot_ID_195877 3000 nt of promoter + ATG
gaagccctaaccctaaccctaatttgtgctctactcttctgatttaggacgcgagagccgatatgaatatatatactaattttatttttaaaaatggaaataatcttatctgattttgttttttggggtgttatagtgtgtggagaggtgcatggtaatgactgtggacctaaataaaataaaacgcagtaggcagaaacgcatcagtcatcaccacatgcgacacaccaacaccaatgtctgcttcttctttatttaatctcccattgattcgcctcagatctctcgctctttcgtcttctttttcttctttccgatttgcccatcgtcctctgtcatcgatttcaccgagaaagttaccgaattttcgtgctttctctggtaccgctatgacagatactaaagatgctggtatggatgctgttcagagacgtctcatgtttgaggatgagtaagtctttgatttttgattctctctactttgatttcagtttttgggtgttgccaaaattgtacctttgtctttaagttgtgttctcgaacctggtttgtcttcggcgtttggtcggtgagaaaatggaaggaaaattgactaaattaggttatgggagttggagtttttttcgattaacaatggtttatgaacttaggtgtgttgattagttgactttgatgtaatagtaacttggctccattgatttgttgaccttgatgtaaaagtaaaggattttggatttagtatttgtcaggggttccttttctgattattggaatcaagcaaaaaaagtcaacgctttagtgtctcctgtgaaagatgtcatagttttgggaggaacatagtcaagtttagctatgtttttggccaaaaatggattctttggatatatttttgtttgtctccttttagacttaattttacgattatgatggttgatcttttgctttgatggaagtgtttcctataagttttagacttaattttaccttaatttattgatccatctcttccttttcaatcttgcttgcagatgcattcttgttgatgaaactgatcgtgttgtggggcatgacagcaagtataattgtaagtgaactttgttctagtctcgtcctatcacgtagtgttatgcagtaaaattcatgtgcttgtttgcctttctcctatgactgaactcactgaactggattgctgttttatctttttctatgcccctattcaagatactgataccttatcaaatctgcaggtcatctgatggaaaatattgaagccaagaatttgctgcacagggcttttagtgtatttttattcaactcgaagtatgagttgcttctccaggtatgtacatatgcttgctttgaagtctagataagtcaagtgctgtatacaaatggatcacaggcgtgtgactgggcatggctatgtcatatctagaatcacatttttgaagagaaaattaatttcaaaaatatgggaggttagatcataggcttgattctagagattttcttgcacatgttgggtgttgctatgatgatgggatgctctcgtgatcgtagatggttggtgggttttaataatctggctcatatgtcatctgactggtttcttctcgtttgaacagcaaaggtcaaacacaaaggttacgttccctctagtgtggactaacacttgttgcagccatcctctttaccgtgaatcagagcttatccaggacaatgcactaggtgggtatctactggcaaaacaatttagtacttctttttactatctatgtagaaaactgtagcttttctcaactagtgacctcactgttactcatcaggtgtgaggaatgctgcacaaagaaagcttctcgatgagcttggtattgtagctgaagatgtaccagtcgatgagttcactcccttgggacgtatgctgtacaaggctccttctgatggcaaatggggagagcatgaacgtaaataccatttctcaagactcttggttcccattttcttgaacagaataataaaaccttaagcttcttctgtgttggccttccttttgcagttgattacttgctcttcatcgtgcgagacgtgaaggttcaaccaaacccagatgaagtagctgagatcaagtatgtgagccgggaagagctgaaggagctggtgaagaaagcagatgcaggtgaggaaggtttgaaactgtcaccatggttcagattggtggtggacaatttcttgatgaagtggtgggatcatgttgagaaaggaactttggttgaagctatagacatgaaaaccatccacaaactctgaacatctttttttaaagtttttaaatcaatcaactttctcttcatcatttttatcttttcgatgataataatttgggatatgtgagacacttacaaaacttccaagcacctcaggcaataataaagttttcgtttttatcttaattaatgaatgaatgtcacaaagtttgtgagatgtacaaaaagcgtcgaggaaaaggataacaaggaaacagagtcgaaaccagagaaaaggcaacgcaaagattccttttttcgaagcttaacgacaacccaccttccatctgatttaagtaaagttaaaagtcactaatttaatattattgaacgaccgaaacaagtatgttgatgactttgttctcctttaaattatcatcacttcatttctcagagatttacgcacacagagttctcttcttcgtcctagtttcttctattccaggtaaatgaaataagattcgatcaaaacccagatggattttgaaatagttttcttgtgaattgaatgaaaagtgtgtatctttccttctgggttttgattgattgactgagaatatatatgatcactttatctagactaatctcgatttgtcttttgctttctgtgtttgagtaatttctcgtaaatctcatataatcaaatccccagattacttgttttgatcataattcttgattcaggtgagaagaaaaa

SEQ ID NO: 10123 - DNA, 3000 bp, Unknown
  misc_feature (1)..( 3000): cDNA_ID_2686834_gDNA_ID_2213626_Annot_ID_195876 3000 nt of promoter + ATG
gaatttctcgatggttgaagatggaatttatcgatctgggtttcctcgacctgagaatttcagtttccttaaaaccctaaatcttcgttccatcatgtaagatcctttattaatcttctgggttattcaattatactgtttgataattgattatgattggagtaattaatcgtttttttattcatcaaaacagttatctgtgtcctgaaccatacccagaggagaatctcaagtttcttgaggctaacaacattaagctttaccaatttggaatcgaaggcaaaacggtgcgttttgcttctttcttgttgcttgttgtcaaagaaatgcaattgtccttgatgtcttatctcggatcttttacgatatgcaggatcctccaactcctatgccaaaagatacagttttggatgctctcaaagttttagttggtaaggaatcaacactcaataatgttttttggtctcttcttagctagttcatgagtcttaaagtagatcttttgtttctctgtagatgtgagaaaccatccaattctcatacattgcaaacgcgggaaggtaatttacagtttcttcttcctcttctaggaacttagcctatgttattatttattacaggacactcatggtggtcttggcttgtcttatttagttatgcacagtacacaatctttttgtggtcctttaggaaataggcagttatttacaggacactcatgatttggtgtttttggtgaacttgcagcataggacaggttgtctagtgggatgcttaagaaaagttcagagctggtgtttatcatcggtgctcgaggagtaccagaagaacgcgggtttaaaatggagacaaagggacttgaattttatagaggcatttgatatagtgagcttgagacagtgtctcttgagcatcatgtatcagtatcacggttatggcttcaagaggagaaggttggcatatgaagaagagaatgtcaagacaccaaaaccgcaggctgctagagtttaaaaagagagcaaccaagtggcatatgttccgtgttctgatttgagtttaatcggtgcctggattattctttaagtgggataagttttagtttaccccaaaagccgtaaccagaagttttattgtgttttttagaaatagaaatgtatagaaagtttattcttcattacaatctgatgcaggggaggtcatttttaactcaatgactcattcatgcttatgttgctttattttattttattggtcaaactcctaaagttagcttaatcttgttgtttaaacttcaaagtctctttggaataaccattagcaataatataagtggtacagcaataataccatgttttaaattcttgtaaagagttcttcgataatctaatcatttataaagagttcttaaataatcaaaccagtagaaattagatcaaaattagcaagaacttgcagtacaattttcaaatcaaaagaaaaaaaaaactgatttatgtccagaaaacctctctagccaatcaaactgaattttaaaagataacattcggtagtatactttcggtatgaaatcaattattaaaacagagaaaacagaggaggttaagagtatcgagtcagcttctaatatataccatgtgcactgcagtacaaggtatatgactaatctagcacatgtgttaggaaaaatatgttttcaaagataattaaagaaatacaagttgattagcagcattcttttactaaaacagccatattatattcatctattatatatttagctttttgatttccattctcagaatgaaaaagtgtgcagctataattgacattgtctatgtaactatgtaacacataattgacaaagaataagcaaaaccgggaaaattctatcgtaatttttctgaccagaactaaaccgagaaaaatccataaccgaaccaaatcttacctaagaatcatcattcatcacccacgtatcggataaaaactcacctcctacctagaaatcatcacccaagtatcggataaaaactcaagatcaagaacgcaaatcagattgacaattacgcaatcttctagttatagctaagaaaattccatgtcattttcagaaaacaagatgtccgtgcatacgtactttgcaaatcatccggacctaaggtttccgctgtttatgttcgaacagaaacagagtacttcatttcaaacaataagaactaatcttgatgatctaaaacttgtctgaaaaaagaaatagaggttgttgatttaacatgactacaaagctatttaagattcgctaaaccagatgacatcaacaacatgatagattttggggtaagaagtagcacattacactctttaacatcaaaagataacaaattttataaaattcaaacatagagttacttcttcaagcttcccctgataccaggtttaggtttcgattcagctactggtgctaaaacagcatggagattcacgagctttgattcctcataaatgatattaggatgcttcgattcgtgatggatctgcatcgtcttaagacctggagccgtaattttgcaatgaggacactcgtacttagcgtggcctcctttctcttttccggtccgatcagcgattccagcttttcctccgcctcgattagtcaacgcagcatcgatcttcgcttgaatctccttcgctgtatgcttctttggcttggccttaccagtcatcttcaatggcggctaaaagggatgaatttgccaggaagggagaagccctaaccctaaccctaatttgtgctctactcttctgatttaggacgcgagagccgatatgaatatatatactaattttatttttaaaaatggaaataatcttatctgattttgttttttggggtgttatagtgtgtggagaggtgcatggtaatgactgtggacctaaataaaataaaacgcagtaggcagaaacgcatcagtcatcaccacatgcgacacaccaacacca

SEQ ID NO: 10124 - DNA, 3000 bp, Unknown
  misc_feature (1)..( 3000): cDNA_ID_3035305_gDNA_ID_2213626_Annot_ID_195874 3000 nt of promoter + ATG
aaaccagatggtatttatctcctaacgatgtaccatttcttagttttccttgttcatacgatcagtaaaatgaaagaaaacaaaaaatgatcattttttgtttgtttttaaagataggagacgtgcagaagaaacagaggaaatagagcaatcggaaggaacatcgttgaagatattcactttccgggaattagctacagccacaaagaatttccggcaagagtgtttgctaggagaaggtggatttggtagggtttacaaaggaaccctcaaatctactggccaggttcttccttaaatctccagaatttggaatttaggatacattcatgagaccatcaccaaagttaggtatttttcaatgagccatcatcagaatcagaagaatttgtcttgtaggtggtggctgtaaagcaactagacaagcatggattacatggaaacaaagagtttcaagctgaggttttgtctttaggccaacttgatcatccgaatcttgttaagcttattggttactgcgcggatggagatcaaaggcttttggtctatgattatatctctggaggttcacttcaagaccatcttcatggtactaaattgagagattctcattgaacacattttttttactttgaaagaaatgacaatttgaattttgcagaaccaaaagcagacagtgatccgatggattggacaactaggatgcagatagcgtatgctgcagcgcaagggcttgattacttgcacgataaagcgaatccacccgtgatatacagagatttgaaagcttcaaacattttgttagatgatgacttttctcctaagctttctgattttggtctacataagctaggacccgggacaggtgataagatgatggctttatcttcacgagtaatgggaacttatggttactctgcacctgagtatacacgaggcggaaatctcactttgaaatcagatgtctatagctttggtgttgtgttgcttgagcttatcacgggtcgaagagctcttgatactactaggcctaatgatgaacagaacttagtttcttgggtaataaataacaaaccctaatattattgcactttttcaaccaagttaaaacaagaagtttttatcttgctgaacaattcatgttatcgcaggcacaaccgatatttagagatccgaagaggtatcccgatatggcagatccagttttggagaataaattctcagagagaggattaaaccaagcagtggcaatagcttcaatgtgtgtgcaagaggaagcatcagctcgtcctcttataagcgatgtaatggttgcgcttagcttcctttcgatgcctacagaagatggtattcccacaacagttcctatcttatccttcaaagacaagagcatgtctatagccttaagccgacatgattcaaatcttgtatctcctcctcctgagctagctacggaagatgacaaatctagtacctcatcaggcgaagaatcatctttggagagcgaaaaggagagtgtgagtaagaatgagtataagaagaaacatgaagaggaagatagctcaatggaatctgatgatgagtctgattctaactctgaacatgaaaaggaccaaccaccaaagcctattgatgagaagaaccaggcgcaaagcttgaagataaagtatagatatagctgggaagatattgatgtcaatgatgagaggctaagcagtaaaagcagccaaaaatcaaacgacgaaagtacttcttcgcgttatgatagcgacagagatcaagacgagaaagggaaagaagaagaggaagaggaagaggcagaagaaaagcatactcatattgaacacattgatagctcaaaaactgatgatgatcaaagtgtttactttgataatgatgatgattcaggagatgacaatggaggctctttgcatcggataaaatcagatgttgcgatcgattctattaaagagtgacatttttcaagattttttatcaatccgttgaagctcacaagaagtatttgaaacttttttgggtttatttttgggaaaaattcttaattgggtattaaaataagatacatattgacggtttttcttaacaaattataaccatctctctttatacatgatgaagatgttttggattgatagattaataaagaaacaagttgtataatcagataatctgattgagaaaacttatctcagcttttgtaatcctttaaaaaaaaatgttacgtacttgtgtttttctttaaatagtagatgaaataataatagtttagcattttaaagaaaaacaagtatgagataatcaaaccctagataagaatcttaataatcaatcttagctgtgactcatatagcctatgagcaaatattacattattcataggaaatggaaagtattagattctcaatttggatatactaaagtagatacttaaactgatagataaaagacatatctacttcttatcctatttttgcaattaaggatagtctttgtgttttccatctttttgtcaacgacacttgtcaaaagtttcagtctgtggaatcaaaatttttaaatgagaccacttagttttacttttctttcatgattcgaccactatactttctaagaatatttattttaatcaaaattagataatgtttacaggattgacccaaattagattcgtaaagaatcgtcagctatgaggtcaaataaaagcagagaaaacgacacgtgtcaggatcttggagattcctgaagtgaggtccaccctaaaatccatttaaggttttctaagcaaatcaacaaaggaaggaaggatcctaccaaaagctcccaaaatctgagtacgcttttcaaagttgtctcctttatgaaccccacttgatcccttctcctcctataaaaacatcttcttctcagatcaatcccatcaaatctcgggtcttgctctgtttctctctttttgattcttttagaggtttactgaattcg

SEQ ID NO: 10125 - DNA, 3000 bp, Unknown
  misc_feature (1)..( 3000): cDNA_ID_2714841_gDNA_ID_2213626_Annot_ID_195872 3000 nt of promoter + ATG
tataaagagagatggttataatttgttaagaaaaaccgtcaatatgtatcttattttaatacccaattaagaatttttcccaaaaataaacccaaaaaagtttcaaatacttcttgtgagcttcaacggattgataaaaaatcttgaaaaatgtcactctttaatagaatcgatcgcaacatctgattttatccgatgcaaagagcctccattgtcatctcctgaatcatcatcattatcaaagtaaacactttgatcatcatcagtttttgagctatcaatgtgttcaatatgagtatgcttttcttctgcctcttcctcttcctcttcttctttccctttctcgtcttgatctctgtcgctatcataacgcgaagaagtactttcgtcgtttgatttttggctgcttttactgcttagcctctcatcattgacatcaatatcttcccagctatatctatactttatcttcaagctttgcgcctggttcttctcatcaataggctttggtggttggtccttttcatgttcagagttagaatcagactcatcatcagattccattgagctatcttcctcttcatgtttcttcttatactcattcttactcacactctccttttcgctctccaaagatgattcttcgcctgatgaggtactagatttgtcatcttccgtagctagctcaggaggaggagatacaagatttgaatcatgtcggcttaaggctatagacatgctcttgtctttgaaggataagataggaactgttgtgggaataccatcttctgtaggcatcgaaaggaagctaagcgcaaccattacatcgcttataagaggacgagctgatgcttcctcttgcacacacattgaagctattgccactgcttggtttaatcctctctctgagaatttattctccaaaactggatctgccatatcgggatacctcttcggatctctaaatatcggttgtgcctgcgataacatgaattgttcagcaagataaaaacttcttgttttaacttggttgaaaaagtgcaataatattagggtttgttatttattacccaagaaactaagttctgttcatcattaggcctagtagtatcaagagctcttcgacccgtgataagctcaagcaacacaacaccaaagctatagacatctgatttcaaagtgagatttccgcctcgtgtatactcaggtgcagagtaaccataagttcccattactcgtgaagataaagccatcatcttatcacctgtcccgggtcctagcttatgtagaccaaaatcagaaagcttaggagaaaagtcatcatctaacaaaatgtttgaagctttcaaatctctgtatatcacgggtggattcgctttatcgtgcaagtaatcaagcccttgcgctgcagcatacgctatctgcatcctagttgtccaatccatcggatcactgtctgcttttggttctgcaaaattcaaattgtcatttctttcaaagtaaaaaaaatgtgttcaatgagaatctctcaatttagtaccatgaagatggtcttgaagtgaacctccagagatataatcatagaccaaaagcctttgatctccatccgcgcagtaaccaataagcttaacaagattcggatgatcaagttggcctaaagacaaaacctcagcttgaaactctttgtttccatgtaatccatgcttgtctagttgctttacagccaccacctacaagacaaattcttctgattctgatgatggctcattgaaaaatacctaactttggtgatggtctcatgaatgtatcctaaattccaaattctggagatttaaggaagaacctggccagtagatttgagggttcctttgtaaaccctaccaaatccaccttctcctagcaaacactcttgccggaaattctttgtggctgtagctaattcccggaaagtgaatatcttcaacgatgttccttccgattgctctatttcctctgtttcttctgcacgtctcctatctttaaaaacaaacaaaaaatgatcattttttgttttctttcattttactgatcgtatgaacaaggaaaactaagaaatggtacatcgttaggagataaataccatctggtttgggttcgttgttgtcgttggtctcattcgtagttgaagatttcttgttctttggcgaagagaaacacggaaaacagtgcatgatgatgatcaaaatcggttttagcaatcaaagagtattattatttgaagataaaacagatcgaaaagaattagatttttggagttttgtttaggattaagcaatggtcgggtccttcatggagattgaaggacccacgtaaaagaagaaacacaagaaaaaaaatgaaaggagaaagagaagaagaagatgaagttgacaatccaaaccaccggaaaatcgatgaagaagagtaatttttccgagaaaaaatggacaaaaaaaaagtttagattttttgtaataatctcaatctctcataaactcttaccttttcccaaaagcatggagaaccatccttcttctttcgaatttctgtataacctaattttaaaaatcctgtaaataaattctcaagtaatgatcttgaagtggattaatctgtcccacaacacactaaaattaataatttttgccagtattgatagatcatcccgctaaaaaacgctatttctggactataataatactatttctggacattatttgcaactctctgtcttctctactacgttactaatatattctactgggctttaaggcctcaaattacaatatgtttggttccaaaatttgtatttaatgggcttctctttctttaggtttttataataaaccgggtcaaacagtacccgactcgtctaattttcccgctaaagaaaaagtgaaaaccgcccaaataattttcgatggtggaatgataaaagacctaagagggagaaagagagatcgaagagtgaaatctgaaatg

SEQ ID NO: 10126 - DNA, 3000 bp, Unknown
  misc_feature (1)..( 3000): cDNA_ID_3035309_gDNA_ID_2213626_Annot_ID_195871 3000 nt of promoter + ATG
aaaaacgctatttctggactataataatactatttctggacattatttgcaactctctgtcttctctactacgttactaatatattctactgggctttaaggcctcaaattacaatatgtttggttccaaaatttgtatttaatgggcttctctttctttaggtttttataataaaccgggtcaaacagtacccgactcgtctaattttcccgctaaagaaaaagtgaaaaccgcccaaataattttcgatggtggaatgataaaagacctaagagggagaaagagagatcgaagagtgaaatctgaaatggaatcagctccgacgggatgcttcaagtgtggtcgtcccggtcattggtctcgtgattgtccatcatcggctccggtcgccggcaataattccgtttcttcttcttccgctccatctcaaatccctaataatgaatttcagagatcctccagtaaaagtggaacctcaatagctcctgctcctaaagtgacgaagacgagagttcaaaggcccaagctaactcctgaattgttactctctgaggatggtctcggctatgttcttcgctatttccctaaatccttcaagtatcgtggccgaggcaaagaggcaagtctttttttcacccgcagattcgtttaacagcggttttacatgttacagtgtgataatttggataatatgaataatttttataggtgagcgatttggggaatttgatacggttgtacagtgagtggcacactcatttgctaccttactattcctttgatcactttgtgcataaagttcaacaagtcgcttctactaagcgtgttaaggtactacattgctcgatccactttttctgtttttgtaaagcgttcttccttgtggcaattgtgaatctatgaatccggatttaaaggttgaaaatattccgatgattgtattaagcagtggttagtctagattgctgtaatcagaattacattgttcgtctccttgtttgatgttcactcatgtgttgctttcaagttgcaagatagaggatctgagtatttgttaggctgttttggtatatgatcattgtgctcatatgttagtctttacttgtgtaacatacttaggttcttccagtaactaaaaactatatgttcacttgatggctatgttgcctttgcgtttatacttgatctgaatcctgctgacgggctaacatcgtgaaacaaattatataggccagaatgacattgcttgtctcgttctttggtgatcaatcatctgttgctttaaagttcgaattactagactctgaggctgtgttaggttgctcatacgttctttacttccctaacatagttaggttctgccagaaactgaaactatatattcactcaatggctatgttgcctttgcatttatacttgatacattgatatatactgatgtgttatccttttagaattgtataaatgaactgcgagaaagggttgccagtggagttgatccaaacaagttatacgaaaagcaggaagaaaatactgttccttctgatgatcaaggtatgtcaaacagatcagcttttttcccttgaatcttcttttaagtttaagatattgatacgaaaaggaaacgcttcttatgtggctgcataacacttaagttcaatatctgttacattacaatcttgtgggtaatgaatagtcttctgctggtaatctagatatggatcagccaagtcatgacgaagagaacataccatcaaagagcgttgatgctgatacaaatgctgatgcttttgaagacagtatgttgaatgagatatttgataatgcttcaaagttaccgagcgatgaacaaaacatggataaaagcagtgaactgacagaagagcaaagagcacgtatggaagctaatagattgaaggcaatggagaaagctcagaacatttccgaggaacagagagtacgtatggaagctaataggctaaaagctctcgaaagagccaaagcaaggctccaaccaaatcaagattagactagagatgttcaatttgaattttggattgaaaaatttgtgcttttgaatgtttcaattagttatctaatagtaacaaatgtgtgtccgaaactagaacatatgtatggatgtctggtcgtgtgttagtttcggttgtggatccatcaaacccaatattatggaccgtaatttgttccaacccaagttgatgataattggcataaaagctctttattgtttggtagatttgatttttccaacaactaaaataaataaaagttgtatattcaaaaaaaattcataataaatggaatgaaataaccacatagaaaaggacaaagataataaaaatttctgacgtgttctctaccgtccaattttggtggagaagataaaataaaaattgtcgcactctagtctttacgaaaatagaaaaaaagaaaatcagtaggggcatattcgtctacgtacatacacaaactttaaattaattgatttttctcaaaatttcttgtttgatttgtgtggaggtgagacgagaacgcttttttgcttttcgtctttctctctctctttctttcttcactacctctcacctctctgtttacacgattcttcttcttcttcttcttcttctttagatgtcttcttcctccattgtcatctacctctctacacttcattttcttgttggaagaagatcgattaccggtgactcattcttagtgatgacagtataatgtctgatgcttattatcatcatcatcatcatcggagacattcttcctcttcacgtctatggattttaatgccggagttcccatgtcttctctttcacctttgatgaatcaaggtcctatcaatttcttctttcttttctctgttttgatcggcaaattttggttatttgttttgtttttaaacggattgggtttaatctcagtttcttcttcttggtttgggttgtggtttatgatcagatgcaatg

SEQ ID NO: 10127 - DNA, 3000 bp, Unknown; identical to SEQ ID NO: 10116
  misc_feature (1)..( 3000): cDNA_ID_3035325_gDNA_ID_2213626_Annot_ID_195867 3000 nt of promoter + ATG

SEQ ID NO: 10128 - DNA, 3000 bp, Unknown; identical to SEQ ID NO: 10114
  misc_feature (1)..( 3000): cDNA_ID_2714872_gDNA_ID_2213626_Annot_ID_195861 3000 nt of promoter + ATG

SEQ ID NO: 10129 - DNA, 3000 bp, Unknown; identical to SEQ ID NO: 10113
  misc_feature (1)..( 3000): cDNA_ID_2714877_gDNA_ID_2213626_Annot_ID_195859 3000 nt of promoter + ATG

SEQ ID NO: 10130 - DNA, 3000 bp, Unknown; identical to SEQ ID NO: 10112
  misc_feature (1)..( 3000): cDNA_ID_3035342_gDNA_ID_2213626_Annot_ID_195856 3000 nt of promoter + ATG

SEQ ID NO: 10131 - DNA, 3000 bp, Unknown; identical to SEQ ID NO: 10110
  misc_feature (1)..( 3000): cDNA_ID_3035344_gDNA_ID_2213626_Annot_ID_195854 3000 nt of promoter + ATG

SEQ ID NO: 10132 - DNA, 3000 bp, Unknown; identical to SEQ ID NO: 10109
  misc_feature (1)..( 3000): cDNA_ID_2714901_gDNA_ID_2213626_Annot_ID_195853 3000 nt of promoter + ATG

SEQ ID NO: 10133 - DNA, 3000 bp, Unknown; identical to SEQ ID NO: 10108
  misc_feature (1)..( 3000): cDNA_ID_2714911_gDNA_ID_2213626_Annot_ID_195849 3000 nt of promoter + ATG

SEQ ID NO: 10134 - DNA, 3000 bp, Unknown; identical to SEQ ID NO: 10107
  misc_feature (1)..( 3000): cDNA_ID_2714915_gDNA_ID_2213626_Annot_ID_195848 3000 nt of promoter + ATG

SEQ ID NO: 10135 - DNA, 3000 bp, Unknown
  misc_feature (1)..( 3000): cDNA_ID_2714854_gDNA_ID_2213626_Annot_ID_132054 3000 nt of promoter + ATG
taatgactaatgcactttcctcttcttgttcttatctttttcgaataattttcttagtagaaggcttttggtttaggtgctagttatgtggatgccatgcttaaaggctctagtcttaggttttttgaaagattgatgatagtttcattcgtcaatcgaaaaaaaaaacttattgatcaaatatatgtgcagcagaagtagaaccagcaaaatccaagaatttagagcaatcaaagcacactataggatctgaaacaaataagtcaaagggacctcttccagccggattctttgataatcagaaaactgattcttcaaataccaaaaccaccagtgaacctaaacagagtcagacacagaccactggtccagaaacaaaaccaatggtgaatggaaaccttccaaccggtttttttgataataaagaagctgacctgcttgcccatggaatcaagctcgtcaaaccagatatcaagtgagtttcttctctttttttttttgttgcttttacttttccagatgcagaaaatcaaagtgaaacctcattgttgtggaccttgtgatccagttactttcctacattctcaatttgaatggttcatatgatcttatgggtttgtacctaagaattctcttcgtgaacttatataaacatggatcttcttacagggatgaatataaagaatttgagaagttgatacaagatgatttgcaggtagtggatagccgcatggaagaagaagaggtcagataactttctgtcactatgataaattgctgacagtatcataagctctttcttaaacttaaaatcgcttttctcgcactctaattgtcaggttgatgctgcggaaactatagaagaggaggaacaacgagagcaaaggtaatttgattcattactttgttatagcaagaagatggaaatgttgagacttgtttaagattaagtaaacacttggcttctccttttaatcttattctgcagatcatacaaagagaaagtagagattctgaagaggaagaaaatggaacttaaagcggcaagattagcgaagcgcagtaaaacctctgaggggtctgttaaaaagccgaagaagacagaagaagaatcgcccagcgatgaggaggatgacgaggattctgctgttgattggagagctcaacatctttgaataaactagaaaagactgtttaaaaatctgtaccctggtaaaacatacaatgttctatgagaatatacagtgaaaactaatcaatctcatatatatacaattatcagtttcagaggatcaattggtatttgaggtatagttatcggttaatgggtataattcaagaacgtaattttcataaccagagttgccaaaaaggccgaaatatctggggatgaaacctgaaactgtggcagttccgaccagtttcaggtgataaactaaaaaaaaaaaagtgattatgactggtggtcgtatcattctagttttgagtgagaatgtttcagatattgatcatttggtggcacaaaacataatgacgaaagtggtaaatttaacaatcatctttaaagttaaaactcttattattgttaaacaaatacatgtggaataataaataattgagacaattccagaaaccaattaggggtcaaatatgtcgagaaactaattaggggtcaagtattgaagaaggaagaagaccactaactaaacatattcatatttttttgtgaatttttggactatttgtgattaccaaccatatgcttatataacttataaaaaaaatgcattaggctttccactataaaccattgacatttgaaatatttaaatcaagatatatgcataaccaaaaaaaaaagggttatgttatcttgtttataacttgaaaaggagtccacaaaacaaagagagagagaacagccaaagcaaaggtcggttaatgcacaatcgatgatataacaaatatcccattagaacataaaattagttaactaattacttctgacctaactgaatgcactcaatctcctataataccttaacattatctagcttgactaatcatataaattgtcacgtgaattttctaatggtaaagtgtttcacaacgggaatcaaagtttagggacatttcagtttagagtctatccatcataacacttgtatcccaacttggtttttccaaatttgttttagataaaataccatttttcgaattcatcgtcttcatgtgaattttaggaaaaaaagagtgacaaaacacacacacgcacacacacatcggcttcgacctacataaccaaacgatatcttgtaaaataccacacacaatcacaagtgtttaatcttatgatctctaatctcttatgcatgtttaaacgtgataaaggagaaatcgtttagcattagaaagaaagaaacatttacgaataaaatgatcgaaaaagtgacttcctcgaactttatcacatcacgataccttatcacatgtacgtaacacgtaatgacttattgtttatcttgtggttataaaagactctcttatcatttatatggtgctcttcataggtcattctaaaaataaacccatatctcactggttcaccttattttttaaaacatattattattcttttacactacgttatcttttattatgaccataaaaatattaatatagcatgggctttttgaatcacaatttgaacttttaatgtaaaaaataaacaacagcactaacaaaaaaaaaccgaaaatttgtgtataaatttcgccgattccatggtgttgttcatcgaattaacttgagttgctatttttttctctatctgataagtttcgaaatttgaaaacacaggcgccaattttaggcatataactgaaaatcacaaaaaggaaataagagagaaagagagagaaagagaaagagagagaaaaacagagaggttgtcttcttcgtcaaatatccgattatctggtatcgtgattcggaggtgta

SEQ ID NO: 10136 - DNA, 3000 bp, Unknown; identical to SEQ ID NO: 10126
  misc_feature (1)..( 3000): cDNA_ID_2714845_gDNA_ID_2213626_Annot_ID_132056 3000 nt of promoter + ATG

SEQ ID NO: 10137 - DNA, 3000 bp, Unknown
  misc_feature (1)..( 3000): cDNA_ID_2714841_gDNA_ID_2213626_Annot_ID_132057 3000 nt of promoter + ATG
ctgcttttatttgacctcatagctgacgattctttacgaatctaatttgggtcaatcctgtaaacattatctaattttgattaaaataaatattcttagaaagtatagtggtcgaatcatgaaagaaaagtaaaactaagtggtctcatttaaaaattttgattccacagactgaaacttttgacaagtgtcgttgacaaaaagatggaaaacacaaagactatccttaattgcaaaaataggataagaagtagatatgtcttttatctatcagtttaagtatctactttagtatatccaaattgagaatctaatactttccatttcctatgaataatgtaatatttgctcataggctatatgagtcacagctaagattgattattaagattcttatctagggtttgattatctcatacttgtttttctttaaaatgctaaactattattatttcatctactatttaaagaaaaacacaagtacgtaacatttttttttaaaggattacaaaagctgagataagttttctcaatcagattatctgattatacaacttgtttctttattaatctatcaatccaaaacatcttcatcatgtataaagagagatggttataatttgttaagaaaaaccgtcaatatgtatcttattttaatacccaattaagaatttttcccaaaaataaacccaaaaaagtttcaaatacttcttgtgagcttcaacggattgataaaaaatcttgaaaaatgtcactctttaatagaatcgatcgcaacatctgattttatccgatgcaaagagcctccattgtcatctcctgaatcatcatcattatcaaagtaaacactttgatcatcatcagtttttgagctatcaatgtgttcaatatgagtatgcttttcttctgcctcttcctcttcctcttcttctttccctttctcgtcttgatctctgtcgctatcataacgcgaagaagtactttcgtcgtttgatttttggctgcttttactgcttagcctctcatcattgacatcaatatcttcccagctatatctatactttatcttcaagctttgcgcctggttcttctcatcaataggctttggtggttggtccttttcatgttcagagttagaatcagactcatcatcagattccattgagctatcttcctcttcatgtttcttcttatactcattcttactcacactctccttttcgctctccaaagatgattcttcgcctgatgaggtactagatttgtcatcttccgtagctagctcaggaggaggagatacaagatttgaatcatgtcggcttaaggctatagacatgctcttgtctttgaaggataagataggaactgttgtgggaataccatcttctgtaggcatcgaaaggaagctaagcgcaaccattacatcgcttataagaggacgagctgatgcttcctcttgcacacacattgaagctattgccactgcttggtttaatcctctctctgagaatttattctccaaaactggatctgccatatcgggatacctcttcggatctctaaatatcggttgtgcctgcgataacatgaattgttcagcaagataaaaacttcttgttttaacttggttgaaaaagtgcaataatattagggtttgttatttattacccaagaaactaagttctgttcatcattaggcctagtagtatcaagagctcttcgacccgtgataagctcaagcaacacaacaccaaagctatagacatctgatttcaaagtgagatttccgcctcgtgtatactcaggtgcagagtaaccataagttcccattactcgtgaagataaagccatcatcttatcacctgtcccgggtcctagcttatgtagaccaaaatcagaaagcttaggagaaaagtcatcatctaacaaaatgtttgaagctttcaaatctctgtatatcacgggtggattcgctttatcgtgcaagtaatcaagcccttgcgctgcagcatacgctatctgcatcctagttgtccaatccatcggatcactgtctgcttttggttctgcaaaattcaaattgtcatttctttcaaagtaaaaaaaatgtgttcaatgagaatctctcaatttagtaccatgaagatggtcttgaagtgaacctccagagatataatcatagaccaaaagcctttgatctccatccgcgcagtaaccaataagcttaacaagattcggatgatcaagttggcctaaagacaaaacctcagcttgaaactctttgtttccatgtaatccatgcttgtctagttgctttacagccaccacctacaagacaaattcttctgattctgatgatggctcattgaaaaatacctaactttggtgatggtctcatgaatgtatcctaaattccaaattctggagatttaaggaagaacctggccagtagatttgagggttcctttgtaaaccctaccaaatccaccttctcctagcaaacactcttgccggaaattctttgtggctgtagctaattcccggaaagtgaatatcttcaacgatgttccttccgattgctctatttcctctgtttcttctgcacgtctcctatctttaaaaacaaacaaaaaatgatcattttttgttttctttcattttactgatcgtatgaacaaggaaaactaagaaatggtacatcgttaggagataaataccatctggtttgggttcgttgttgtcgttggtctcattcgtagttgaagatttcttgttctttggcgaagagaaacacggaaaacagtgcatgatgatgatcaaaatcggttttagcaatcaaagagtattattatttgaagataaaacagatcgaaaagaattagatttttggagttttgtttaggattaagcaatggtcgggtccttcatggagattgaaggacccacgtaaaagaagaaacacaagaaaaaaaatgaaaggagaaagagaagaagaagatg

SEQ ID NO: 10138 - DNA, 3000 bp, Unknown
  misc_feature (1)..( 3000): cDNA_ID_3035305_gDNA_ID_2213626_Annot_ID_132059 3000 nt of promoter + ATG
atttatctcctaacgatgtaccatttcttagttttccttgttcatacgatcagtaaaatgaaagaaaacaaaaaatgatcattttttgtttgtttttaaagataggagacgtgcagaagaaacagaggaaatagagcaatcggaaggaacatcgttgaagatattcactttccgggaattagctacagccacaaagaatttccggcaagagtgtttgctaggagaaggtggatttggtagggtttacaaaggaaccctcaaatctactggccaggttcttccttaaatctccagaatttggaatttaggatacattcatgagaccatcaccaaagttaggtatttttcaatgagccatcatcagaatcagaagaatttgtcttgtaggtggtggctgtaaagcaactagacaagcatggattacatggaaacaaagagtttcaagctgaggttttgtctttaggccaacttgatcatccgaatcttgttaagcttattggttactgcgcggatggagatcaaaggcttttggtctatgattatatctctggaggttcacttcaagaccatcttcatggtactaaattgagagattctcattgaacacattttttttactttgaaagaaatgacaatttgaattttgcagaaccaaaagcagacagtgatccgatggattggacaactaggatgcagatagcgtatgctgcagcgcaagggcttgattacttgcacgataaagcgaatccacccgtgatatacagagatttgaaagcttcaaacattttgttagatgatgacttttctcctaagctttctgattttggtctacataagctaggacccgggacaggtgataagatgatggctttatcttcacgagtaatgggaacttatggttactctgcacctgagtatacacgaggcggaaatctcactttgaaatcagatgtctatagctttggtgttgtgttgcttgagcttatcacgggtcgaagagctcttgatactactaggcctaatgatgaacagaacttagtttcttgggtaataaataacaaaccctaatattattgcactttttcaaccaagttaaaacaagaagtttttatcttgctgaacaattcatgttatcgcaggcacaaccgatatttagagatccgaagaggtatcccgatatggcagatccagttttggagaataaattctcagagagaggattaaaccaagcagtggcaatagcttcaatgtgtgtgcaagaggaagcatcagctcgtcctcttataagcgatgtaatggttgcgcttagcttcctttcgatgcctacagaagatggtattcccacaacagttcctatcttatccttcaaagacaagagcatgtctatagccttaagccgacatgattcaaatcttgtatctcctcctcctgagctagctacggaagatgacaaatctagtacctcatcaggcgaagaatcatctttggagagcgaaaaggagagtgtgagtaagaatgagtataagaagaaacatgaagaggaagatagctcaatggaatctgatgatgagtctgattctaactctgaacatgaaaaggaccaaccaccaaagcctattgatgagaagaaccaggcgcaaagcttgaagataaagtatagatatagctgggaagatattgatgtcaatgatgagaggctaagcagtaaaagcagccaaaaatcaaacgacgaaagtacttcttcgcgttatgatagcgacagagatcaagacgagaaagggaaagaagaagaggaagaggaagaggcagaagaaaagcatactcatattgaacacattgatagctcaaaaactgatgatgatcaaagtgtttactttgataatgatgatgattcaggagatgacaatggaggctctttgcatcggataaaatcagatgttgcgatcgattctattaaagagtgacatttttcaagattttttatcaatccgttgaagctcacaagaagtatttgaaacttttttgggtttatttttgggaaaaattcttaattgggtattaaaataagatacatattgacggtttttcttaacaaattataaccatctctctttatacatgatgaagatgttttggattgatagattaataaagaaacaagttgtataatcagataatctgattgagaaaacttatctcagcttttgtaatcctttaaaaaaaaatgttacgtacttgtgtttttctttaaatagtagatgaaataataatagtttagcattttaaagaaaaacaagtatgagataatcaaaccctagataagaatcttaataatcaatcttagctgtgactcatatagcctatgagcaaatattacattattcataggaaatggaaagtattagattctcaatttggatatactaaagtagatacttaaactgatagataaaagacatatctacttcttatcctatttttgcaattaaggatagtctttgtgttttccatctttttgtcaacgacacttgtcaaaagtttcagtctgtggaatcaaaatttttaaatgagaccacttagttttacttttctttcatgattcgaccactatactttctaagaatatttattttaatcaaaattagataatgtttacaggattgacccaaattagattcgtaaagaatcgtcagctatgaggtcaaataaaagcagagaaaacgacacgtgtcaggatcttggagattcctgaagtgaggtccaccctaaaatccatttaaggttttctaagcaaatcaacaaaggaaggaaggatcctaccaaaagctcccaaaatctgagtacgcttttcaaagttgtctcctttatgaaccccacttgatcccttctcctcctataaaaacatcttcttctcagatcaatcccatcaaatctcgggtcttgctctgtttctctctttttgattcttttagaggtttactgaattcgatgtgtttgatt

SEQ ID NO: 10139 - DNA, 3000 bp, Unknown; identical to SEQ ID NO: 10123
  misc_feature (1)..( 3000): cDNA_ID_2686834_gDNA_ID_2213626_Annot_ID_132061 3000 nt of promoter + ATG

SEQ ID NO: 10140 - DNA, 3000 bp, Unknown; identical to SEQ ID NO: 10122
  misc_feature (1)..( 3000): cDNA_ID_1566217_gDNA_ID_2213626_Annot_ID_132062 3000 nt of promoter + ATG

SEQ ID NO: 10141 - DNA, 3000 bp, Unknown
  misc_feature (1)..( 3000): cDNA_ID_3035301_gDNA_ID_2213626_Annot_ID_132063 3000 nt of promoter + ATG
ttaattaatgaatgaatgtcacaaagtttgtgagatgtacaaaaagcgtcgaggaaaaggataacaaggaaacagagtcgaaaccagagaaaaggcaacgcaaagattccttttttcgaagcttaacgacaacccaccttccatctgatttaagtaaagttaaaagtcactaatttaatattattgaacgaccgaaacaagtatgttgatgactttgttctcctttaaattatcatcacttcatttctcagagatttacgcacacagagttctcttcttcgtcctagtttcttctattccaggtaaatgaaataagattcgatcaaaacccagatggattttgaaatagttttcttgtgaattgaatgaaaagtgtgtatctttccttctgggttttgattgattgactgagaatatatatgatcactttatctagactaatctcgatttgtcttttgctttctgtgtttgagtaatttctcgtaaatctcatataatcaaatccccagattacttgttttgatcataattcttgattcaggtgagaagaaaaaatggcgtttgtgaccactgcggaagtgtgtgacgcgaatcaagagatgattcgaagtggccagctccgagctctgcaacccgtttttcagatttatggtcgtcgtcaaatattttcaggtccagtagttactgttaaagtctttgaagacaatggcttaatccgtcacttcctcgaagagaaaggtattaatgattcttgcttataaaattcaaaagactgaaactttactcgtagagctatgaactttcagagtatctttgacatggtttattggtattgttacattttagattcaattcttgtgttacttacttgtcaaatagtttcaattgttctttgcttgaaactatgtttgaagaagtcttaagatcatctctctatgatttagaactactgctcagtgtttatatacttcttcagtcactttgctaatcaagttcttgaatactagagacgagataggtctttcaaaaacccgagtcaataaaccaatctgttctctgtagcattcacatcaaaagctcaataatgttttaaatgttaaaacaggcaatggtagagttcttgtggtggatggtggagggagtttacgctgtgcgatactaggaggaaacccggtcgtacaagcgcagaacaacggatgggcagggatcatagtgaatggatgcatcagagacgttgatgagatcaatggttgcgacattggagtgagagctttagcttctcatccaataaaggctagtaagaaaggacttggtgaacaaagagtctctttgaacattgcaggcactcggatatgcgatggcgaatggctttatgcagatactgatggtatccttgtttctcagattgaattatccgtttaaaaggacacaagtgatgttgttgatttgttaaaatctgtaagctactacttttgtgctttgtgtttctgtaatggctatcagagtaaaagttggcttctttgaatatgattattgaactattgaatccgtttcgagttgataaaaaaaaacatttcgtaaagtgaaaattgcaaaaagatccttgaagtatccatacaagcatttttcgtagatcaatttccaataactggatacttcgagggtcattttgcagtttaccaattttctaaatccgccttcttgcaatttcacagtgcttcgttttaggtcaaacacaacgaaagacagaaaaccctaatcactccggcttcagctctgtgtgtgataatggcggcggagagatcgtccatcactctcggagggaaaggttcttctttatcttcttcctccgtttacaatgttgcttccggcgtcgctaatgttcgaattgactcttctgcgatcgagagattctccactagaaacgttccatcgatcaaaaggagctcctttggtatccctcaagggttaacgaacgaagaaactcgagcttctctggctgttctcttaaacaagcttattttgtcgacttctggtcctccttcttcatccaccgctcgttctgttcttccgcttaagattgttgagattctgaatttgaaggctgagagtttggaattgggtgagattgatgtgacagaaggggaaaacattgtgttggagaagtcgtgtgcttcgttgattgggatttgttctattatagatcacaaatcgacgactctttcacagattgtggattctgttgctgcgttgagttgtgaggttacaaaggctgatatagcttcgtttagcttgttggattcaggagatgggaatggtgataaagatgtgattggtgttgctggtgatctcaaggttttgcttaacgggtataaaggtacagggaaattagaaatagaagagatttcgaaaatcccttggattcatgggaaattcaggtatgtggtgaaaagcgtgcacgcggatgctaggagagaattgaattccggtgttaaaggaggcaaaactgggtctggaaacactgggattggtgaggctttaggaacaacattgttacctttgttaacggcgattaaaaacttgggagtgtgttcgttccttcgtgctaagctttgttttgagaagattgtggatgagaatctgaagaaatgtttatctgaaaagatctgtgttgagaatgagaatctaaagaatagctataagttagcttatactgctcatttggaagaggattactgcaggtttgctcacaaactgaatgagtgtctgggaattgtatggagaattgttggtttggaggcagttgctgccttttttgctcttgctggtggagaattgtttgttcagaagagcggagatgcggacaaagaagagtcgaagaccgataagaaaaagaagaagaatgagaaaaaagcagttgtgggaaaggggacaagcctagttatccagtttatcaaagatagattggtgagtaatgacgcagcaagtgatggtgaccag

SEQ ID NO: 10142 - DNA, 3000 bp, Unknown; identical to SEQ ID NO: 10120
  misc_feature (1)..( 3000): cDNA_ID_2714825_gDNA_ID_2213626_Annot_ID_132064 3000 nt of promoter + ATG

SEQ ID NO: 10143 - DNA, 3000 bp, Unknown; identical to SEQ ID NO: 10119
  misc_feature (1)..( 3000): cDNA_ID_1396296_gDNA_ID_2213626_Annot_ID_132065 3000 nt of promoter + ATG

SEQ ID NO: 10144 - DNA, 3000 bp, Unknown; identical to SEQ ID NO: 10118
  misc_feature (1)..( 3000): cDNA_ID_3035298_gDNA_ID_2213626_Annot_ID_132066 3000 nt of promoter + ATG

SEQ ID NO: 10145 - DNA, 584 bp, Unknown; identical to SEQ ID NO: 10117
  misc_feature (1)..( 584): cDNA_ID_2714819_gDNA_ID_2213626_Annot_ID_132067 3000 nt of promoter + ATG

SEQ ID NO: 10146 - DNA, 1021 bp, Unknown
  misc_feature (1)..( 1021): cDNA_ID_2714499_gDNA_ID_2213627_Annot_ID_132068 3000 nt of promoter + ATG
gaattcattaaagcaagaaagataaccttaaccaacataagattgcacttgattattctttgttacactttgaagtttgaacaattaaaaatgaacaaacaagttagagatgtgaatgtgaggctacttccaaaatacaatctatttcatcactaaacgcctaacattatctttggaaagtgagctacctaccaacccaaaattacatctaacttacgtcttttgtcttttgagttttgccaaccgtctttgatcttggaagatattcgtttacgtcctttaagttttaagcaaatccatcattgttagtgaagtcttaagttttagacgttttattactgttatggttaactgtatgaaagttgatacttagtcatgtgaaaagatatttcaccggaccataaatagagagaataaaaaacaagttatggtttgaatacttgtctaaaactattgattgcatttacatttgttttttaatctgattaaacaaaaaacggatgtcatggtagaattaacatatattacaagatataatattcagcatgatcgattatatgtcataaataaatcgcaaaaaaaaaaaactaataatgttaaaaaaaaaaagagatactctttctagtaaagtttatttacaactgtaaaatcctatatagggtcgcttagttacaaatccgtagtatcaagataagatccgccaagtttggtagtcgcaggactatgaccagccaaacatatttattagtaataaatccgcagagtttaaatgcaaatattttgttcctaattcgtgattaattcaacttatacataaattggatacgaataacaaataaaaattcacatatcgaaaacattatcaaagtaccgttgctttgaggagtgtgccactctaccatattatcactgacgtcatcatcttttgcaattatataatcatctgatttctcacgtctcctctctttttcattaattccgaaaattttgactcgcaaaatctcaacgaagctcgaaaatg

SEQ ID NO: 10147 - DNA, 3000 bp, Unknown
  misc_feature (1)..( 3000): cDNA_ID_2714491_gDNA_ID_2213627_Annot_ID_132070 3000 nt of promoter + ATG
ctggtattatttttgtactttataaatttaaaattaaagaaatttgtgttagagaattttccctgcaagtgatcgaaagacccttggatcttcagtaactacaaagctacagagttatatatgtgaacgaatcttgtcgctttcagatttaaagttgtattgagaaagaagaggttgccgtcttctggtagagacttggagaagaagagagtctgttcaattcatctagcgaataggtttctttctagaataatataactagagggagtcccacatcgaaaagaaattgtaagatggttggttttgttcgggtataaataaagagggtttagttcggttgaaagtcatctttgcgcttggggcaatgacgcagctaatgaggtactaaccgaggcgcgtctattgctggttgaaaactatttccaaaccccctcctgggcctaagcttgtcttgggccttcgagaatttctggaagggctccctttggggtaaagccctacaataactagtctaaatgtttttcgagttttgaaatttagaaaatcaaatatcatggaaagtatatatcacacaatctaggcccaagaaaacatcacttgctgatgatgaggcctgatagtgaaaattgaattgttgtttacaaattttaatttttcaatatcagatatactttaattcttttttgttggtatgaacaaatataatttgatttgttgatattatccttgtacttttaaagttgtttaaaattaaagaaatttgtcatagagaattttccctgtaaatggtggtaacatgaacagtaggaataaaagggttacgaaattattattctataggatttgcaaatgagaaatcagaaaaatgactcaactatcattagttctcacgtggtcatgtggggacgagtccgaaactccaatgtgtcccccatcaaatatagtcctcatatgacatatattcaatttgtttttcctatcaatattcctaccagatcctcaattgtctattttaatttgattacactaaaaatcttcagcatttcagtttatgattaaacgcattggcattttattttgaaatccagaaccggagctaattaaaagttcgggattcatattaatcgtaatcacatcatgtttactaaattatacaacctcagtacactcatcactcacgtgactcacacgtgcgtacctacatgaaatgcaactgctgtatatagtttgactttcaactgtcaaacaaaataaaataaaaacgaaaatcgaataaagacataaatatattgttttccctaaaaaagaaaaagagggaaaaaactagatctgaaaagacgacgtcgcatcagtcatcggaaccatcatctccgccgaagatagagaagcggtagtagagtaagaacaagatcagtacgaggaagagagcaacacccacgggagatccgctaaccctgtgaatcgattctggttctccggtggagaaaatggccgacacgaaggaaccacgttccgacgagagaaactgtatagtgaggaggaggatgataggaagcaatagaagtcccaccggactaagaagctctgcgatcgcatctgtaatggcctcaccactgtctccgatgaagaacggaacaagcaccactaatgcaacaacgacggcgagtatgattccgtgtggcgcagaaccgccaccgcctccgcctcctacaacgccttgacgatcttgatacattagatacttagtgtgaatcgcagagagtgttttttttgcttttctctttttttggttacagttggaatggagatttgtcgaattggtttttgtttgttgctttttttaaaaaatatagggtaacgagggacgcgtttgtcttttgaaaaagtgtaaagcatttcccatgcgtttttgtttttttttaattttcttcgaaatttcgacgtcatttacaataactttataaataaataaaaacaattaaatgaaaaaaaaacaagcttattgtgagcatggtgaaaaatgggagggaaatgagctccagctttcatcgatcacaatgagcgccaacacaaaggacataagaattaagaatcaatttgttggattgtgagaaatgggagggaaatgagctctttgaccatttttgttatatttgtcctttttttccccaacgctcataatgtttttgtttccccgtgacagaaaattctcaaattcccttctttttcattgggcccaaatttttaaccatttgtaacgatatttccttaattagaacaccgaagccattagacctaatcaatcctagcgtatataagtcaacattttatcacacttttctcatgtcatattctccaaaccttacggtgtaagttgtgaatactagtccagtggattttctctattcatttctccaagctatgtgttatgggtccgacgggtcaagtcaacaaatccctgatggacattaatattcataatgtggttgaattaagatttctacacttaatactctcatcaaccgtcttcttccactactcacacaaatcatagcctccttaatattatttcgtaatgctgtttcaatatgtgtaaaaagagtatatatacaggttactagtttactactgtattaattgagaaagtcaacttatactacacataatataatgagacaatggctgggatgtgaaaaaggaattactaatatgaatcatatgattaaaaagctatgttaggttttttctcttacgttttcctcaaacacacgcaacactcttgacttttgtttcttgcgtccttttgacagcaaaagattacaaagtaggaccaatcattttcttttgttctggagtttggctgcttccttcacgagactacattgttctcatacacacacactcactctctcatctctaatctctaacttcacttcctctctcatcttatcccatagataaaaccatccaaacttgtgtgcaacaaagtatgtgaaaatg

SEQ ID NO: 10148 - DNA, 3000 bp, Unknown
  misc_feature (1)..( 3000): cDNA_ID_2992162_gDNA_ID_2213627_Annot_ID_132078 3000 nt of promoter + ATG
tagcattatggagtctggagaggttatatatatatgctccgtattaatatatatggaagctagttaactaattataatgtagttctcttcatttaacaaatatatgatatattttttaattttattttttcaattggtaaagatcttacgcgaagcttagagatcgtcggttcgagtgacgtttgagatgaaaataatattatatgctacggtttcggggattacgagtttcggctcaaaaactcttggtattgaaaagaaaaatgatatattttttataggtagttgagtggtttcccttccttagagaagtaatgatggcctgggcacacattaaaagtaggagtttcttgtacgttgatgtactttgggatttggttcttgttccttgacttgagctaggaccagcttaggtatcaatctaagccaacgcatacatttggcgaggaatcgaaagtagctatattagtagaatatatcaaagttatctattactctacactgtacgtattgtctaaaattagatcatatgattatttcatgctgagaattttatacaatggctgctattacgtaccccaatatcatgcttgtgcttgggttggtaataccaacttggtatggtatctcatgaactagttcaactatctgattttagatagttttgtggttacatgcactggatgcacacatgcatgacatgtaaacaaaagatgcaacattctgacgaaatttaattcatctctaagattatagtcttatatatagacctaacatggatagatctttttttggacagaagaattcggacctgaaattgtttttattgaaattaagctaagttataagaaaacttaggtatgtaagtaaactaaaattttaaaattaatttaaaagatgaattttgaagctaaaattaccctcagggacgtgaacaattttttttttttttttctctcatcatataagcgaagaggaatgtaaagtaaaaggcctatgagttaggacatgttccgaaaaggtaaaaaaaaaaaaacaaaggtgagaagcttcggagaaggtaagaatttagaaaggtaacaaagtgactaagcctatatatagaatgttgatacttaaccaccaagcagtgctttcaagctgtcttaaagtttgggacacaaaatactaaaaaaaaaagagagaggcatatgttttagtgaaacaaatatcttctttcttcttgattataagcatatatatcgagctctgactgattctttcattgcttttgtatcgattcgtgcctagtaaagcttcttctttctaacatatattcgtttttcttttccaaaagctttgtataaagatagtgagttttggtttcgattatttggagcatatcgccctataataataagaacgtacatgactgattatttggcaaacttatgattagacacctcctcaactttctctagtgaagtaataaattatccaaaaggattcatagtaaatgtaattagttcataacaacaacatgaacgagagtaattgatatagacaacagaaaaatcatatcccatgtttgggtttaacctggagaacaatcttctcgccttccaagacacttttatttgaagaaaacgattatccttatctaaatatatacacacttttggtttaagatttgaccaatcatatgcggactaattcttctacgatacttatacaggcatcacaatcaatcttctcataaggaactttatgcaagcccatgtgaaaattatacttactaaatttttttttaaggagtaagcttcttcccttttttctgtggagactcattgattatgcatttctttgtttgagattcattttggaataaggtgaagtaatgtaaaaccataattatttaactttttacaagaaatatccactgtttttgtgtttctttgatatataacacaaaccaacgattgatttatcattgtcgtatgcattaataaggtacgtagagaaaaacacacataatattcaactcgatagacttgaccaatgaggattatatttattgaaatcacatagaaaacacgtactacagagacgaaaccggaaaaaacaaacaaattttcttccaaactactacgtactccaagagctgaagagaagaataagaaggtgatggaatcagtcacgagtctcgtggaaccttttgatgaaatcagtggatctccggttaatagctggttcaacgaggtaccaattatagaagttggcttcactatcttcaccatacatctcatcgtccgttcctgcctggttcgatctctgtctccgtcgccaccacgctttgaaactgccgaagaagctaaagaagaaacgccacgaacctcccattatgatgttttagagagagggatgtattttgcgtgtgtatatatatctaaagatacagaagcatgtgaaggaaggtgtgtctgatggtttagggttcaaaactcaaggtccttttatatataagcctgaccaagttggaatcctagaggaaccatgcacgaaacaccccctaccaaccattaaaaaagaacttttctcttctaaacatttgtatattattcacaaagaataaagattaaaaaagcatcgagatattatgtgtcgctagctgcggttattttaatcattacatagacactggtaattccatagcaaacattgaattttaagcttttgaggcaaatgaattgatatgaatttctaaagttcctagtttctttgttcctactcttttattcaaaccgaataattcaatccataaccggaataaatcgattcttttaaccgttagacgccttctttgttctttaagccggtttaattaaacgggaagcattcttcttatgaaaaccaaaaacggcaaggtgtttatcgaacaaatccagagtaagagtgtgtttggtcatctccaggtcagctgggtgtagaaatcgagcgacggcggcggagacgacggagatg

SEQ ID NO: 10149 - DNA, 3000 bp, Unknown
  misc_feature (1)..( 3000): cDNA_ID_2714460_gDNA_ID_2213627_Annot_ID_132080 3000 nt of promoter + ATG
cgcttatatgatgagagaaaaaaaaaaaaaaaattgttcacgtccctgagggtaattttagcttcaaaattcatcttttaaattaattttaaaattttagtttacttacatacctaagttttcttataacttagcttaatttcaataaaaacaatttcaggtccgaattcttctgtccaaaaaaagatctatccatgttaggtctatatataagactataatcttagagatgaattaaatttcgtcagaatgttgcatcttttgtttacatgtcatgcatgtgtgcatccagtgcatgtaaccacaaaactatctaaaatcagatagttgaactagttcatgagataccataccaagttggtattaccaacccaagcacaagcatgatattggggtacgtaatagcagccattgtataaaattctcagcatgaaataatcatatgatctaattttagacaatacgtacagtgtagagtaatagataactttgatatattctactaatatagctactttcgattcctcgccaaatgtatgcgttggcttagattgatacctaagctggtcctagctcaagtcaaggaacaagaaccaaatcccaaagtacatcaacgtacaagaaactcctacttttaatgtgtgcccaggccatcattacttctctaaggaagggaaaccactcaactacctataaaaaatatatcatttttcttttcaataccaagagtttttgagccgaaactcgtaatccccgaaaccgtagcatataatattattttcatctcaaacgtcactcgaaccgacgatctctaagcttcgcgtaagatctttaccaattgaaaaaataaaattaaaaaatatatcatatatttgttaaatgaagagaactacattataattagttaactagcttccatatatattaatacggagcatatatatataacctctccagactccataatgctattaatttggcactaactatggtaaaagttggaaatataaagttttaaaagtagtttcgtgctaacagaaaaaataaaggtttgattgcaatataagtgtggtttgtttcgtgtctctcctcaccagtgtttacatgatcaacttcattttcttatggtgtatcttcatctacttcttcaaagaccctcttgtcttggtgtgtgacctcgattccacaatcaaactcttttgttacatcttcatcttgttttgtgccatgtttttgttcacacatgatctttacttcctgattctccacaactttctcgatgccactgatcttgttttgctagattgttaagaacacacaagtttaaagaataactctctttattagctttagaaaatcaacttaaaactaaaacaactgacctcttcatcgacatcttgcttgatactatcttcttggtcattgatcttttcttcttgatcccttgcatcttgcttgatgtcaccgtcttgtccaatgttctttccttttacattctttgccttttgttgatcaacatcactatctgattttgtaaccgcctcttcattgtcgtgatgtgcaacatccgcgatgagttcttgatcagtttcgctaatgctttcagtttgaaccgatgatcttggaggcgtagaaataatgacaggtcgtctgtttgtctgatgccaagcaaggtgggtcataaaatcactgcggttatggatctgcacaaataccatatccaattaaatttaaaagagttaactacaacatattaggaaaatcacaaaagaatatggaccataattaccaaccatttgtgtggggtaataataacatgggttgttgttatacatgtaaatatattgtccccaaacgtgattcctatatattatgaaaataaatatataagcaaagaaattagatgaaaacaatattcaaactttagtttaaaaacaaaattgaataaatattaccaggtgtgcggaggacaatatggaattacgtgttgaggagcttgctgatattgatgcggcggtataacataattgaatgatcctacaaatttaaagttatgaagaagaaaaagttgtttgagaaagttttgttacacaaaataaaatcataaaaccaagatttagaaagagaaataaggatatataaaccgtttaggttagggtgattcatgttttgttttgcaccagcactagccaaattgcaattggttgttcttccatcaatgatgggtttagaattttgaagagctctaactgtagagacatagtctctaaaagtaatctgaaaattcaatacaaatcaatcgtcttcattaaaccggtattaaatatggaatcaaaccatacagagtacaaacaaaacgtgtttctaggtcagaggaaatcttcatatttttaaatatacacaaaggtttactaatgaagttgaattaaggaaaagaaaggatacttacaaaaccatagccttttgatctgccaggataagtttcagaaacaacattagcatcaaccacttgtccgaattgttcaaagtatcttctcaaatcatctgcagttgttctccatgttaaattccccacaaaaatcttcgtaaccctagtatcatgattattagtttgagacatcataaccaataaataatctcttaaaaaccaatttagagaagaaacagaaagttgcagggtttaagggtttggaactaatatatatatatatatatatataatgagataagagttgttaaaaaatatatatctatatatatctatatataaggagataaggaaattagtttcccaatagaaaaagaaattaggatattattagatggaatgcaattttatttatttattatttgtttgttttttaatcttttaaattttatttattttttttttttgggtcatctcctctcttatctctatgatgactataccgtttattttcttttcccactctgcttaggaagagaagagagaagagagaagagaagatacttgaggag

SEQ ID NO: 10150 - DNA, 3000 bp, Unknown; identical to SEQ ID NO: 10149
  misc_feature (1)..( 3000): cDNA_ID_2714460_gDNA_ID_2213627_Annot_ID_195915 3000 nt of promoter + ATG

SEQ ID NO: 10151 - DNA, 3000 bp, Unknown
  misc_feature (1)..( 3000): cDNA_ID_3033837_gDNA_ID_2213627_Annot_ID_195909 3000 nt of promoter + ATG
ctgattttgataaaattgtgtacattgaggtgtgatatagagcctgatttggttttataggtatcgtttggtcatgaccaccaacaaagtcatagctatatgtcagtcaggaggggagtttgttactatcaaagatggatcgttgtcgtattctggcggcgatgcttttgcaattgacattgatcagaatacttcaatgactgatttcaagtctgagctggctgaaaattttgggtttggtttggaggcaatgacccttaagtactttctccctggaaacaagaagacccttattaccatctctaaggacaaagatttcatacgaatggtcaacttttcttcagatgcagggactgtcgagatcttcgttattcccgaggaagctgctgccaaaaatctctccgtcatgccagctagtaggtagatgtttcttttgctttgttctagttctttcacacatttttatttccttggtctatagagtccaatgttagaacttgtgttggtttattgagctggtcatggtaagaattgtacgtggttattttcaagttgtttgcggctatgaggtctgccatttaatcgccaaaactattgctataatgtaatgaagtgcagtgtcagtttcttcttactcataataattcatgtcatctgtgaatcaggttaaagaaagtaactaatctgtgaattgctactacaggtcaagtaggacaacggcatcagaaggggtggtacctgctatttgtgctgtaggagatggtgtcgaggaggatatggcaaatgattttcaaattgaaatggcgatgccagatgatagtccgttgccgtgcaattttgttttggttgatcagaggcatcacacagcaatacagcagtgggaaaacgtcatcacgggtgttgatcaacggtttaatacctttcttgaattccgagatgcattacacaagtattcagtcgcccatgggtttgcttacaaatacaagaaaaatgacagccatcgagtgtctgtcaaatgcaaagctcaaggttgtccatggcgtatcactgcatcgaggctatcaacgactcagttaatatgtatcaagaaaatgaacccgaggcacacttgtgagagagctgtcatcaaacctggttaccgtgcaactagaggatgggtaagaaccatcttgaaagagaagttgaaagccttcccagactacaagcccaaggatatcgctgaggacataaagaaagagtatggtattcagttgaattactcacaggcatggagggcaaaagagattgcccgagagcagctacagggttcttataaagaggcgtatagtcaacttcccctaatctgtgagaagatcaaggagacaaatcctggcagtattgccactttcatgacaaaagaagattcgagcttccatcgtcttttcatatcattctatgcttcaatatctgggtttaaacaaggttcccgccctctcctgttccttgacaacgctatcttaaactcaaaataccaaggggttatgcttgttgcaacagcttctgacgctgaagatggcatatttccagtagcctttgctattgtggattcagagacagaggagaactggctttggtttttggaacaactcaaaactgcgttgtctgagtcgcgaataatcacttttgttgcagatttccagaatggtctgaagaatgcgatagcgcaggtctttgaaaaagacgcacatcatgcatactgtctaggccagcttgctgaaaaactaaatgtggacttgaaggggcagttttcccatgaagcaagacggtatatgctcaacgatttctactctgtggcatatgcaacaacacccgtgggttattaccttgccttggagaatataaaaagcatatctcctgatgcttacaactgggttatagaaagtgaaccacaccattgggcaaatgcgctgttccaaggagagagatataacaagatgaactcaaactttgggaaagacttctacagctgggtttctgaagcacatgagtttcccattacccaaatgattgacgaatttcgagcaaagatgatgcaatctatttataccaggcaggttaaatcccgggaatgggtcacaactctaacaccatctaacgaagagaagctacagaaagaaatagaacttgcgcaattacttcaggtttcatcgccagaagggagcttattccaggttaatggaggagaatcttcggtcagtatagttgatatcaatcagtgtgattgtgactgcaagacctggcggctaactgggttaccttgtagccatgcaattgccgtgattggatgcatagagaaaagcccgtatgagtattgctctacgtacttaacagttgagagtcaccggttaatgtatgcagagtcgattcaacctgtcccaaacatggacaggatgatgctggatgatccgccggaggggttagtttgcgtgactcctccacccacacggaggacaccgggaagaccaaagataaagaaggttgagccgttggacatgatgaaacgtcagctacagtgtagcaagtgcaagggactaggacataacaagaaaacatgcaaagctacttagttgttaggatgttttggttagtttaaagtagtagatgattttggatctcttctcttcttgtgtgatgaagaataaagatctcgttcgttttcagatcaaagcgagcttttttttcttcgcagaacttgttggttgatgtatgacattcacattcgaactttttgatctatgaaattggtttaagaattaataaatgtaacttacaatcctatcccataatcatagtaaaaattacgaaaatgccaccgtttcattactccttttggcggctttaactcttctccctctcagagagttcggaaactctcagcagaaaaaccctaaaattcttaagcttcgtttacacacacatacagagactgtatctgtacattcgcatcgttttgtaaaaatg

SEQ ID NO: 10152 - DNA, 3000 bp, Unknown; identical to SEQ ID NO: 10147
  misc_feature (1)..( 3000): cDNA_ID_3033845_gDNA_ID_2213627_Annot_ID_195904 3000 nt of promoter + ATG

SEQ ID NO: 10153 - DNA, 1021 bp, Unknown; identical to SEQ ID NO: 10146
  misc_feature (1)..( 1021): cDNA_ID_2714499_gDNA_ID_2213627_Annot_ID_195902 3000 nt of promoter + ATG

SEQ ID NO: 10154 - DNA, 3000 bp, Unknown
  misc_feature (1)..( 3000): cDNA_ID_2714456_gDNA_ID_2213627_Annot_ID_132081 3000 nt of promoter + ATG
gttttgattgcaacaccagggcgtttcacgtacctaatgaacgaaggaattttggggttgtcaaatttaagatggtactttaaatctttcaacaaagcaaactttccccattgatttgacgagatgaaagactttcaccaacttttgtgtgaaaattgattgggtacaatcttggttacgtgttttgcagtgccatcttggatgaggtggatatactctttggcgacgatgagtttgaggcagccctgcaaaatttgataaactcttctcctgttactgcacagtatctatttgttacagcaaccttgccacttgaaatatacaacaaacttgttgaagttttccctgattgtgaagttgtaatgggacctcgagtgcaccgtgttagtaatgctctcgaagaggttggtattaacataagtgattggaaatatgtaatgggatcaacaacagtagcagaatttttgttttgctaacttggttgctgaataatcttctttgactcgtccctgaccaatgttgagttgcactgtgcagtttcttgttgactgtagtggagatgataatgcagagaaaactcctgagactgcatttcagaacaagaaaactgctctccttcagataatggaggaaaaccctgtttccaaaactattatcttctgcaataaggtaccatggtcgccaacctactgcttttcgctactacttgaaacctttttggacatctcagtctcatatccacccttttatatgcagattgagacatgtaggaaagttgagaacatatttaagcgggttgatagaaaggaaagacagttgcacgtcctaccttttcatgctgcactctcacaagagtcaaggcttacaaacatgcaagaattcacatcatctcagcccgaagaaaattcactgtttctggtttgcactgataggtacctcaatttggttactgttatcgttttttatgatgctatattgcctgaacattgaagatgttaattttttgtttcttcctttttcgttccgaaacaattgcagagcctcccgtgggatagatttctctggtgttgatcatgtggtgctctttgacttcccacgtgaccccagtgaatacgtgagacgtgtaggaagaacagcaagaggggctaggggaaaaggaaaggctttcatctttgtggtggggaagcaagtagggttggcacggaggataattgagcgaaatgagaaaggtcacccagttcatgatgtcccaaacgcttacgagttcacaacctaagtaactcttcatcttgaccttctttttattactgcaatctgtgtgttgaaagtttcactctgttgttagttaaaagaaatacgtagagaagccaagtccaaattttgaccattagtctgttgtaatgttgttaatgacacttaacctccaagctcatggagtcttgcactgaattgatgccccaaatcaagatcataaccaattaggatataaagttatctaaaggatatggaagatttggacataagcttatcttcttcctatcatgcgtactgtagaggagaagcagctggttgcaagcaaacacagtctgggaatttattacttgtctcattttgttaaaaagattcacatggcgccaatttgccagtaggttgtgtatacgtacttgtcgcattgagaaatagacaaatgatcaaagattgggtgggaactggtgatgtatgtgaaagggaaataaatcgtcatgattttgatttgcaataaagattttgaaatggcagtttatcaatcaaaattaatacaattcagattttgaagttgcactatctgtaatctgtatataaatagaaaatatctttggattggcaaaaatacttaaatgtccaaatcaattaaattaattcacaacagattttgtttgtgtgacagaaaaatgaaaaatcccctataaaaagagctcataagaacataaattaaagcaaaacgaatagattagctacaacgaaaatgaattgcaagattgaattcatgagcttcctcgtgatgacttcaatagtcatcctatttctctttgtttcaggttagtctcttcgtgtcttaatagcaaactatgggaaaatattaataatgtgttactctatctcaagtctttttttttttttttgtatttggtgaaaagcagggaaagttgaagctgaaccccaatgcattggatcatgtgaaatgcttgctgactgtaacacggcttgtatcaggatgggatacttatttggccaatgcgttggctggaaaactcccgatatgtgttgttgcaaccattgaatgtttcgaatcttaaatgtacgtattgaaaatcatcaacaaaaactctttaatatcttgattaataatttattataatactactatataacaagcgtgtgagtttttaacaactttgcttaactcaaacactgagaaaaataaggaaaagaaaacatttgcatttcatgaacaattaattataacttatcatagtgtataaagtttatttgacgatttttaaaaaaaacattattactaccactaatcaacattattaagacattgatccgaagtatacggcgattgatttatgtgcgccttgatcatatttttgaaatgatagccgctagctgttcgttcatatataaaaataaaactataaaaaaacaatccagcttagactgagtgaaaaactcaaaaaaaagtagtaattaatgtttatggtggatcaattttataaatgccgacaaaaagaaaaaaaaaaggatcaattttataaattcaaaaaaatatatataatacgataaaaatggccttattgataattaatgttgcaatttgcacgatgctgagctggttttatgggtaaagtcaatgagtattgggtaatacaaaaataatgtatatgtcaggtcactggttacacaatttatgtatagctcaaagaaataagagttagcaaggatcccagactacca

SEQ ID NO: 10155 - DNA, 3000 bp, Unknown
  misc_feature (1)..( 3000): cDNA_ID_2714448_gDNA_ID_2213627_Annot_ID_132083 3000 nt of promoter + ATG
ctttggtagtctcgtgagtcttttttcttacaaaattgtatttctactggattctctgagaaattgaaaacaatatttataactaagtaagtaattatgttatgagaaactgaaaataatacatctcccattctgtggtaaagcctgtgcaagaaccagagaaaatgacagaaatcattgtggaagcacttcaaagaactaaacagagaggaatcatcaacaaaggttggggtggccttggaaactgtaagttcttcaatccgtattacctttccatttttggatgttttcatgtttggtatatgttactataatattgatgtggttttcatatagtgaaagaaccgaaggactttgtttacttgttggataatgtcccacatgactggctattcccgagatgcaaagctgtggtatgtctaataatctggaaattctcacagtttagccttgattatcttgtttctttatttggttctggaaatttttagtcacacattttacttgtctggattagtagtttatgagtctcatctttaaacctgaaattgttggtcccctgcttttaggttcatcatggtggtgctggaacaacggctgcgggtcttaaagcctcggtaagtttaatatgtgtgaaagcgaaagtctgtttcttgatgtaggacttaagttggtaaaatatgaaagtgttttgctttttccttgaacacagtgcccaactacaatcgtgcctttctttggagaccaacctttttggggagaacgagtgcatgctagaggtgttggtccttcaccaatcccagtggatgaattctcacttcataagcttgaagatgccataaatttcatgctcgacgataaggtaaatagtattttctaaccaatcgggttttaacaagttttggtttgattgcagtctaagcagttcagcttggtttatatgaccatcaacttgtgtggctggtcatggcattgttttataacaaagaaactgagcatctaagtgtgagcaggtaaagagcagtgcagagacactagcaaaggcgatgaaggacgaggatggtgtggctggagccgtgaaggccttctttaaacatcttccaagtgcaaaacagaatatctcggatccgatcccagaaccttctggatttctctctttcaggaaatgctttggctgttcgtaactttcttctctccctccagaatctcctcttttctcttttgtattgttgtctcttgtaatgtttttcttcttcggttttggctatacaacaacttgcttaggaaaagttttaacatttgtgaagtgcttgggaaatttgctgttctaggggatgcatatattataaaattgttataagcagcaaaaaaaaaaaaaaaaaaaatttctgaagatgtgcagattagtgaacattgttgtatcgagttttaatattatgacatattttgtttcagtttcttgagctgcaacttcaatggaatggtgttgtacagaaacaacaacaaatctctatttttttttattaatttgttgcttcttttgttttggtcatgaattgatccatgtaagagcatgcttgattgcttcttgttgttgttgttgttgtataattgatacggccgataaatgaatatcctaatgtggtgagctatttttgtttgttaatctcttcctttctttcattcctattgttttttttttcattatactcgtaagttccttacctatgaaagtgcatgtttggtcattaaacgttgttgccgacaatcaacaagtgggaggttacattaactttagtttctttacaacaaaattattgtccgcttatcaaacgatgattagttgattattgcatacttaaagcattattagcggttaaaaaaattgaatgattaactttgtaatgagcataaggtataatggtcacatgggcaaaagtcaatagtgccgcattaaggaaataaaactatccggaacactatgaggcctacaagtttcagttagctgtcctagcttaactttacatggtttaaattagggatttcagttttatttttccttttaaatttgtcttttacaaatcattatccaatgactggcgagttgcgagaaagaagagagggatgaggaataccaatcacatgacatgataccgtttgttggccaaactcattattgtttatcactgtacgattcttttatacaagtacacatgcacatgtgttttcattttctatagaaaccaaaaaacatataatccctatagatagatatcttaaccctcacttatacttgaaaggttataaattcggcttgaaagcttattggttagaagtacatatataacaagttttagcagcttatttttttcgtaagaacaatatttcttagaatggttcggagatatacctaactccgtagattaaatctgtcggtcgggtataatgcatgaaagatgacttatgacaacagtcaaattaatagttcctgtaacctactttcttattgttcaaaaatatatatgtataggtataaccgtataaaggtcttcggatgaaaaatgaaaaagaaaaacggatatggaataaataacataaacgttaattaaattctgtaatttcacaactatatatctatataattgctataaattcagggaatatatgataaagcacatagtgatatttcttcatcgtccagattagcaatcacaacctagattcatgaccctgcggaataaacaaattgtatatattttatatactttaaatagttttcttattctttatatattttattttctatgaaattaggccaataagataatgggaatggtcacacaatcttcttcttatattaacttctctctcccgtagcctttcttctactcttcttctcatattcctcttcctttttctttccttatatcgagaaaagcctctgcctcatatagagataactaaacagaacagagcaagaactatacagccataacaatg

SEQ ID NO: 10156 - DNA, 3000 bp, Unknown
  misc_feature (1)..( 3000): cDNA_ID_2714444_gDNA_ID_2213627_Annot_ID_132084 3000 nt of promoter + ATG
agggtttgtttccgtaagtgtcttgcattactctgttcttttcttttgtttttctgtaacctcaagtgaattgtccatatgatgcagggtggagttgacgcgccatgtttccatgatttcaatcacattgtcattgagcgagctaaacaaagattctcctgggtgagttatacttttcttcatccttttgttggaacttgggaagtcttgattcatagagttcgtttgctttgaataattttatctcaaaagaatcatcacagaatcatatttttatggaattttacttcacatggtatcctcgcttcttaagatatagctacaatataaatgcttataattgtgttcaggtatcaagctccagcacagtcagatcagtctaagcctcaatatcagccacaacaagggagacaagcccgcctaccatacaatgcttatggtgaaggtaatgccttaaactttcttgacgatttaaatctgtcaatgttggtaggttttattataacaccttgtgattaattggaatgtagattcgtatgggagagggagaggtcgtggcagagggagaagcaggggaagaggtggatatggaaactaccaagggagttatgaaggaaaagaccaagggaactatcaagaagattatcaaggtattgttttgccatagaaggcgatcatttcgtctaatggtaaatatatgttattgtttgtttagtttgttactgacttgtagctttattttgggataactagacaatgaaggtgggtattcaaactcgggcagaggccgtggacgtggtggacgaagctatggctatcgtggtaagtctgaacattgtcaattagttaaactcagcatattataaggtgtaagggtgatgagactataatctagatcaacactcagaagtgtgttatcatcttttggtttcaatatttacgttttgtttgaaatacgttttggctttaatttgctccactttatttgtgttagattctggatatcagggtggcagaggcgggtatggtggtgggagagatggtggatatggtggtgggagagatgacgggtatggggaaaggagaaatgacgggtatggggaaaggagaaatgacaggtatggtggaggaagagacgacgggtatggtggagggagagatgacggatatggtggaggcagaaacgatggatatgggggaagaagaggcggatttcgtggcggtcgtggtggaggcagagatgaaggatacggtggcggccgaggtggatatggaggtagaagtggcggccaaggtgatgggtatggcggaggcagaggtgacgggtatggtggaggcagaggtgacgggtatggtggaggcagaggtgatggctatggtggtggccgagttgataggtatgatggaggaagacgtgatggctatggtggaggccgatatgatggctatggtgggggtaaaagtgatggttatggaggtggccgaggcggataccgtggaggtagaggcggatatggtcgtggacgtggaaggatgggtaatggtggtcgttcaagggatggtgctagtaaccaaaacgaagcctaagctgtttcatatcccattttctaagctgtatgggttagctgctgcatatttttccgttgccttaaagacccttcaaattcttagcacaatcccaaggggtttgatatgttttaaaaaaggttatggttaagttatgtgatcttcggaggacggttctgtaaaactccctttgggtaatatccatatcaaagcctaagggagtttaaggaaggggggttccttttttggtttgttctctttacctttcttctgcacaaatttagctaagtgcaaaaataatcttttgttgcatcttgtaattagctatgggttatggtttgcttttgtgtttagtatttgtccaaatttctccctataacgtgtcaaaataaatggttttctaagggagaaaagatttagtgcagatattggaaggagtaaaaaaacaaaaagagacaaccaaacttagctgcactccctttagattgcatcttcaatcactcttaattctattttatcctttctttgaaaataattgaataagtttaggtgcactagaattttggaagacttttatcttacgagttggcagaatagaagaaaatttgattaattcttagtcagaaacacaaaattaattgttttgaaatgtggtgatacgaagaacatatgagttttctttaatatctctgagagtaaaaaatggtgctgcccaggatcgaactggagaccttttgcgtgtaaggcaaacgtgataaccactacaccacagcaccagatacttatattctgatatttgaaaacattgaatcttatattacaaaaaagtcgacatgtgaaaatacgaagaaaaaatcataaaaaatggtgaaacaatgattactcttcttcttcttgggtcaaaaactttcaagtatcttaattgtaaagtttctttaataagataataacaaattcagggaagggcaaaggcgaaaagtacgtaaaaaaaaaaaaaatggacagacagaagagaagattcgctgtcaaagcatacgacagcgctttttttaatttttgttcagcatacgacagcgttttacgaatattttttctcggacagtttgatattttttgattataaattgaccaaataatccatcactccgacagttaattaccaagtccctcgcctgaaccggagcgaacccatcacgtagccaccagacgcgtcttcgacccacttcgtccgaacgtgcccatacaatagaaccttttcttcttaatttctttaaaaaaagatttcaataatcgaagaattacaagaaaagaatcgtataattaattctctccttcactttctgggattcgaaacacgcatacgcaaattcgagatacacgaagaaaggatccagatcgttttctgctggtggagatagagagagaatcacgatg

SEQ ID NO: 10157 - DNA, 3000 bp, Unknown
  misc_feature (1)..( 3000): cDNA_ID_2714432_gDNA_ID_2213627_Annot_ID_132087 3000 nt of promoter + ATG
tgaagcaaaatttattatccataacttcgaaaagctgaaagatatgagaaacctatttggttacgaacttaaaggggcagcaaaagaaggaaaaagagaccgagctatcactactataaagaagcaatccctttaaatagtttttttaccttttgttaatgactaaaagactctcatcgtcacgcttcagtatatgccatggaaacaaaagagagcgtgcatcaaattcttctgatttggtatcagcatcaactgttgtatcgtcatcttttccaagacccattttctccattatccaagaccataagccaccagttttcttaataacctttggatatactgtttccaggacccggctatttatatttgctcttctaatggcgtgattcttagcccaaagaatggggaaaaggaaggaaacaaagaggaaaaacaatcttaacatgaaaacattcaatggcacaaccagtaatcataattgtgtatcttcttctaggagtcatacctcagaatctacaatgtaaagacaatcctccgcttcgtcgtaaagggtccctgtaggacgtaacatctttgcagattcaaaatctccatcctcaaaacctgggaaacaaccaatctgaaataaaaacattgttttgaactttagggttgttaaacaatgagcttcaaatgcacttttctctctacgaatgcccttctaagggatttcagaaaagaaagtcaataaagattataattccccaaatgtgattcagttcacttacactgtctacaatcttcccactgttttcgaaaataataatacgatgatggttggtatcagaaagaaacagacggtctccaacttcgtctgcagagatacaacctgtcacagagaatgtcaattgttaaataaaaaaacaaaattttattccaaatttttgtgagcaaaatattagagagtagcgtgaaagacaaaaatgaaaattcctgataaatttcaaaaagaccaaaaaagaaagaaaattaaagagacatacctggaaagtaaagtaacaaatcctgaaagaaagaagggaaatgtgattccttgatagcctctgcttgttttgaccaagtgttcgtgaaaagtctgacagacttggatttctcagtatcttgagtgaggaggctgtcaagagctgcagcaaagcgcaagaaaaagaaaccagaatatgtattaagcacacaaatcacgagatagaaggctgaagcgacgaatattcacaagctaaaagtagcataatgaatttctgttttctcttaagttgaacatggaacaataagtatgacattgtagagactatttgtagtgaatatatgataataaagtaggcatacctttaactacagaagcaatatcaagatccttctcttcgtagattagaggattcttaaaatctttaaacacgatgtaacgtacttccccacttgtctgatacaagtagaaaacagcacaccttcaattgaaatcgaggtatatgcacataacatgagggaatgatatacaaagaagtaatctacagcgacatttcttggacataacaatatataccttgggaaattctttttcggaaagtagcacaggaaaagtgaggtattccttcaaaatcaactcagctagagcagttcgatcatcagcgattcgagcttgatcactgaagtggatgcccatgaaacagacacccggagacctgaaaagtcaaaacaaatacttagccgtaattgccgttaagttaccattattctttggtttaacaaaaataaaagctttcttaaacctctgctgaagcaactttagtttctcaaagaaaccactcagatcacttgttccgtctagcaaatgtccagctagaactacataagttcctttgtccttgaaaagctgtttattcccaaagtctcgattcaaccaatgatgggaaggacctaagagttcattttcaaaacgttgtttacaacacaaagagatgtttcaagccaatacaaaaagatgtaagaatcagtatacagtcagttaccttcaagtttatcaagtgaagctttaataaaagagagcaaatcaacatgtggagaggaaggagaagaagaagaagaagaagaagctcgagatactcgtcgtactgatgcaaatctgaaagagactgtccaggacgaattagaaagagaccatgaaaacacctgtccaagtaattaagattataaatcgaattacccgcgagagaaacgttgttcgaccaatgtcttggatccaatgttcatgtctccatcgagtgaaggagctaaacaagtggctggagtagtgattgatcggcgaaatcgaccgtgaacattgtctagtgagcaaaacgacaaccaaaaaagatcgttaagaacgcttaaacagtgggaacccagaaagctagaatcgaagaagacgatcaaaattcggaaacctgagagaatccgagaagaaagccatgatattttcttcaaatggaggcttctgttagacatttctgtatggtgggcttcacttgtttgtcctaagctaaacgaatttcaggttttggaagggtttaaccgccagcaccggagcccggcgggatcttaagggaaaaaaactcaagactttcaggtgactggtccaagtcaaggttattatgactttggataacgaatgtcaattgaagttaattacataatcagtaaagattactaacatcggggtggtggcgcagttggctagcgcgtaggtctcatagctatctgagtaatcctgaggtcgagagttcgagcctctctcaccccaattattttttcaatatttttaagttgattcgggtcaactataacgggtcgggtaatgatccaagtacatctaatagcaaaaccctaatttggcgccgatatgtccatcttccttctccataaacccttttcttttaacctactcagtttttctgtttgcgtcgctctcatcccagggcgagaaagatg

SEQ ID NO: 10158 - DNA, 3000 bp, Unknown
  misc_feature (1)..( 3000): cDNA_ID_2730409_gDNA_ID_2213627_Annot_ID_195928 3000 nt of promoter + ATG
gtatgtgaacgttgaggttatcagttgatgttttttatttcagctgtttggagtcatgggtgatagttaagtttatcagcctgtaattacaattctttggtttcttgaagggactctggcaaaatacactggaggacaggtgtactattatccaggtttccaatcatctgttcatggagataagttaagacacgagcttgctagagaccttacaagggaaactgcgtgggaggcggttatgcgaataagatgtggaaaaggtttaatagtttatgataatatattcgtttttgctacctgctatgtcaatatttgctaatgcattggtgtgctacttgtgatcttatatatttttgcatgcaggaattcgtttctcgtcctaccatgggaacttcatgctaaggtctactgacctgcttgctcttcctgctgttgactgtgacaaagcgtatgcaatgcagctatctcttgaggagactttgctaacatcccagactgtgtatttccaagtggctttgctgtatccttgaatagttgatattttaaacatacttgagtttaaacatacaacacatcatttagcttttagtaatccttaacagaactaagatataccgcctcttgtggagagagacgtataagggtacacacatctgttgcaccagtggttacagatcttggggagatgtatagacaagcagacactggttccattgtgtctttatatgctagattaggtaagctatattcaaatttttttcatatgctacttttgatactatttaatgacaatttaaattctgcagcaattgagaaatctttgtccgcaaaattggatgatgcacggaatgcaatacagcaaaagattgttaaagccctcaaagaatatcgtaatcttcacgcggtgcagcatcgcttggggtccagattagtatacccagagtctctgaagttcttgccattgtacggattggcaattactaagtccactcctcttctaggtggacctgctgatacttctcttgatgagcgctgtgctgcaggcttcaccatgatggctctgcctgtcaaaaagctattgaagcttttgtatcccaatttattccgtgttgacgaatggctcttaaaggtttgtgtatttttatctcaatgtccattatcaaacatcagtgttcaagaaatagtaaataatttgtgaattcacatgcttgcagccatcagcagcccacgatgactttaaagacgtattaaggagattgccgctggctgcagagagtttggattctagaggcctttacatatatgatgatggttttcgattagttttgtggtttggccggatgctttcacctgacattgctaaaaatcttcttggggttgactttgcagcagacctctcaagggtatgtatttttatccacatatatccttacatatgaatatatgaacaggcggtacattcgatgatgtatatgcatcattagtgtttttcaagaatttgaaacatgataatatgtgtgaaacccttgtctttcttcgtgttgggtctcttaggttacctttcaagagcaagagaatgggatgtcaaagaagctaatgaggttggtaaagaaactgagggagagtgatccttcatatcaccccatgtgttttctagtgagacaaggagaacaaccccgagaaggcttccttctcctcagaaatctcattgaggaccagatgggcggttcgagtggttatgtcgattggattctacaacttcaccgccaagttcaacaaaactaagatagctcacaatggtaaggaaaaaaccatcataatacttccaataacatgcttaaagtaccacatcatgttcgacgcatcttatgaagcggttttactttcagacaactcgggtgctaggatgccacctctttgtaaccattgaagaactcttgagctcaaaaatcttctacttaagcaggatcatggcggccttcttccttgggccataatgtgttgttttggataaagaagtgctactttttgatttttcttcatttgtttttctatatagaccttttttctcaagattaggcttttatttgcctaaccagaatggttatctccgtaagattagtcgttttttaaatcttttgttgccttttttttttgtcctcattcgattttttgttgatgtgcgtctgttctagatttattttgggagttgcagttcatgaatctgtcctaattagggttattaacaagaagatgctactgttaaaattttaaaatatttttatgaataaataatgttgtgaaaaccttagatttggatgaaacgcatcgttggtatacatcggtaaagttcatacataaacaatacggtgattgatcgctgtaagaccaactgttcctgcaatcacaaatagataaattaggatttcaatttttaactgctgtaattctgattcaaagattctggtcggttgaaccgggacggggaaaatagacgtggcaatgtcttattggatggtactttctagaaggttacagaataaaagcggtcgtcggtataggggtcaaagtagcttaaacgacgtcgtagaggaatcttcgaatctcccaatagcttgcctttataacaaacctctctgaaccattgctatccaagaaatctttcagatttgcgcatatcgacaattttccgagcggccagtttacgtattttgtttgtacgtgatcaaatctccctcgctttctcgctatcaattttatcaattatgtgttcccgattgtttctagatttggattttctatttgcggatactagttcttttttgttcggaatcgattatggatttggtcttaagatttgcggaaattcttttgtaggtctgatatagtttgttcggaatcattcttgttgctcaggtcttagatcattgcgattgtaaattttgattttgattttttttttcttcaggtagttaacgtgtttcaaggactttgacaatg

SEQ ID NO: 10159 - DNA, 3000 bp, Unknown
  misc_feature (1)..( 3000): cDNA_ID_2730401_gDNA_ID_2213627_Annot_ID_195926 3000 nt of promoter + ATG
catatgccttctaactggttgcaacagcaaactgcggctatcgcctcatttaaggagcagccaagtgcttcccttttgtcttcttttactaaacttggagacgacattgtcatgacagatataggtaaacgacatctacgcaactttgtttacatctttttcatctctatgcatcaactaactcattttgcctttgtacgttaagcttgtcagagggtgttgaagctaaatagagattctggagcatgctctagcattcaattctcaaacagtgggatccttgggttgccctattggttgttcattccactggagagagtttttaatctgttagtgatttctcattcattatcttatccattaacaacacttctcttgttctgaaactttctaattgatgttgtgttactttggctaaattataacagagctaatggagttcaggaagcacatctcagtcatactcaggaactccggttattgccaggtgcgatttgctatacagaccctaattttttgctcatttactcatttgcttatgctagtcttgatgttagcagttcatcaccccagtcccaattagctgcatcatgaagatggtttaacattggttccagccggaattggtttgatttaattgctactttttcatttaacaggtaaaattagcatacggttgaacatagagattcctccatgcacggagcttgttgaaccgatacaagaaagctgcatatggcgacagacaagaggcgcaatcagtgaattctcgagtgctggaagtgcagttgaaccttcagaaaaggttatttaagagaattgcattcccgaattgtatggtttaaatccaggtagctcagaaattttgttttcataacttgcagattggagtttcacaacaatggtatgatgaattagacagcctcgccaaagaaatagccaaccctgaagcagctgaggaagaggaagaagaagatgttaacccctctgaggttgacagagaagaagatggacgtatccacattgattgtcctgtcaaaacaagtcctggctcaagtgaggtacgcctaaatctcctctcaagtctcttttatgtacagaagccaaactttactattagaaaaaagtataactttgtcgactccggtttgtgcagcttattgtttatgcagctttgtatttaagactagcgagaaacgaagagacagaaagtgcgacccaggaagaactggcgagaaaaatagcaaagattttaaagccagtacggaacattacaactatgaaggaagatttgtttgtgaatttgttgtccaagtcaaagagagaattgagagacattgtcttcataaagccgatgcatgtgcggataaggttagactcgaaggatcatccaaaagccgataactcaagagacgtaatcttgactgactcctctgttgaggttgatgtctctctctgacaacgaataacgatgcttttgcagtccattctttctcaaaggtaccaaatggctactctaattctttttgaggtggtaaaaatgagctcaataagacttgtataagtagtttatgacattatattaacgatggtccaagtttcatttggatttctatatttgagtgtttcttctatttttggttaaaaattagaaaatatcaatgaaattagcaaatttttgggtgccattagtaaataacaaaaaagagtgaaaataagaatatttggaaaaatgaagacacgatcactagaaaaaacagctgtcaagctctttaatttttcttttaaaaaccaaacagtttcaaactgaaatccaaactgatttttgaaatatgaggaacaacgaaattttgaacatatatagcatgttattgttatggtcctaataatgactgatttgcttgaagaacttatttgttactattccaacttattacatacatgtgtgttgatagatacatacatggataagaaaagtgtacatccatatgtttatctcaaatcttatttgcaagagcctcatgaagaagatatattgttgacttctttttgtaaacacaaggagacagagaaatagaaatgcctgccttttcttctgatttgttcgcattttttaaatagattttgggaataacaataatcttacaattattcgcatttgattttaaaaatatttagttcgtgcagccatcaacattacatcaaaccctttagttgcatttatcttatacacttcatggtctccatgttattctctctttttctgtttccagttttctctttcttctcattatttcccatttcttcaaactttacaatattaatcacttttataatctgttttaaatctataatacatatatgtgggggaaggttagagaaatgtgaggcacacaaacatgagaactatgagatatgtactccattttgcatatttaattattaacttaaagagtagtttaattgtctatattaagagaagaaattcagaaacctaaaacctgaaagaaaaaaaatccagttatctccttccatttttttaggagactcttccgcgcttcggatcccaacggttttggtgtagatttttcttgatctgggttttgttacatctttgacgaaaataaaacatatcaacgtgatgagataaagggaaaccctatgggtttcttgtgaaaggggcaaccattgtttatgaaggattctaaggtttgttcttcgttctgcattttttttaccaatccacatatgttttcctgatatttatctgaaaatgtgtttcttttgttcttgtcaacgcaggcattaattaattgaacaaaacgattcgaacaagacccattttttggtcttaatttgtggtcctcagactctgttttgtacaagtttcttcggactttgaatccaattcgccgtggtttgaaataagtttatgtctatataatcacaagaagaaggggaaaaaaaaaaggagagattcagacaacagctaccggagaa

SEQ ID NO: 10160 - DNA, 3000 bp, Unknown; identical to SEQ ID NO: 10157
  misc_feature (1)..( 3000): cDNA_ID_2714432_gDNA_ID_2213627_Annot_ID_195924 3000 nt of promoter + ATG

SEQ ID NO: 10161 - DNA, 3000 bp, Unknown; identical to SEQ ID NO: 10156
  misc_feature (1)..( 3000): cDNA_ID_2714444_gDNA_ID_2213627_Annot_ID_195921 3000 nt of promoter + ATG

SEQ ID NO: 10162 - DNA, 3000 bp, Unknown; identical to SEQ ID NO: 10155
  misc_feature (1)..( 3000): cDNA_ID_2714448_gDNA_ID_2213627_Annot_ID_195920 3000 nt of promoter + ATG

SEQ ID NO: 10163 - DNA, 3000 bp, Unknown; identical to SEQ ID NO: 10154
  misc_feature (1)..( 3000): cDNA_ID_2714456_gDNA_ID_2213627_Annot_ID_195917 3000 nt of promoter + ATG

SEQ ID NO: 10164 - DNA, 3000 bp, Unknown
  misc_feature (1)..( 3000): cDNA_ID_2714428_gDNA_ID_2213627_Annot_ID_132088 3000 nt of promoter + ATG
agaccgagtcatttacaagcaaatggaatcacgagagaagttaccaacctcgatcatagtttcatcgaaattgagaggaccatttgaaggaataataacagggttgaattcgttaaccgtcttcaagctcccaatgaaagaggattcaccactgtaaacctcatcgatgttgaaatccttggccagctcagtcacaatctttgactctgcatgtccaccctggtccctctttggcggcattgtatagtatgggattttacctgcataaccattcatattagagacaatgatgagttaagaaactggttttcaaaaatgcttttacgcttcaagtttacgaggaacaaaaaaagatccgcaccttcattccagtcatgcaaaacaattctggcagcagcatcaatatccacaagaccaccctttttaagtttaccccttacagtggcgactttgtaaaggaaatcatcaactgcctcgaagctcgggattttgtagagagtcaccagcatatctttaggacaaagcttgagaatttccttcactatttttttcacaaagcagaagatttccaagttaggtcactcagattataacctttaaaagacaaagcacaaaaataagtgtgattctatcttgagcttatatccaattacctggactaactgggtcatccaacttctcgattcttttacaatttcggagagctatggaagcatcatttcctgatgatttcaacatcacaactccaggacaatccagcaacttcacgtttttgtccaagtgaacctcttgcagagatctagtcagtccaggagtggcaccaacattgacaacatgcgctctcttcagactgttaataagactactcttgccgacattaggcagtccaataataccaactgtgatagatttttttaactgccaaagaacaacaaaggaagatttaattgaaactgaatgatataacttgatgctaaggtaggatgattaaagtttaaactatggaaccaacctcatgacttcttgagtagttcttcaacaatttgataagagtgtctgctccaagacaatcactcgtctgcaacatattgcttggttttgatgccttagatgatttccaacccaagtttgatctctgttcctgggtgctacacttgaaggcaacagctggaaattcttccctaaggtacataagccatttctcagcagcctctcggggaacaagatctggagagagtgaatcagttacaaaaattaattacaccacccagagtaaacaaacaacttattacgtccacgagtaaagactgaatatatgaacttaccaatcttgttcagcagcaacacaagatgcttattgggaccggcttgcatcaccatcctctccatgtcagtacaacgagtgccaagaggatcacgggcatcaagaacctccaaaatgacatcagacaattcaatgactttaactagctccttgtagaaagccctctccgagttatctgtgaaacaaaagacattagtgcatgtaaaggcagagagaaagcacataaacgcgtgaagaaggtatccaaaacaactcacctcgaacattgacaactttaggtaagtcctctatggtctctccttctgtcttggtatcctcatcatcaaccaaaccaagtttcctctttttggcctgaatagatttattaggagagatcagaacacaagcaccactccaaaatacgagtaaatcaaacagcaagacatgaaaaatgcaatcttttatcaatcaatcaaaactcagaacacaaaggaaatagctttaagaatttcgacctgaacttaaagttatatgattactaaatatctgaacatgtatcatagctgtgagttacaatgttaaaagaatgagattaccctttctttgcgagcttctttcttctgttcaatctcctcaagagcacgggcacgtcgaacttcaagggctttaagctcttgttccttgaaaggccagtcattgggtatacctgggtctttctctactcttggcttacggtgaaggccaagctttttagcatcctttgccttcttcttgtggtgctccttcacctttttcaggaccttatgcttctgcttcaaggtcaccctcttactcttactctctgcaaaaaaccatcaaaccaatcaataaaaccccagtaggaatcctgaactgaatgatatgattcaaattcattcaataagacagatccagaatatcaatatgattgaaggatgtatcttacttttactccgtttcaccatctttctcgccctgggatgagagcgacgcaaacagaaaaactgagtaggttaaaagaaaagggtttatggagaaggaagatggacatatcggcgccaaattagggttttgctattagatgtacttggatcattacccgacccgttatagttgacccgaatcaacttaaaaatattgaaaaaataattggggtgagagaggctcgaactctcgacctcaggattactcagatagctatgagacctacgcgctagccaactgcgccaccaccccgatgttagtaatctttactgattatgtaattaacttcaattgacattcgttatccaaagtcataataaccttgacttggaccagtcacctgaaagtcttgagtttttttcccttaagatcccgccgggctccggtgctggcggttaaacccttccaaaacctgaaattcgtttagcttaggacaaacaagtgaagcccaccatacagaaatgtctaacagaagcctccatttgaagaaaatatcatggctttcttctcggattctctcaggtttccgaattttgatcgtcttcttcgattctagctttctgggttcccactgtttaagcgttcttaacgatcttttttggttgtcgttttgctcactagacaatgttcacggtcgatttcgccgatcaatcactactccagccacttgtttagctccttcactcgatggagac

SEQ ID NO: 10165 - DNA, 3000 bp, Unknown
  misc_feature (1)..( 3000): cDNA_ID_2714938_gDNA_ID_2213633_Annot_ID_132090 3000 nt of promoter + ATG
acccactcttattttccagagagagaaggagatttccggttaaccagaaataaattccggcgacagcttgttttttgttttatacatagtttccgacgtttgacggatctctctttccaattagtcggattttaataattttttgcttagcttggttcgttttccggctaagatcggattatgttttttgtttttctctcctctttctacatgatttcagtgtaaatcccgcttgctgtcaattggtttatttcatgttcatctgttggcttgaatcttctccaaagttagagaaatatcttcgccgtaatatcttcatcgttatgcgaagtggacctttctttaggtcttgggcggagattcttcctttgaagttggggttgagatgaagatctacactatctcctattattcaaggtggaaacaacagatccaatttgatatgcggcggtaatatctttaggaggatgtctccaagagcgtgaattgaagctttcacctggtggttacgaccgtcgtcggacgtgacagcaaattgaagatttggcggtgagcaaccaaaggtgttccggcggttttctcgcttgtgccacatgaatccattaggttttagcatcaaacacgtgtctcttacgtatcttctttgtgtaattgagtttattttaaaattaggcttcaaaagactttgtatcacgtatcttgtaatctgtcctttatgagtttcgtttttttttaaacgatttatttcattagttgaatcaagtgtgattacaatgtaaagcagataaaatgaaatatggaacaaaataatgatattggaatgagttgtcatttgttattctgtgttataaaacgaaaattgccgacaaaaaaaaagaattttcggttacgaaaatataaaatcttatagatatagaaaatgtaaaaggtcttttgtaagaataatacttttctactaaaatattaagaatatagcatattatatatatcaattatgtaaataacatcaaaggtatgaaaaatgactaatggtggtggtggttattccggtgatggtagtttcagcacgattccggtgaagattccaacggcacaagttcaggcgatattccgaccatagattttcatcgatgatattccaacgatatagatatcagcgatggtggttgcgaagattacggtggtgattccagtgatagtggtggtgactttgtgatggtgatggtgatgacgtggggatgatggtggtgccgttgtggttgtgatggtgatggtggtacagtggtgatatgatatccatgataaatagtaacagtgtggtggttttagtagtgagaacgtggtggttacgatggtggcggtgatgacgttgtgatggtagtggtgactgtggtggtgatgacatagagatgatcacgttgtaataccggcgtcggtgatagaggtgactataacgtcggcgagttaattggtttggcttaggatcaattatttccaaaataccgaaaatacacattatatcattaaaccatttttttggttagttacataatataatatttttatatgttatttatgcaaatttcccaaatgtaaatcacttgggcacgtgtcaagagaaagcgcgtaatcatcacgtaatcaagcgaaagggttttgcttacaaaatcctgagccgtctttcaaagcccaataactggcccaaacattctcagtaatatttcgacctaaatccttatttagacgcatctttattcgataaaagataataacaaaacttatctctttgccttgtctgctttttcatccaaaggtccaattagcttcttaagcccaaatctctctctctttctctctttctcttcctctctcaatctactcgccggagatcggctcgattcctccgtcaccaccgcatccgaccggagatttccttccgttttctttacttcacaacgcagagcttcaatttctccctcgcaggtattcttcgcgaaaccctaaactctcactaatttcccctggatctaattggggatttttgagttttgcctcgattgtttgttaaattgttagcttttgtttgttaagtttaaatgttttggtttcactcatggaggcaaatcaattttgaaaaaaacttgaaattgttgtttgtgtttgtgtttgtgtgatataaagaaaaaagcccgatctttttttttgtttgattaaattctgtgttttgtttgaatcagtttcgttgtgttgaaaactttgtaatctgggctctagttttctcaagagacatggaataatcacaatgtcaacgaatcagttggctaagcgatttcggttaggttagtttccggttaacaaaaactaatccgacccgattaagtcactcctaggccttacccgacccggctcatcgattagtcacacgaagcttgactttaccatttctttcgagtttctctgttgagtatcgagaatcgagaaaagaactttgctcaatctttgtttctcgtttggtaatcttcgtttctaagaattggaatggtctttttcataggattcatgatagtttttggctgcaattttgtatctttcttctgattatgtgaggaatttgattttgttgtcgttgtcgttgtttcgtcttagggatttgcgagaatcattgaacaatttttcaactttgacaattaatagcacgaaatgagcttcagatttatgtgtttgagtattcaaagatatagcttttatatttgcctttgtgggtttcatggagctgaatctgtatacttatagctcattagtaaagtctgttgttgttttcccatcatttgcttctggtttgacattgtgttgagtagtaagattagagctttcttgctttacatgaagcatttcatttgtggaaagtgcttcaatccatttgggtttctctctgatttggaagatatgtctggtgaaaactttatctgggtattgcttcttttcagtgattgatcaaag

SEQ ID NO: 10166 - DNA, 3000 bp, Unknown
  misc_feature (1)..( 3000): cDNA_ID_3035378_gDNA_ID_2213633_Annot_ID_180941 3000 nt of promoter + ATG
tgtcaattgctttggttccaaaagagtattggacgtacgccttctctatcgcggtctatctcataaaccgaatgccaactccggttctctccatgacgtcaccatttcataaactctttgggatatcacctaattatgagaagcgtcgggtcttcggttgtgtttgttacccttgggtgcgttcgtagacgagacataaacttgacaatcgttctcaacaatgtatcttccttaggtactctacttctcatagtgcatatttttgctttcatccccctaccaagcgaatgtatgtgtcaaggcacgttcaatttgctgaatctgttttcccattcgtgaagcccaatcgagaggaccacaccaataatgtggtaaattccagctcgccgttgttgatattgctcgcaccacctcagatatctccgtcaccaccgtcgacgcctactgtccaacctgaactccaactcatccgctgcctagacataactcacgtgtttaagacgacaatggtcatcaagactcaccaagaatattgggctcaaatcaaacaggcccattccaatcaaataatctggcccaatacaataacccatcaacaacaagcccatcatccatcacccagaatttgcccaacaacacaacaactcgtacatcatcatcttcgtcttcaccttcgtctcacaccagagcttatcagatgtcaccggtcaccccgccaacttcgtcaacgccaccgggatccccgcactctggccttcgcctctcaccacaaccatcgtcatcgtcacaagtattatctcatatccctaactcttcctcatctcatatatctgagcctacagctccaattatacatgggtcgcaaatctcgacccatgcagaccctctttcaattgagcccattgctccacgccaaaatgagttgcaacccacaactcagcaaaacccacaaacaaatccacaaaatctaatccaagctgcgcctattcaaccacaaaaccaaattcataaaccaccacaaaataatcacaatatgcgaacttgagccaaaaacaatatacacaaaccaataaacaaactcagcctcacagtcactgccaataaacacaaatccaagtacaaatccaaggaactgacaacaattcaacaagccttgaaagatgaaaattagagttgtgcctcttctcatgaattcgatgcacttatgaagaatcacacctgggatttagtcccaccacaacctactcaaaatatcattggctgcaaataggtctttatgacgaaattccatgccaatgggctcctagatcgatataaagcaagacttgtcgctaagggttttcatcaacggtatgggcaagactacgcagaaaccttcagtcctgtcattaaatgaactacgcagaaaccttcagtcctgacatttcatacgccatcaatcgcctatcccaattcattcacaagcccactaatgagcattggcaagctgcaaaacgggtgttacgatacttggcaggtacacttacacatggaatatatcttaatgctgcctcaccaatgcttcttcatgcctattccgatgctgattggggtggtgatactgaatattacatctccacgaatggctacttaatctatcttggtcgtaatccaatctcttggacttcaaagaaacaacgcggtgttgctcgcttgtccagtgaagctgaataccgggccgttgcaaatactgcttacgaggtacaatggctatgttctctactcactgaactacaaatatccttaccgacagctctagtgatctactgtgacaacatattgccctcgactactgtgacaacatactatgacaattgcctatctttgcgcaaatccggtattccactcccgcatgaaacatattgccctcgactatcatttagttcacaatcaaatacatggtagaatgatgcgtgcagcttatatctctacacttgatcaactggtggatacacttaccaagcctcttccacgatcacgatttcaacaagcatgtgtcaagattggagtcactcaagtacctctatcttgagggagcgtataagagtattaagtaaatacttagttaagtatctaaatgtaaattttgatagttaactctaccctaattctctcatatgttctgtataaatagatgtaaaccaaattctttgaataatttcaatccttataccttggagattcaaaaaataagtgcagcgtttgttataactcagctttgaattacgattacaagcccgagtacgtaagatgcagccttttatctctcaaaagaatcaagaattggtgcttagaggttcaatatcagacttgaattgagattctattctgccgtatcctgcagctttgtatttgagaattgagattctaaaagctgttttgaaaccaattgttttggtattttgatcagactttgaattgtgtttcttagactgttgtgaccaacacattgttatcttggaaaaagatataatcacaagtgagtgttgttgcgtcatcgagacttaacctattaaacctgcagttttttttttgttttggattatctctagaaaacgagaattcatagtgatacaggactgagtttcaaagtctgtccaaaatcatatagattaaacttgcagtttggtgtttcaatctttacaaattgaaagtttagagacttattttgtcttggtttcaattctctgcaaattaaaaacattaaaacgtgacctcgagtttttggcttggaccatttggctttgcaaacactgtaacgtcgtattggttttgaatttttaattaacaattggctttaaaacaaattgcaattatttattattttacgtgaagtatacgaattctgcaacttgactttgctttcatttttgtgcatatagaaaacattcatcaatgtaaactgcagtttttgtattgactaactcacgttattaatctggttttgggtctattgtaaac

SEQ ID NO: 10167 - DNA, 3000 bp, Unknown
  misc_feature (1)..( 3000): cDNA_ID_3035374_gDNA_ID_2213633_Annot_ID_180942 3000 nt of promoter + ATG
ctagctaatcatgtttattactgttttcttgatggctataatggtttctttcaaattgcaattcaccctaatgatcaagaaaaaaccactttcacctgcccctatggaatttttgcctataagagatagacattggatgctcctggaactttccagagaagcatgacttcaatattctcggattttatcgaagagataatggaggtattcatggacgatttctcagtctatggatcctctttctactcatgtttgttaaatttgtacagggttctagaaaggtgtgaggaaaccaatttggtactcaactgggagaagtgtcacttcatggttcaggaagaaattgtgctggggcacaagatctctggtaaaggaattgaggttgataaagcaaaaatcgatgtcatgattcagctgcaaccccctaagatagttaaggatatcagaagcttcctaggccacgaagggttctacatgagattcataaaagttttttcaaagatttctcgacccctcaatagactgctgtgcaagaaaactaagttcaatttcgatgaagattgtcataaggctttccattcaataaaagaggcattggtgttcaagcacccaactaggactatccattttagattatgtgtgatgcatccgattatgcagttggagcagttctaggccaaaggattgatggcaaacttcacgtcatctactacgccagtagaacaatggacgtagctcaaacaagatatgcaaccacggaaaggagctgttagctgtggtttttgcttttgagaatttagaagctatttggttggctcgagagagaaggtttacacagaccatgcaacactaaggcacatctacgccaaaaaggaaaccaagccaaggcttttaaggtggatactattacttcaggagtttgacatggaaatcattgataagaaaggtgttgagaattgagttgcagatcatctctttagaatgaggattgaggattcaatcccgatagatgacactatgcccgaagaacaactgatgttctacgaccttgttaacaaaaacatcaccacaaaggacatactggatgaagcatatgcagttgaagaagaaaagttgccatggtatgtaaatttagtcaattatttggtaagtggtatgatccctcagagtcaggatgcatataaaaagaagaagttctttagagaagtccactattactattgggacgaaccatacttgtagaaaaagggaaatgatgggctattcagggggtgtgtctctgaaggagaagttcacggtatattggaacattgccatggcttcacctatggagggcatttcgccacttttaagattgcccagaaagtgttgcaagcaggtctgtggtggcccacaatgtttaaagacactcaagagttcataacaaaatgtgattcatgccaaagagtcgggaacatatccaggaggaatgagatgccacagaatcccattcttgaggtagaagtttttgacgtacgggggatagacttcatgggtcggttcaatcctccctcatatggaaatacttacatcctcgtagcagtggattacgtctccaagtggatcgaacctataacaacaaatgatcacaaagtggttctaaaaatgttgaagtccattatctttcccagagatggtattcccacggtagtaataagtgatggaagctcgcacttcataaacaaagtctttgaaagtttattgagaaaacattggggttaagcataaggttgccactccctatcatcctcagaccagtggccaagtggaagtgtcaaacaggcagatcaaagctatactcacaaaagttgttggtaagggattggtcagctaaacttgatgagaacctgtgggcctatagaactgcatacaaaacgtttattggaagaaccccattccagatgatatatgggaaatcttgtcatttactagaagaagtggaatataaagccatttgggcaaccaaacttctgaacttggaaatcaaaggagctcaagaaacagttgacctgcatgaactagaagacattaggctggaagcatatgagagttcgaagatctacaaagaaagaccaaaagcctttcacgacaaaaaaatccaccaaaagatttcaacgttggagaccaagttctacttttcaactccatgctcaagttgtttccaagaaagctcaaatccaggtggtctggacctttcaccatcaaagaagtaatgccatatgtgggcagttactcttatcgggaagggaagttctgaatttactgtaaatggacatagggtcaagcgttacatggcagattgtcctattcctgaaagaactacagttcacctccaggagtccattagtgcctaagatagtaagaagtctagcttaagactttaaactagctcgcttgggaggaaatcccatgtctatctctgtacatatttaattttaatattttgatatgcttcttagtgtttttggaatttaggaaataaatcaggatttgtggagctgtggagtctgtgatgaagaaacacctactacaaaagcaattttactctatcaattggtcgagtagcacgtttaaacgaccaagcatgatgatcgagtggctcacttgtttcccaatcactatattactcagcggataatgcatgtacccatcatactcaacacgatttggtcaaactttcttatcccaacaagaaagtttcggagaccatcctcctccactcattcaaatcgacatcaaggataagaatttcaatcttacttctttttctcttgtgagcgcacctaactatcatctctctcacttgattcccttagcaaaaccattcccaacatttcaatcttgagttttcattagacatcactcatccctatttcactcgatcaaacccatcgattttcttttttgtttttgactcacctattaagcttcggttttggtttctaaaagttcagtttcaca

SEQ ID NO: 10168 - DNA, 2183 bp, Unknown
  misc_feature (1)..( 2183): cDNA_ID_3016399_gDNA_ID_2213633_Annot_ID_180949 3000 nt of promoter + ATG
cttatctgcatcgatctcgatagcgaagccatgcttgctcaggcgagaacccgagataagaatgttggtaatgtcctgacatcagttgaattttactttagttaaagttgtaatgtcgaggttggacatttgtataatattaggtggttataatgttttgctagagaccgcttataatatatgagtcagaactaattgctaatattatacaaacctacatgatcacacacctaagcaaattggattaatgttggattaataataatataatatataatatatttgtatttgtgcatatataataaaatgtttattatactatatatgttatatatgatacataattagttagggttaaacgtttagctatatatatgatatattagcaacgttagtgagatatacttttgatcacaagaaccctaaaatacaagagacaaaagtttgtctaaagttttgagataagatctcaaaggaattagcattacagatctgattcacattttgtgcgtgtggataccggtaaagacacaacacttggagtgctaaaacaacctcgaattaatatggttcatcttttcgctgcagaatatccaggaatatttaaaccctaagatctagatttaattatttatttacacggtttctggctatagaattcgttattagtttttataaatcgttataaaccggtacaaatttcttcaattgtagcagagcctacttgtttaatactgaatatgaatctaatttaatctatattatgatatagataaataatttttatggtttatcatgttgaaatttgtgaaatttaattcgttaaacatggtaaaataaaattatataattcacttagaggaaattcgtttatgtttattggatatacggtttgttaagggtcatattttgattatggtattgagtaaatttttacaatgacacggcaacatgttttggtatatactaggttattaacctccgctacgcgaaggtttatttttattaattgttttaatatagtttaggatttagataaccattttgattaaacaactgcaaatacctagtttcctcacagctcgctaaaactaaatgttttttttaaagatctagactacaaccattgatatgcttttcttaacattataaaaaaatcattgttgtaggtttcacatgttagttcaagtcaatatatgttatccattctctgagaagaaaaattatctttatctttcgttatgtattattattagaaattttgtcttattgtaggataataagatcaaattaatagtattttaaatcttaatagatctcttatatcccttaaacatcccatacaccgatattattttattatatttcttccatttatttttgtattttcgtttctcaatgtataaattatatacattataaattatatatatatatatttgttgtcacttcttaaaatattataaataataagctaaactctagttagattgttagaacgaatcatttttaacatgaaactaaaatgtgcactcctaatattgtgactaagatgacatattaataaatttattgagacttgatgatattatattcatatattttataagtatgtgtaacgatagactttattttaaaggtgatattaaagtctatgctcggacgatccaaaaattaagaaaccatgcataataaaatcatatttagccctctctcttcggcgcttttatttatcccgttaatacccctacaaaaccgaaaaaacgataacagttagtagtctatctgcctcaccatttaatgctcaagatatcgaggttatattggaagatactatgtgccggcattggaaacatcaaagaaatgggaaattattactgatatttacgggcttgcggaaatatcacttacacatgctatgctatttattagggtgatattttcactctgttagcaaccgaaaaactatcatactaaattctttagcttccgacatcttaaatgcaagaaggagctaaacacagagaattgaaatctgaaaggtaaaagttaaagatctgagtattttgtactttaaagttatcatttggaaagttctttactttagggtttgtcagactattgttataattatgagaacgctaacaaaattgttatttacggaaaacctgcagataacaatg

SEQ ID NO: 10169 - DNA, 3000 bp, Unknown
  misc_feature (1)..( 3000): cDNA_ID_3035359_gDNA_ID_2213633_Annot_ID_180946 3000 nt of promoter + ATG
agagtactacaaaatagtatactcatgcgtcaaaaacggagttgtattgaatgagaaataagggtgtaaagtgggacacttggaccaaaccagaccgaaccgaaccggcctgcgggttgtcgtgtcgtcccgtcgtcagctcgagggctgtcaggcttgtggaccgtcatgcttgtgagttcttgggcttgttgagttaaatcttatggaaatattctcaaaatattccatattatcaaaatattttatattctcagaatatgctatattctcaggatagtctcaaaatatgtcatgcatatcctgagaatattctcacaaaatcctatctccctctactatataaagagtataacacatgtcccgccatacaggctaagatagcgtgttattcatccggtcttgccaaaacttttctttatttaaaattcaccaacgaacaaatttcaaccgcaacttttgatacttactaacctggagaaaatgggaaaaaggggtgagtaaaacaagtttacttagttaggggatcaactctgcctactggacatacagtaaaaacgttccaaatataatcaacaaccattacttagcaaagattcagaatgtctaacaattaaacaaacaaacatgcgtcttgctcacaacattatattttattttcgtttttagttttagtatttaactttatggcttcacaagcctatattaaatttggctactcaagcctattaaccttggctactcaagcatattttttggaagaccacggccgtagctcgatccttcctctcattgcttgtcagcggttaatgatctgtaatgggcctgtcagcccaattacagtccaacatccttaaatatatttttcatactttttagttttataatctcatatacataagaagttttgtaatttaatatatattaaatatatcaaatcatgtcaccaatgcatttcaaatattatgttactaacaacgtagcttcacacaaattcacataaatcaacaaggacaattctcgagcctatacccagcaactatcaaaaagtatataaggaaagagtttactacatatccgcaaataccaccctcaccttagcctaattgaagatgaagaacaactctcttctcctttatcctttagacaagttactagtttgcttccaagctcatactattgaacaccatcttggctctccatcaaccatgaagtaaaacactgagtcttaaaagctcctgtaaggtttggcttcaaaccaagctcgtttaacaaaacaacaacacaaaccatcacaatttaccccataattatcagtctcggaaacatatacatacatcaataactaaccgtgcaaaatgtaatcccaccgttgaatagttagacagtagcaacatgaacgtctacacaaagttttatctctatcagatttcacatgaatctcccacattcttctgaagatgctgcctcagaactgatatctaggtttctgcaacttgagatgattatgggcaaacttctaaggtcaattccagagagagcttaaatccgatggacaagttgtcagctactatgagttccttaaagaaatatctttccataaacgtcttgatatcgatataattccttctagtacatctggaaaacgtatcacaaaactagtagtcacacactgttctggatttctacttagcatagatttggacagctttggcagttacttgtccagaaaaaaacgtgtataacttctcgaatataaacccgattgaaactctgtcagttgctatggcttcatggcacgtgatctttgtagagatgtcttatttagcaactgattctttctagtatgacgggaaacatccttgtataacctcaacttgaaactactcttttctctttatcttcttccttatatgcttctagtttagcctagccgccttttctgatttattaggatctgcttcatctcacttctccttactgtcacaaaagaaatctccatctgttaatgcctttcctttgcggtggtgatgatctcttctcctccgcaacgtatcgtccttcgtctccgctttctctcatcttcctcacgattatccttcatctcttctctttctcttcctttttcttcttcttttcaagcgttccacagtgactaacatactcaacaacaacggtagtggcagacctttaattaaggttaagattaagatgacgcggtgactctcagattaggaacggtggcatgaatcttttcggtttccttcacctttgaactctcttctctctccgatctggtaacgaccacactctagaactcaagtgttgatgctttggatttgctttcttaagattcttatttggcggcttggagaagagggagatagatataccaatatatatgtgcaaccaacaatacacgtaacaaaaccctttaacattattgatttgcttcacttgaatttaagtgggctccatgggcttttttttttgacaaaacaataggatgggctattgatgtacggtttggggtgttataaagagacccagcctctaattatttctcaagctcccaaacacaaaacactctaaattctaaagtctctcttctctcttgctacttaaaagtaagttcttagtttagtagttgtcagagtatatcgtagatcaagttcgcttgagtctaatacttttgtgctcgggtattagtttgtgatcggttgtatcctgggattcataaatcgtgatgtccaaaaagcatttacggccgatttattgaattaagaaaaaatatatcatatcttacctccgtgatttactttatgtgcttaattactgttattgtaatttatcattatcgttatttaataaaattcgtacttgtttctcaattcagtgtttgtgctcctacaatcttaattcaataaatccacttttaccttatcgctttagacggattgagaattttttgaattttttaaaacggtgatgtctaagatg

SEQ ID NO: 10170 - DNA, 3000 bp, Unknown; identical to SEQ ID NO: 10165
  misc_feature (1)..( 3000): cDNA_ID_2714938_gDNA_ID_2213633_Annot_ID_180933 3000 nt of promoter + ATG

SEQ ID NO: 10171 - DNA, 3000 bp, Unknown
  misc_feature (1)..( 3000): cDNA_ID_1448143_gDNA_ID_2213634_Annot_ID_132098 3000 nt of promoter + ATG
cctaatccaaactccaaattataaactgtaaagtatctgtatatatttcttcataaaccctggaaattaaactcaaattaagatttcaaaaaataaatcataaaccctaactcttaaacttaaccctaagacttgatttctcgccctaaaatctacagagaatggtgacctaacctttttaaattttgacacttttatatctttagcttatatatatattttattttttcaattatctcatattttacgcaattgtttttatttatttaagagtgctagaaaaataagtatttgtaaatcgtataacaataataatatttaaaaacaaacgttacgtacggaccacaatatgcatatatgtacatatgcacatgtgaagcagaattgggtggattgagaatgagaggagaagcacatggaagtacacttgcatgaacatgtttgtattcataggcaaccactttcaattttatataatgactagtttgcaaacattattacccttcctttttgtttttggtatatcaaaacattactcctcctactagatgatttcttttatatattgtgtactttctacagtatttttgtttaccggaaaattctctcttttttataagaaaactttttccggaccaaacatggttttttgtcttttgatacgaagtttcctcttcaagtggaacttgaattcgggttaacccacacttgactaacaaaaataacaattctatttctctatatggctcagttattagctttttttggctttccattttcaccttttaatttgaactgaaatatttgataccacactaaaatatctctctttaactaaccatatggttatatactacactttgcaactaattgataactatatttattttagtagttttattttcgttgtaccaaagccgtccaatactaattgattaaactgttatttcagtttctataagttctcgttgaatcccttaaacttgtagcttttttatttgtttttgccgggcttgttgtagaaatttcgaagattggtcttatgtagaaaattaaagagaatattcttagagtactttgttagaggaccaccattgatgtttggattgtttgtagtaaatattgtattaaattgaattgtatattttaaataaatagtgaaacaatagacagttcacagttggaacataaactaagaaataatttcatacgttctaatatatatatgcatacaattttgttttaacgtaactacttgtattttaacatatatacataatagcaaaaatattcttaatcaaaccaaacttgtcttacatattttttattttgtcatctcattaatctatttttgaaaagtttgtatttgtgagatttctatatatttttatggatatacaaagtgaatttaatccaataaatgatcttctgttataaaaacaatgaatcaaatggattggcctacatgaagctttggtttggggacaaagaaaatatagagagggaaaggtctcacaagtcacaaaatattatacaaaaaaataaaaacaaagcacatgttctgacacatgaacatggttccttcttcacttctccttttctttctaacagctcatttctctctatctctccactcttccactactctcagcctcccactcaattcattcttctctttcccttgcattttataatgctttttgcctttttttcccttatattagcattgcattgtcataaattcctatgtatatgttacaactgatgattgattttcttgttctttaattgtttatagtatatatatagagctagggagctaatttatgtatatatgtatagacatggcttctctataagcttaattgtacatgtgaaggacagaaagagaagtgtattaattgtattggactattctttctttgtcatttgataaagtggccactcttatgctatctactcattaatgtccatacacactgactcctaaacttacgtatgatgatctttgcatttacatgtatagtaatcctgcatgcgttaaactagttaaacaagagtaaaaaagttgtgtctgctagacaatgactcaaatgataacattttaaccaaaacatttgctcacctccataagaagttgaatgtttcgataaagcttatataggttaaatcttaaaaagttagaaactagacttaattacaagtgtttcttgaatcgattagtggtatatatacataacattcatatgatttccatataatttaaaaagaggaaatacgagagggcatccggtagcatctgcccaagtgtcagctcgccggacggccagaaaacaaggcgggggaaatgatcaaacggcggagaaaggaggagagaaaggcgggagcatgtggaagagcaaaacataagaatgtttccaaaggataaataatatcatacactgttttgaaaagaaaaagtctctctaataaaataagtttagcaaaacaaaattaagggagaggggttcactaagagcacgtgctgcctgattctccatttgctcttaagagagacctcaaatctttttaatttttcttccgaaacagctgtttcatagctgtccgatctctctcgccccccatgtgaccccactcagagatataaaccctttgagatcgaatccatttatataattttatttcgctttattctattataaaaattatcttatctcatgcatccctctctctttctatctcttacttctgttttgtataactactctttgttatacatagccattttagttactctggtttgtttctcatcccattctctctctctttctctaatggttcttaatctgttttagcattttgatcatctaaaactttcaatttctctcttgatcctcacttgaattttttgttgtttctctcaaatctttgatcctttcctttgtttttcatttgacctcttacaaaaaaatctggtgtgccattaaatctttattaatg

SEQ ID NO: 10172 - DNA, 3000 bp, Unknown
  misc_feature (1)..( 3000): cDNA_ID_2715000_gDNA_ID_2213634_Annot_ID_180978 3000 nt of promoter + ATG
aatgcaggcttcatgttggattggttgcgtctgaagttgaatagggcgttggagaaacaaatagcttgtgacgcaggctaatgcacttgtaagattaaaagtattaggtccgaactttctcaactaagtaatgtctccgactggattatcattgcgctttgcttttacattgtgtttttcatggttacacccttggggttacgctaggtgaacgaagctgatatattggctcctaatcactctctctcttggatttgtatatttttgacgacagtagaaaataaacaaactgataacttaatttaattaatcttttgttatataaagagtatgtgaatataataactcccatacgtacgtaatcgtagatatatttcaactccaaattaaaaatcgggtaaaaataacatcacttgaaattttaaacacattttgcggtgacattatcctttctcaagtaggaaaaaaaacctttctcaaatatacatggctttgcaaaaaccattattattgattgagccggtttgctgaacctcaagaggattgagccggtttgctgaacctcaagagggttgaaccggtttaagttcaaagcatatgtagatacctacgcagcaagctagtctagcaatccggttcaacgatttaaccgctgaccttaaaaaaccggataaaaatataagcaacatctatccacagtagatgcaatttgtaaacctcgatttcgtcttccgtatagagaaagcttcttcatctcagtgcgtgtgattagggttttgaattcgaggctcttaaaagggttttcttcttttattgtatctagtagagtcttcaatggcaaatcaaggtggttttaagaagaagacgtttggttgggtgataaaagacttgcaaactcataggcgttgctctgttccaatcctaattggtgactcttattggtaaaagcatagtttcttttgttatctttcaaatctttatcgtcaaaacgtgatcgtatatatcaaatcatgaatgatcccatataccgtatttggttattctttctttcttgcaggcgtcttgttgctcttcccaatgaaaacggttacttttctctgtttctcgaagttaatatggaactaattccatgtggctggagaagatacgtggaatttcgcatgactatagtcaatcatatatctccgatacattctgtagataaaagtataatcctatgcactatggtttgtgaattgtgatcatgactggctatgtcaaataactattgatggatcggagtaacatattcttgttatatgtttaaatattgttacagaaggatggcgctggtttgatgagaacactaagaattgggggtttaaagacatgattcccgcagtcatccttaataacgtaaatgttgggttcttgttgaatggggagatcacgattattgctgaagttgaagttcatgaatttattgacacgttaaatgcatcacaagttgaagagcttagtgatgattcctctgaagatttgcagaacaaagataatgtaactatcgaagtcaacggctttcaggttcttgattcgcaggtaattaataagctcttttgtttcaatatttgagatagaactcgatttgacatttttgttcttcattatcatcacaggttgatcaggtcaatgcaatctttgagaaacatccagatctcatatcgaatttcagtttgaagaatcaacatatcaggaatgcttacatgcatgctcttcttgaccttacgaagacactgtccaaatctactaaggaactcacagtggaagacatgaacgaagcagacaatacgattacggatctgattaaagcaggcttgaacttggactggttgcgtcagaagtttgatcaggctttggaaaaacagatagcttacgacacacggatcggagaactcgagaaacaggtcaagaagcgaaagctggcagtgacagaacttgaagccgacctggagaaagagaaagctgcagcttcggcttcattgatgttgtttgactgagattttaagatgaagttgtgatttcttgatttgagtcttctccattgtttaatgaggaatagtgtttcctacttctagtctttttatttcagctttcctcatttcagtatcttccttttaggtagagttaaaaaacatatacatatcctatttttaacttgagaaaattaagtgatataagagtttcttggtgaataagtaagactcctctgtttctgttcattttctgctaagtaattgtttcatcctcaactacgttttggtctctgctaatttgtcttcatccacctgcggttttgaatacgaaattaaaattaaagcagagagtaagtgattatgatgaaactgttgaatcaaaattttataatataaatttgagtacgaaaaggaacctttcattccaagaaaggatattaaaattcatagtttcatttctctgtagaccaacatgtagtggtcaaaatcaacttgtagaacttgcatatattaattttaaaatattttatttaaaagttttaagtcgatggcaaatgctacaagttgaatttgaccaaataacaagcaaaggttagtcgagttttcattgttgatgccgtttctaacttctctcaaatacacaccgcgtgccgtttagtgctctgcttattggacaacgtgtggtataacagaacgtgaacgcttaaacatttttcaactgggccgggctctttggcccaactctatgacttgaatgataccatcagtgaagtcaggtcggtcggtgttcgtcgtatcaaagaagtttcctttagagctttttctctcattctgtcttcgtctaaaaaggtgaaatctttaacaactgatcatattactcttaatgatttcgtaatctcctgttcgttacgttgattattgttatctgttaaaattgatgtttaagagtgtcatcgtactactggtagcttgattgcagataacaatg

SEQ ID NO: 10173 - DNA, 3000 bp, Unknown
  misc_feature (1)..( 3000): cDNA_ID_2715026_gDNA_ID_2213634_Annot_ID_180971 3000 nt of promoter + ATG
ttttgtttatttcaagacagatctcactgccttggcttcatccagtgaccagtctggtagagccaatgaagtagttagatgatttcactgttagtcacgatgcacaaagtgtttagacttttcttatggtcgttgatcttataatgggccaaaaattgtaaattgggccgaagtgcaaaagtgaaacccatatatggagaggcggggtttagtttacaaatttggatgtgtggttggtggtgccactcaggttctagggtttcacgctctctactagtttgagcttcaatgggaaatctcgttgataacaagttcacatgggtgattcaaaacttctcgtcttcccaatcaagggtcgtcccttctaatcaattcgttattggtggctgcaagtggtaaacatgataaaccttgtcttttaatgttacaatttggattttctcttttattttgatgacggttcggatttcttttttgatgtaggcgtcttcttgtctatcctgagggattcaataagtctggtgatcatttgtcgctgtttctggaagtggctgatcctagatcattgccacctggatggagtagacatgcacgttatcttttaactattgttaatcaacattctgataaaatctcaaaacgaaacggtaattatatcttacccttattacaacataattaattagtcagataaaccagttaagtaatcttcagtttttatgtcttgtgaggcttgtttttggacttggaatattatatgtttctgaagcgtgtttctgtgttttttttggggtttggtttagttttcaagttttctgccaagttttgaatattgttttcataatctacaggttcatagttaaatttactgattagatgaattctgcttttgtgattttacagaagcaactaagtggtttaatcaaaagattccaggttggggtttgtcagcaatgattccccttactaaacttcatgccaaagatggtggatttcttgtgaatgatgaactcaagatagttgctgaggtaaatgttcttgaagttattggcaaactagatgtaccggaggaatctgaagaggaaacccaagttacccaacctatgaaaaaggtaaaggtagattatgatcatgtggagtctaatgatttgatgatcaacgagactccaccggttagtgaactcatggacgtcaatggttttcaagttcttccttcccaggtaagaaaacttttaagagttttgtagaaatttcaacctcacaagagttatcaaaaatcttgcttttttttttaattcacttgcaggtggattttgtgaagcgtatttttgaaaaacatccagacattgcaaaagatttccgtccaaagaacccacatctgaggaaagcatgcatgaatttcttgctcagcttaatggagacattgtgccaaccacctcagaagctatcaaatgaagatcttgtggaagcagacaatgcactgacatacgtgaaagtttcggggtttaaagtggattggttggagaaaaagctagaggaagtgaagaaaaagaaggaggaagaacagactggtgaggctcgaattcaagaactagaggaggaattgaaggaatttaagcagaagtgcttagatagggaagctatgctggagaaagaaaaggcaaaggtgttaacagctagagctcctctaacattggatgatgttatttaatgacttttggcatgttctggtctttgtttgtttgtttgttcgtttgagtctatgtttcgaaattggagtcttcttaaaacttagatagctagacagacctatgtgtcttcctttctttttgtacctatgggaatgactaatactgtacaaaggttgatgatgccttcaatttcagctatcaaatcaatagggaaaaccagtttccattatcataactttttaattctcttcaaacctcattagagaagattctttcgtcactaaagtaaaggattttggcataaaagcagcaatgaaacgaacgtaagacacacaagccagaaaacgagaatgtgagctcatataaaaacctaatacgagagcagaaatagtatatgtttcgagtttaaaaaccgattaaaaaaaacgtttgaaacagtgagtaaaaattattagtataccgtatacgagagatgagagtaaaagtaaattacgttttgaaagacaagtcacttatccatatgatggtgataacgacttcctcttaatcctctcatcacacatgacatatatgtaatgataattacatgtatttcctgaagttttttcaaaggtggcctacagattattgctttgagtttaaagaatacgtacgtgttaatatccatattagttaaaaatggaaaatgtttcttaagaattcacatgaattaattgacttatttatgctgcttaaggtaatcaaggatttgttatgtcagaacacactatttaggagctctagtaagtgagttttggtttcaaactgccaaaaaagtgtaagatctaaaacaaagatcgactaaattaaactacgacggtttagttgattatggaagatacacacttgttcctctctacaccttcgttgactacgctgctcatccacattttcttattcccctttgaagtttgggcctcttttctatatgggccttcctccgctataataagaaattaggccatttcaccaatctaatggactctgtgtttcgtttatattagcccagagcttcttgggttgaccaattcaacgtctaaaatttgtgaccctgaggcttctttactatgggctgacaaatagcccgaattttccgtaagctgtaataacttagccactgtacaagcttatgcatctggttttagtcttggtgacactgtgctttcgacacttgtgttttggttactatacttgtgtgccacttgggttctagggttccacgccatctgaatgatctgactcgttcgaattgcaaagtagtcttagaatg

SEQ ID NO: 10174 - DNA, 3000 bp, Unknown
  misc_feature (1)..( 3000): cDNA_ID_2715032_gDNA_ID_2213634_Annot_ID_180969 3000 nt of promoter + ATG
gattagaagaaacagaaagaagagtttaccagttacaagactctttgaacaggtattattgaatcgtaattttaacaaccatagattatcttccttcctacaatttttactccttggttaaaaaatttaattaataaatctagtacatttaatgatgataagtcttgtttagtgtattccaggttgttatattctatgtcggaccaattctcgcaactgaagtccatcttgagatctccttctatgtcagcttcaacaatggcctcagcgccagttgtgcgtgatgatcttgctgacagctctgagaactctgaagcttcatcaagtgattccgatttcacttttcctgctccatctccttcctcagacaatttttcgacttttaacccgaatcagctgcaagtcattgttcaggatctatcaaccacagaagccaaaggtcagtggtaatagcactaaaatcccatgaaagattgcaattcatttgtgtttttctttttttggacaatttttttaattcatttcctttttgttacactagcctctaaatccaccttaatataaacattttgcacatggtatacattgttaatggaatcatccttcttctcatcttgtagaacaataatattgcaggaactgagagctacgacagtgataaggaagggggcttcgaagattacttttgatcatgaagtgcagacttgatctcttcacaagatttttggagttctgacaatctctttactccattgttgtgccacagggcaaatgttatagtgtttacacttagttccaactgcaatttgtattttcctcaggaatagatgctgcaataactatgtagggtcattaagatatgtcaagttccatgttgttaattgcatacacaagccatgtttgttacttcactaatacaattgttgctcaatttcagaattactaatttgctttgttttgtcctcatcatttcgaggtgtgagttttgaattcttcctgcaattttagttccatgaatgagatcattgttagtccatgaatgagaaaatacagtatccaatatcttagttttgtacgaactacttttcaacaagcaccagtggtctagtggtagaatagtaccctgccacggtacagacccgggttcgattcccggctggtgcaaaaagtatcaatatgctattttttcgtaggtccaaaatttgaacagtcgctatttatacataaaggaagtaaaacactctataaaatccaaatatattaaactttttataagttttatgaaatgtgtcctcatcccaagcactagagcacactataacactggaggcatacatcattacactggttggtgacaattagatcgtaggagccaacagagagagactgggaatatcatgagatcatggatgaatgttcaggaatactccgggtttgccaattttaccgagtaagatagtatatgactagaaataaaccaacaaacgatgccacgagcgtcagcattcttcggcttgactttgtctcaaacacctgcaaggattcgattcaacatatcaaagacacagacacagacacaccaaaaaaacaaacatgtcaaagacactttgcaacacataatgaagctaggcttagggttctgagagagtatttctagtcagatataccgttttaaagcggtccatggttcctgagagaaatccccttgatgaatccatatcattgccctacatagaaaccttgcaaaatgttcagtaacaatagcgtctgtgagcaaatgataaaatataagtatcacaaatattctggtaaataccattctgtcaagcatgcggttatgagtatcgacctcttcatttatatcgccagatagctgtttcatgaaaaaagaaacaaataagaatctggttcaaacctagttgtgcatatagagtccaactacaacaacaatgttgaaccaataaaactatgttacggtttccatactaatcctatgggcagtaagtagtagatacagaaactcattagtgtacaaaatgaattgcaagtgtatgttcctattacgtttagggcttacttcatattcctaatcctactgaaaagtgctgaacacaagtttgaacatgacagaggaaccagaggcaggcttactcgttttaagagaatgactctatcttgcaatccctccaaggcacgctcattctcatgttcattgatctcatgagagtaagaagaagcagctctaattcctccctcttcgatgccatcaaagagagaacttctaccaccacgaggctccctgaaatcaaaattagacctcagcaaagaaacagtaacatcttccactcaatctaaattagatgaatttgaaactgatccaaatctatcagaatacagagcaacagtcctattctactgctccttcagatcttcccgatgaaacctaatctacaaattaacgagctcatgaaaacacatctaatcatcagatttcgctagatcttaacctccaaattctaaccaaagatgtgtttgaaaaagtagcgatttgaaatcattcaaggagagctaaccttctaggattcatcgatcaatcgaattaacgttttgatcctccaacgatgtctcgatttcgcttcaagatgttttccagaattcacctggatctatggtttcacaacgaacgcaaattaaggaaggaaacggttgatatgtcgaaagaacagaaagctctgtgtttatcgttcttaagcgaatcaacactcaacaacacgtgtatacgcaagtaatggataatagaaactatggggtcaaatttaaaatcaataaattgttttggaccaaatatagatttcgttatttccggaataggtcccgcgttttttttctctttttcacgaatcagattctcttctcttttgtatacaaaaaccctagtcgacggcgctgttacaccgtcgtccagatttttcaaacgccgacgaagctgatttagtgaat

SEQ ID NO: 10175 - DNA, 3000 bp, Unknown
  misc_feature (1)..( 3000): cDNA_ID_4359907_gDNA_ID_2213634_Annot_ID_180968 3000 nt of promoter + ATG
tactcttttgtgctcttcttcttcttctttttggtcaaactcttttttcttcttattgttttagcattttttagacaaaaataaagtaagaaccgaaaaggacaagaattcgatcgtgttccattggtgtcattgtcactaatcaatcagttgggaaatttgatgagtaatcaactagagaagcttcttggtgggaaattccaaattggattagatgagactaatcaaacttcgcataaacaaaaccaatgaaatgattaaaagataattaaagcatttagaagtgacaaagaacaaagtagttaagttgcatcctattcaggggacattatgtctaaaaataccaataagtaagacacttctttattacagtttttgtttttaataaagattcttaaaacttcttaattatagttaggtaaacatgttcaatctttagtacagtactacaacttagaactaaagtgtggtcctcttattgttaaaacttgacatgagcaaagataacattcattcctgggatgtgttattttctatgtatatcttactcttctatgtttgattctaaagaaacggttaagaaacaagaaaataaaacacaaaggattctctttcttcaacaatgaaaagcttccgtaccataagacaatgtaatcttaaccttaaacatatgaatagagttatttataatcgtacataaagacatgttaaagtagcagtttcttctctctctgtataaaatgtttgctttcctttgtcggtaaatgtttgacgaagaatgattgagattcttagtgaacaagcgggtcttgcgtgaaaaaaaactgcaaaaatgtttcgatatggggtcattacagatttattagatatatataagtgtaagagtttgggatcaatgtgtttttacctcaaacgatttcccggaattttcaaattccaacatactcaatgctacttcacagctttgtgcaacaattggctcagggtcctttgagaattcttctagcaaagcaatgctctgttcatctgaaaagggccgagcaatgtgaagagtaagtaaagactaaagactaagacagtagattgttgtaatctcaaactaagcattttagggaagataccagcaatagaaccaagcgcttctgcagcctcatgtctaaccattgggtgctcattcacatctctaagtactttgcttagagtagctaaagcagttttactttgcaactgacccaagacataagcaacctaagaaaaattgcatcaattacaaggcagcacttatacagatttaaggttcgagagcaataaagcaaagattcaaggtacaagattttaacaaaaacagacacattcaagttcatgaacataatacaggaaagttgacaaacctcgtgacgtagaagggcactactagcactcaaagaatcaactatggcagaaacagcttcctctccaccatgattccttagagcgaacagtgcagcatatctctcatacatgccttttgtttcatccaggagaacttgcctgtagttcgatgatcttaatcaataacgtgctacaaaatattaaataatctagagaatgttgaggtggtcaagagtggaagaacctgagttggtgaacagaagagaaagacgcagctgggcctgctgggtcaacagacatgaaaggtgatttctctgtcgttgatgactggttctcggcatcaacgttactcatgtcttcaatccttttgagagctaattcacatgtttcccgaacctcctgagctggatccgagctcaagcttttctttaaaatgttaacattacccgccaaaccaatagctccaagggcttctgctgcctgtaataatatattaacagcgaatcagtgatatgaaagaatcaaaaagcttatactgatacagagaaaataaggatcaacttatactcaactcatgtcgtactattggatgcaaagacatatcattaagaaccgactcaagagcaggaatggcttcagcatcttgcatctgacccaatgcaaatgcagcttcatgtgctaacaaattagatgagtctctggatgctgcaggacatggaaaaaaaagataaaccagaagttaaacacaagcagtaacacaccatatcagcacacaaagcttgaagaagctctgttcaatcattaactaaaagtaaaaatgtggaaacttgtatgtagttttaggtgcatcaatcaaatagcagctataaaatcaaactgcaaagactttcaatttagccttatacagaagcttcaaagaaaacacaaataaaagaatcagagtttctacattcatcaagcgccaatatctttctttcccaaagtaacaatttttttttgtagaaatagactttatataaaaaagacaagattttgagcagcagtgttaaaacaaaccaaggattagagcgttgcgaggtcctgggcctttcaagttgcgaagagagaagagagctctaaatcgctccgagattggttgtgactggtccaccaatcgctcacagagaaacttctccaagttaaccatcgatgaaactgatccattagattccatattcactaaatcagcttcgtcggcgtttgaaaaatctggacgacggtgtaacagcgccgtcgactagggtttttgtatacaaaagagaagagaatctgattcgtgaaaaagagaaaaaaaacgcgggacctattccggaaataacgaaatctatatttggtccaaaacaatttattgattttaaatttgaccccatagtttctattatccattacttgcgtatacacgtgttgttgagtgttgattcgcttaagaacgataaacacagagctttctgttctttcgacatatcaaccgtttccttccttaatttgcgttcgttgtgaaaccatagatccaggtgaattctggaaaacatcttgaagcgaaatcgagacatcgttggaggatcaaaacgttaattcgattgatcgatg

SEQ ID NO: 10176 - DNA, 3000 bp, Unknown; identical to SEQ ID NO: 10171
  misc_feature (1)..( 3000): cDNA_ID_1448143_gDNA_ID_2213634_Annot_ID_180962 3000 nt of promoter + ATG

SEQ ID NO: 10177 - DNA, 3000 bp, Unknown; identical to SEQ ID NO: 10175
  misc_feature (1)..( 3000): cDNA_ID_4359907_gDNA_ID_2213634_Annot_ID_132103 3000 nt of promoter + ATG

SEQ ID NO: 10178 - DNA, 3000 bp, Unknown; identical to SEQ ID NO: 10174
  misc_feature (1)..( 3000): cDNA_ID_2715032_gDNA_ID_2213634_Annot_ID_132104 3000 nt of promoter + ATG

SEQ ID NO: 10179 - DNA, 3000 bp, Unknown; identical to SEQ ID NO: 10173
  misc_feature (1)..( 3000): cDNA_ID_2715026_gDNA_ID_2213634_Annot_ID_132106 3000 nt of promoter + ATG

SEQ ID NO: 10180 - DNA, 3000 bp, Unknown
  misc_feature (1)..( 3000): cDNA_ID_2715010_gDNA_ID_2213634_Annot_ID_132110 3000 nt of promoter + ATG
tggctatggctgctcgtgctccacttgatttcagtgatattgttttaaatgaaaatcgaccgcagattctttagttgattctcaacttcccttttccacatggctattagaaatcgaaatattagtttttgttttataaaaatatcctgaaatatttcattttggaatcatttcgttcatacatgactcattcgtacatcaatgaacgacaaaaaaaaatcacataagattcaaccgaaattaaacaaataactgataaatcgaacttgcttaaaaacaagatacaatattgttaaaacggttattcattaaaggataaatcaaaaaattaattgctttaacaaacctattaacaattggattaatttatcggcaattccggattaatagaacctttccttgactccttttttaaggatggtttcggtgtaaatgtatatatatgttgaccaacagtaaatccctaggagcctttaacgactcgtattcctcgtggtaattaaatccttaattacccattgatctataaacattgtagggaaaaaataatatgctgacaattctattccttagtaaaatcttaatcgttaatttagttttgtttgtcgagattgttgtctgatatttcgatttatttattcaggtgtgtaggagtagctaggagtcaacatgagaggatcaatggggaatgatcaagctgataagaagaaattcagttgggtcattaagaatttctcctctttgcaatctgagaaaatatactctgatcagttcgtgattgacggctgcagatggtaagaaactaagaattaagacaatttgtcttttaatattattcgtccaaatttaggtttacgtgataaatacggcgatattgttttttttgctatttttgaaaaaaaattctctttcgttttgctgattgttttctattgattttgcttacaggcgtcttttggcctttcccaagggaaatgatactaaatctgatcatttgtctctatatcttgacgttgctgagtctgaatcattgccttgtggatggagaagacacgcacagttttcctttactatagtaaatcacattccagaaaaatgctctcaacgtaaaggtgagtattttcatgctagccacaatatatattattgcttattagtagatatattttgtgggagtttgggtgctgcgagattctagttctatgtaatgagatgagatctgttttgtattctattttgttcagaaacaatacactggttttgtgagaaagtatcagattggggcttcacaaacctggttcctcttattgaactcaaggccgaagatagtggatttctggtgaagggcgaactcaaaatagttgttgaaatagaggttcttgaagttattggcctattaaatgtgtcagaatcagaaagcatggatgtcaacgggtttcatgttctaccttcccaagtaagaaagatagttttaaacacaaaaccataagaatcactcacttaactttagtttttggattataagacattgttttttggtctgtttcttagtctcccaagattgctctctgatctggttttacttcttacgtccattttatttcactgatcacaggcgaaatatgtgaagagtttgtttgaaatacacccagacattgcaacaaaattccgtataaagaaccaatatctgaagacaggatacatgaatgtgttactctgcctgattgagactgtgcgccggtcacctaaagaaatctccaagaatgatttggccgatgcatatgttgcattggaatccttgactgatcatggatttaagttggattggttgaagaagaaacttgatcaagtgacacaaaagaaggagaaagaggcagctggtgagactcggatgcatgaaattggggaagagttgaaggatttgaagctgaagtgttcagacctcgaagctcagttggataaagtgaagtggaagtgttcagacctcgaagctcagttggtgaaggaaaaggcagatgttttggctgccatagctccactcgggtcgtctgatgacggtgtatttgatgactttttttgagttcttgggcaattagatttaggttctgctagtgagatagggttgtttgtttggcctgctctcttgctttcccttttaaagttaagaacataattaaagagacttcatgttactagggctctcaaggtgtctttaaagcattaattgagttgcttaatgaaaaaaaaagttaaatatcttaggcaaatgaagagttggagctaaacgaattggattccaatattattccattggtcgtatcatttattaattcataataatattgaaaagtatttaaattcacgaggcttcatcattaataaatttgttgatttttgataagttaataaattattgtaaaaaaacccagtcaacacaacactaacagttttcatctaacaaaatgaattaaaaaaaaaaatcaaaacagttttctgaaaaaaaaattagccataataatcgtttaacaatcattcaagataagtattctgtataccttaaaatacgcaaaaaaaaacaggatgtttttatcatccatttacgagagtaatccagatggacgcagaatggtgggaagaacggaaaacggtaaactgtaattaaaaatctctaatcgattgatttttcatgttacaatcgaaaccacgaatcctactacataagtagactgtatcaacgtagaaatttagaatctttttataagtcaagcgaatgcactaaaaataatcaagtaatactatttttagcctatatttagtcgtttgttattgactagattttgttagtgaattgaaacaatcaaatgaccccggtatacgaatcaatcaaacactatttttaggatcactagattttgttataaaaactatggcagaatatatttctttaatttctcatctttcatattcaggtagtttgattgcaaggagtcttcattaatg

SEQ ID NO: 10181 - DNA, 3000 bp, Unknown; identical to SEQ ID NO: 10172
  misc_feature (1)..( 3000): cDNA_ID_2715000_gDNA_ID_2213634_Annot_ID_132113 3000 nt of promoter + ATG

SEQ ID NO: 10182 - DNA, 3000 bp, Unknown
  misc_feature (1)..( 3000): cDNA_ID_2714954_gDNA_ID_2213634_Annot_ID_132126 3000 nt of promoter + ATG
tctttgactatgatgactaagtattaaaagtttttgtagtactttgtaatggagtagtaccttacaaatggtttaagctgggttacttaatgtaaaagtaattttgtgaggcttgaatcttaagttttttttgcttggttttgatgttgattttgttaaatttcaacaaacaaattaaacctctgtactccttaaatgttttttttggtaattctattattttaatacgtaattgtggccgtaggtgagtatcatgtcacgatgagtcaaggctgttcatatttcgagattcatagatatatatatatatatatccctcgctttttttcgttttctctgttttttcctaaatctctgttagttttctcctcaaataatcattgatcctctggtttcttcatgcacctgcgctttaccaagaatcttttaatactcatacaacataataattcgaaattatggcagagtatcaagtcacgagggacaaatgctgttttcattcgcgcacatcaatcgagactcatgcatatttcgtatatctatctgtggcagatagaattcctcaaaaacactaaactgcctcaagactctgaaaggtaaacatagctttctttttttctttgcctccgtttcgtttctgcatgcgacactgaatgtttctctctttccatacctataatttgattctattatatcaatattaatgaacacacagggtaattcaacttatatgattctatttacactagtactacattgttggtttacgaagtttgtgtgttctctctctctttccttgccactgatctattggatttttgtggatgtgtgatgaacttattattttttcttcaggtcctgcagtttgatcaggaagaatcttttactacatcaatgaccaagcaagttggtaagaagttcgcttgggtgataaagaacttctcctctttgcaatgtaagaagttttattctgttccattccagattggtgactgcaaatggtataagaaacttaccttttaaaagtttttgtcgaactcaaaaaatataggttttattgactcgtttcttctttttttttcaggcgtctttctatctatccaaaaggaaacaactgcgattacttgtctctgtttctggaagtcgctgattttaaatcactaccttctggatggagaagatacgtaaaacttcggctatatatagtaaaacaggtgtgagaagaacgctcggtattgaaaggtgattcttaacactgatattcatcactctatattttgccaagttgtcaacactgataaggagtactgttttcgatattggttaacgaagaatgaattgttacagaaacacatcgctggtttgatcaggaaatgtggggttggggtttcctatatatgcttccccttaccaaacttcatgacgaaaaggaagggtttctagttaatggagaactcatgattgttgctgaggtagatgctcttggattcattgaccccttaaatgagtcagaggaatctgaagatccaacccaacctctgaaaaagattaagcttaatgatgatggtgcggtgtctagtgatttgcttgaggaagcttcacccagaaaggaaagcatggaggtcaacggatttcaagttcttccttcacaggtaagaaatttaagaatgctgcaaacttcttgttactttacaagagacgagatcatgtcttcgtctatttccaaatatctaaataaatgttatcttatatgcattgtaaaattatgttttctctcttttgcaggtagaatctgtgagacttatatttgaaagacaccctgacattgcatcagaattccgtgcaaagaaccaatatctgaggaaagcatgcatggatttccttctcagccttgttgagacgctgtgccagtcactgcaagagttctccaatgaagatcttgtggaagcagacatcgcgctgacatacttgaaagatgcggggttcaaggtggactggttggagaaaaagttggaccaagtaagagataagaaggagaaagagcggtcttgtttggccaagctccaagaaacagaggaaactttactgaaattgaagcaaaagtgtacagagctagatgctctaatggatactgaaaaggcagagttgtcagctataagaactcctctatcatttgaagatgttgtttgatgcattgagttcttaggcatttggtgttctgatatcttagtttctcccttggtttcaaaataagatttgctcttgtaaggtaattgaacttatgtttgaagtttccacctttgtacgctatgatttatcaagcaagtttcagctaccacatttgatttagcacttagtttcttgacgacatatttattttcttgcgtctgaagcaaagatttgttctttggaagttcttcagcactcggttcattggcatgttttgaaatgaatcctcttatgtggaaagttttcatatttttgtgaaggaatgttatacaattgtgacactaatcttgaagataaaagaaaaaaagtaatctctttgggctataaacagaggtgtggcacttgaagagtcatggctcgtggctcgacgtagacttctttaatattcattgatattgtcatattttggttcatattcatgcagaataaacacgttgatgtaaaggctgttcgcattcaagcacttctctcgagacgcatgctttttctgcatattatggcagagtgtcaagttacgatgagcaaaggctgtttacattcgcacaccttctttatttttggtatcaatcattaatcatcctatatatatccatctcttgcattctgaagaaactcacgaattagataaaactccctagctagctagcttggtatgtataatctcttttttctccgtttgattttaaacaatgttccttttaaaagtactgatttctggtttcttttttacattctgcagtttgaacgggagaggttcctataatttcgatg

SEQ ID NO: 10183 - DNA, 3000 bp, Unknown
  misc_feature (1)..( 3000): cDNA_ID_2715127_gDNA_ID_2213635_Annot_ID_132129 3000 nt of promoter + ATG
tgtagaataaaacaagtccttgaaggatgcctctcagtcagtagaaactggtggtaaggcgtttaacaatgtggcatctgttgcagagacttcaaataatgtgcttacagagattccaccagcaaaggaaactacggatgtcaatgggtttgaggtttttatgtcccaggttagaatgggtttcatcatagttcactttgttcttgctagcaggtagaatcggtaaaccatatcttcaaaagagacccaaacatagccataggcttccgaccaaagaacaaacagatcagaagagcttatataaatgcactccttagcctcacctagacgctgtgccagtcgccagagaagctatcagaggatgatctgagcaaggctgatgtaacacttgttgatctgattgatgctggctttgagttggattggctgtagacaaagctggatgaggtctctcggaagaagaagatggagcagggtagtgggccccggctacaaacaatggaggaacggttgcagaagctgaagcttttgttcgtggatcttgaatctcagctgcagaaggaaaaagtggaggctttggttgcgagagctcctctctcattcaacgatggtgtttgcagattttcaggattttgtggctttgtaggtgaatctttgttttcttatgcctggaagcaaggcccaagtttgtattctttgagttttatgtcgaatgggactgagtagtgaaattaaccttaaagagtaactatttcaaaacatttgaacaactaaagtgtatgttgaggatttaagttttgaaggctgcaagaatgttgcaatgttccaaacacgtaatcatactctccactctatttgagagtaactgggaaatttttggttttggataataactccactttctatgccttcctgggcttcaaggtttgcttttgttctgctgcaaaaatgcagggaaggattcataggcatgagtcgaggagatggagactgagtgactgactaagggtatgtgactgaaaatgatgaagaacccctactctgttttcgattgatgaaagtgaaattaatttctccgttctgcatcatgatttgaagcacaaatttgagacagagaaggcagccaccgctctccttcgatgatgttgtgtgatcacttaaattcttaggcattctttaagatcggagtttttcttaaaagataatgaactctcatgtatttccgaagttgtcacttattgtgaagaagggagtcttttgcggctgattatctaagtttcagctaccaaatttgttagatctctttggagagttctctcatgggtatgaatcttgatgataaagcaacctctctaggtctgaaacagtgacttgcacttgaatctattgctttgacatagactcctttaacatacatttgcattttcatcatttaatttatagtttgggcttatgatcaagtcacgatgagccaaggcttttcatattcttcataaattatagccgtttttttactctgttttaatgcatctctgtcggtttgactctcaacaaatcattgatcctttgcagtcctgggcatgtggatattctggtcgggttcggttttccgggcttaaaatttttagattcgttaggttatatgtacaattttgggtcatgttctattcggataatttggatattggttaaagaacccataaataaccaaagttttttcttaaaataataatctaaaataaaacgtaaaccttgttttgaccttattccataactcaaatcattaaacaagtcacaaattcaaattattaatgcatatatatacagtaaaacctctataaattaataatgttaggactgcaaaattttattaatttacagaggtattaatttatcgataaattaatatttcttaatttatagagagattttcctaatttaataacttttttaaaaaaatcgataagatttctttcattttagaaaatatctttctagaaccagttacaagtaaaacataataataatatctagaaaacaacaccaaaatgtttgatacagtaaaatatgaaaactatagtcaaacaaataacaaatatgaatttaagcaaaaaattattataaatatatttttaagaaattttttacatataatatagagatatattcgatacatttatagaattattaatttatgatattgatgagaccatatatttacataggactttcaaaaaaattattatcttattaatttatcgatttatatcactttttacattggtcccaactcgggatcggaataatttattaatttatagaggttattattatatagagtattaatttatagaggttctactgtatgttcgggtagtaaaaagtattcacgtgtatcgggttctgttcgagtaataccaatacccatagtttttttgaaaacagaaccgatcggctaattaaccggaaccgaagcagaacggattcggatattttggatcggattcggttcgattcttccggttcaggtattatgctcacacctaatcctctagtttctcttctctatgcacctgcgctttacctaggctcctatattaattcgtagttaagagtatcaagtcacgagggaccaagactgaattcattcgcgcacatcaatcgagactctcctttctgcatctgctcaccttaatcgagaagtttagaattttcattttttcatatatatctttatcgtttgccagaagaaacttcagaacaagacaaaaccattgttggtatgattctcaactaagcatctgatcctctagttttacttcttcattgttaccaatgtttttgaaatcagagagtttatcaactaactgtttctagtctttgagtacatatgtagtgggatctttgtttgtttctttggcttactatcttaaagtttttttttttattatcttcaggcacagtgtatcttgattttgagcaatatttatagcgtcaatg

SEQ ID NO: 10184 - DNA, 3000 bp, Unknown
  misc_feature (1)..( 3000): cDNA_ID_2715116_gDNA_ID_2213635_Annot_ID_132132 3000 nt of promoter + ATG
cccattttcacttgaaaccagattcaagcagttccttattatgtcctgaaaatgtcaaatatccaaattccatcattgagacattacatcgaatcaccaaaaacatagaaagggtgaagaagaagaagcagaacctggaagtcaaacaaaacccatgagacgaaatgaaacagagaagagattcttttaatggaagaaaacaacagagccaaaaaggaaatgaggaggctttgaatgggtctaggattagatgggaacgtgagagagaacgataatggcggccatttctgatttaagagattctcatgaaatctcaatctctcaatgatgcaaatctgttccattggctgggagaaaaatagagtcctctgttccacgatcgctctgttatttttgttggctcctcctcagtttatcctaattttggcgtcaatgtttcgcttttaaaactaggtccctataaaaattcaaacttcctatgttaacccagaaaataaaacattatcaatttgacccaaacaaaaatcataagaaaatcttcaatttttaataatttccctaaagtaccattaaaaaaaatcacagaagctaattatgggatttctactgttttctaattcataacaatatatactgtaaatagtttaccaatcaaagacactaaaaacaattcatgtcttcaatagaaaacattcaaaagttggggactttttatgaaaattctgtataaacgcaagcagaaccaaagccctagccctctctaattcgctgtgtccgttaagtcctctcttttccgaaggatctgactttatcccggaattctgacgccgaagcttaaatggaaaaagaagatgagctccagaagttaaacggtcaagtttcagctccacgagacggagatgtagaagatgacgatccactagtgttgagttctcaagctttggcggcgcttcgggaatttctagcagaccagaacaagactgttgcgagcacgccaccggcgtcttccgtcgccggaggagaagaatccgataaagtggagctggttacggaggattggagactcagccagttctggtacgaacctgaaactgcagagactgtagcagatgaagtggtcactctctctcaaagaattccaggctgcagagtcgcttgcattgcttgccctactctctacgtttatctcaaggtactattaatcagttttgttcagtacccttaatttgtatcgaatccgttttgctaaaaatcgatacttttgttgtcgttgatgctaaatttctgtgcgacgggttttgatttgtgctgagtcagaaaagagatcctagtcttcaggtgcaattgctggagtacgatatgagattcgagagatatggaaaagagttcactttctatgattacaacgaaccagaagatctgccgcttcagctgaaacattgcttccatataatcgttgcagatcctccctacttggtaaagtttcttcaagttcttaacttttccgatgctgttctttcatgggaattttggaaatcttttagctgccccttgatagataggtttagagactgatgtgtaatctgctctgaacttctgacattcaagaagcttctgctagataggcattgcttataaattaatcttcttttaaaagattatagaaagtccaaaagcagacaagatgaaagaaaaaaagtgtaagctttacaatggagtatcagttggttatggtcatggcttagtgtcacttcttaaagatggatactttgtggctctctgctgcgttttgattatcatttgaaatatttcccgggtaggagtatttgtgacttgtgaggatatcattaatctgtgatgtttttgtgtgctatattgcttgctatcttcaaagcataaatgtctttgagtaccttctagttagcgtgttaatgatcttgattcgtttatgcttggcagagtagggaatgcctggaaagagttagtcaaacaattttgttcctcgcaagcccagtagattcattgttgcttcttctcacaggtacaatgggtacttttgttttctcaagtcaaatttatatgatcttatgatttattaactaggagatatctcacgtcttgcaggagaggtgcaaagagaacatgcagctgagctattgggtgttcgcccttgtgtgtttaagcctcatcactctagcaaactcggaaacgagttccgactgtttataagttatgatccaggtaccagattaggaggcttggaagaagacagctagttgtgacttgcttgtaagttgcttctctaaagtcttttgactgttcttgagtaaaccagtgattgttcttttacccttctgatcacaaaaagcaatgtgcttaaatccatctcacgcgttcacgtcatccccttttgctgttcatgtagttgctgttaatttcttatgacgatgcgccttaaccaatctcaggtgtctggcatttcaagcccttatcctctagcagcggaggaacatttgtggcagggaacactcatcggctcatgtgtgttggatatttttcatcaatgttctcttggtgacctcactttgttcaatcgttctctgtatcttgttgcaaccgcagatctcaagtctgatatacttttacattattatcaaaatctcaacatatttaccaaaatgatttattgcatcatgaatcaacatgacatacggaattagctcatcacaaaaaattattcaatccgttgcaactttataatttgcgaggaagagatgaaatattgatgtttgctctcagcgaataaaaagtttttggtccgacccggttctacaaactttaccagaatcaaagtgctaaaccgggcgaagaagttaagatctcgagaagagtcttttacggtgggagagaaacgagagttgttcgtcttcttccatggtcattgaaattcaaacacacgcaagcatcagagaagaggactgattcgcgacttcgattatg

SEQ ID NO: 10185 - DNA, 3000 bp, Unknown
  misc_feature (1)..( 3000): cDNA_ID_2715090_gDNA_ID_2213635_Annot_ID_181010 3000 nt of promoter + ATG
tcagggtctggatctggtgttctcagcaccagtgttagtttaacgaatgggtcatcatcagtttatccttcagccataactcaaaagaccggcgccggaggagaaacacttgttgaggttggacgctctaagacatacacaccaatggctgatgatatttgccatgttttgaagtttgaatgtgtagtagtcaatgcagagacaaaacagaatgtgggcctttcttgtaccatattgacttcccgtgttatcccagctccatcaccttctccgcgtaggctgatctctattagtggaactgatgttactgggcacctggattctaatgggcggcctttgtctatgggaacattcactgtgctgtcctacaatatattgtctgatacatatgctagcagcgacatatacagttactgccccacatgggctctcgcttggacataccgtagacagaatttgttacgggaaattgtcaagtaccgtgcagatatagtttgtctacaagaggtatgttaaatatttatggcacaagttgtactgacttggaaacgtttcaattgctagttaatggataaatacctctccaatattttcgtttttcatcttgcaggtacagaatgatcattttgaggagttttttcttcctgagctggataaacacggataccaaggtctttttaagaggaaaacaaatgaggtttgcttcaacgcatccccttgatcttccattaccttttcgtggtcacttatctgcaagatgtaccaaccagaaaatattgattcactggataattttaggttttcatcggtaatacaaacacaattgatgggtgcgctactttcttcagaagagacaggttctcacatgtaaaaaaatatgaggtatgtcttagttttctcctgttacctatctaattaggcccatttgctaaatcattgggctgctcatccaggttgagttcaacaaggctgcacagtctttgactgaggctattatccctgtttcccagaagaaaaatgctttgaatcggttggtcaaggtactctgagatgctctatagtatgatttctgttttccgcacattcttggtgatattttttcatgtaaaactgatttagagtctttctttttaggataatgttgctttaatagttgtactggaagcaaaattcggtagccaggctgctgacaatcctgggaagcgccagctactttgtgtggtaagttgtccatcttttcaatattgttctttattgtcagagatgatgctagagttgaagttatgtgtttccacttcctcttctcctttaaaggtctcgaggtgatcatgttttctctcttttcatgtatttgatgggtgcaggctaacacgcatgtaaacgttcctcatgaattgaaagatgtaaagctgtggcaggttggtctttatttctcattgtaaaagaactctcagatttcggattcttacatcactattgatccataatgattcttgcccaaataggttcacacattattgaagggactggagaaaatagctgccagtgcagatattccaatgcttgtgtgtggagatttcaacacagtacctgcgaggtctggctggttttcctatttgttatgcccaagtagcaattgtcaaactctatattaaattatgattgtggtttctacctgaattaacttggagttccttcttaatattttcagtgctcctcatacacttcttgctgtgggaaaggtcgatccattgcacccagatttgatggttgatcctcttggaattttacgtcctcacagcaagcttactcatcagctgccactggtaattatctttcccaaaaatggaaaacagatgcacagaatcgtgaaaggcagacttcaattttaattagaatggcaacatatgcgtagacatcatacctttgtgaccattgcaggttagtgcctactcacaatttgcaaaaatgggaggcaacgttattactgagcagcaacgtagaagactggatcctgcatcaagtgaaccgttgtttaccaactgtaccagggactttataggcacacttgattacatattttacacaggttaacttaagtgcttactttcaggggttttacgcgccagtgtttgctttcatctcagatttctttttcatctggtaagcaatttgctttttgttttgtttcagcggacacgctaacagtggaatcgttgttggaactgttggatgaagagtccttgaggaaggacacagctcttccatctccagaatggtcttctgatcacattgcacttttggctgaatttcgctgcatgcccagggccagacgaaacaatattttatagagatactgcagctgtaataacccgataccaaagactggttccaatggatatggttaagctacatgaagtagatagcatggccatgtccctggggtttctcccgctgggtttttcgcttgcgttctactctgtatcacagttttatttactgcttggttcgcttggcttttctttctatagttatttcctctttgccagaaagttttgtcttcactggcttgtgattgtaacaatgtaaacaattagattcttcaagaaaatagtgacttcaccttttccatattaaaatctgtgtcttctatggttgcaatcctccttacactcttaaccctacagcttaaccatcaattttctagtctcttcacttgtagatatcttgcagatactgtgaaaacgaactgtgaacaacttgatatattttatatgtacccctccaataactgaagatgatccaaattccaaaactcaaatttcaattcagaaattagacatgttaaccagtactcattatataatccttttaaatcaagtttcttgcagacttagaactctcgagtatccctataactagagagggaaacatatgtgaacaagaaacaagtcttataaaaagccacattaagttcttactctgctgcattaactgatg

SEQ ID NO: 10186 - DNA, 3000 bp, Unknown
  misc_feature (1)..( 3000): cDNA_ID_1394982_gDNA_ID_2213635_Annot_ID_181008 3000 nt of promoter + ATG
ccattcatggcgatagaacacaacaggttcgttgattgagttaagttgaaatttggataattgtgcacactaaagctaaaaccaaactatagaaacaacctcgatgatattactgaaatgaactctttaaagatcatcatcagtaagttgttctctgttgactcaatctgattgacttctttatgttgttatgaattcaaaggaaagagaagtggcactgaggtccttcaaaactgggaggacacctattttggttgcaacagacgtggcagcacgtggtcttgacattccccacgtggctcatgttgtaaacttcgatctaccaaatgacattgatgactatgtccaccgtatcggacgaacaggacgtgcaggcaaatctggaatagcaactgccttcttcaacgagaacaatgcacaactggctaggtcgcttgctgagctaatgcaagaagccaatcaagaggtccccgagtggctcacacgatatgcttcacgtgcttcatttggtggtggtaagaaacggtctggtggtcggtttggtggccgtgacttcagaagggaaggctcttacagtagaggaggaggcggcggcggcggaggaggcggcagtgattactatggcggaggaggctatggtggtggtggatacggtggtgctccaagcggtgggtatggtgctggagtgaccagtgcttgggattagccaattaggctccccaatttttcctctttttaacctgactatttatttcttctcttctacattcccaagagagcacgtgtatttgcccccacctttgagatctctcattcaagagatggatttaactaatcttgctattaggtggatctctctgttttttcaggctatttttaggatttgtcctaaaagatagacagtagtttttccgattttgatcttgttcttggtttcttctaacaatttcatttgttagtttgaaatccaatttgtctttttgtttccctttgttgttgacaatctttcttggtgaaatacaatctctctttatatcattttaaggactttgtgcttacattgtttaaactccgttccgttacttcaaaaagataaaatgcaggtacataaattgttgctctgtgtgaattaacatacaacaattagattcaacaactattgctattcagcttcagaatcttcttcaagctcacttccttccacaatctcttcttcttcagagccttcttcctcaaggtcatcctctggcctatcaagcaaaagttcctctttagagaccatgcctagccctctcgcccgataaagaaaccctgttctcatcacatgataaaacttatctcgaagacgagtgagaggatgcggatccactagttttcctcggcgatacccttctttgaggatcacagttgttgtcttacacttcaatgagaggtagaaaatgccggggtatcgcgtgaatagacgagtgaacttgtgcggaatgttgagctccgctctcatgcttctcaagtagttcctcttggttttcttgtggatagtcaagctcaagagctcgtgcaaaacagccacagctcgtttctccatgagatcgctttccggatcaatgttactcgggtcatcgtaaggagatatgtagggaagtttttgaaactcatccatccatgctttgaccttcttctgtgctccatatcctctagggaaactcataggaaaagtcaacgtagactgacctctcttgaactcgcggtatctagactcctccccggaaacatcattgtcctcgtttcgcttctgcagcgccgagaatgcgaactcatcacgccattttacaagctttaaacacgggttaccattagaagccttgacgaagcagaaatgatcagggtatttcatgactagcgtcttttcgtagttatcgggtaaaccgagatcgaatttgagagaatgtagtgatctaagagagacagtttttgatctcatcatcatcagaactctacagagtctctccactgtatcagcctcgtggctttgatgaataatctcttcttgtgagtcaagcattagtgctgtgtccgttagcttgaaacatggtaagcttgcgtaacgagcatgaggaaattcgtgaaacagagtcggatacctgcaaaaatgtcaagactttcattaccattcttacaaaattgatttctttctaaaccgtttgttccagtaacaattgaaattttctctgattgtgatacctgcgcaagaagcggagaacagggacggtgagaccaaggagtttttgccaatcggcgacggattttgcggtgaggaaaccagtgggagatcgctttatggcgtctttgaggatacaagctgctttgagatcggtctcagtatcaatgacgtgatccaggttcttgttcttcacccacttcagtctcacctttgtcattgcacccattcctcgccattgttgatgctggtgaaacagcttactcaccgaaaagagaaagctttgtgatttgacgaacatctaaagagatttgacgaaagcgcgaaatgtggatgatctgtaattgagagtgcaaaatgggtttagggtttagtgttctctcggagtttagttaggacttatcattgaaagaatgaatagagagaagtaggggagagtaatgcagagaaggtgctcgacgaaatgcctgaacgaatctaaaagcgagatttttcgacttctaactctaggcccacaggctacagtcaaagtaagccttttaagttggttcgcgatatgtttttgcagacagaacctaaaaacttggaacttctttttatctgcggtacacagccaaatttgcaaaaataagttccaacgcgtctagactcgattcgtgcgactcgggaagactaggctcgtttaaaggttcacgcttttgatatttcgagctcctagagacctagactctagtcctgaggctgattggtagaggaaattggaaaagcttggattgaaaact

SEQ ID NO: 10187 - DNA, 3000 bp, Unknown
  misc_feature (1)..( 3000): cDNA_ID_1396519_gDNA_ID_2213635_Annot_ID_181006 3000 nt of promoter + ATG
agattaacatttaatcaggttttgtaaacgcctgatggtagatggacaccaaaaattagaacccactttcaaatataacccctaagaaaaggctctaaatagttctgattattcagttagaaaccactcacactttgtagtccccagccataaataataattgctagaaaggattgatgcagactaaataacaaaacatgcatctttatgtccattgtgcaagagttatagatgttacctttcccccaatacggaaaagctctgcaagatcatggaactgtccatgaatatcaccgcagattgtcacagggcttttaacaggctgcatacagtaagaatataaaaattaaggctctttaaaccaaatgattgtttagttacacaatctaccacatgggttttataattggcacgagatgcaagatcaagaactgacctgaacgttgctttcatccattaagatctccttagctttctcacataatgctctgacctaaagcaaataaaaaaacactgcacataataaattcatctttcccctcttttacttcctagagaaatacaggactaacagtattatccagtttaacattaaaatgtcaaattagatacaccaatttgacacaagcaacaagcacaaagatcatctacagccaagaagacttttttacagctactgatcagtttttccctcgatattagcttagaagaacttttatcgaattgcaacctctctctcaacttcagctaaatctattatcatttaagatacattcccccaattggaaaatccagtaatgcatctaactgatgagattttaactagccaatcacctaatcaaaaggatacaattttggctgtgggtgagacaaatccacaatacaaagcatattgaaatgcgagctaatcgcctattcagaatccaatacagccagaaatcattaagaaacaaaaaaaaatgaaatccatttctatcaacccgtaaaactgacgtgaaatgagctctacacctatactagaagatccttctcgaagaatcagatcatcatatactcacagaaataatccacccttgatttgaaacaaaatctgagatctaatcaccgaaatggcccaaagttcactcgaaaaactaaattacagatccaattttaaacgaagaaaacgaaaaggtgcgaggaaagctatattctaacacaatcacaggcacctgttgctcggagagaggcttgcactgcatgagctgcgagatctgctcatctagatcgagggttgcatccgttggaagcgaattcgcgcccatgtttttggtagtgcgtcgtcgtcttctttccttcaagtcggatccggaaaacagatcagaaacgaggcaaaggtttccagattaggggcagccctaaccctaaattggatggattctgcgtattcttcgcttttttctttctctctctctctcgccttcgtgtgcagagtgagagaggaaatcaaaacaaaggggcgcgtgaggtaaaggggcgagtgggtttgtagctttcgagctgtgtcttgatttgaccattatatcctcctcgttgagatctaaatgataaattgactaaaacaccctttagttttcttataaaagtgtttaaataggtaatacacacaaaatttgtaaagtagttttatttcttttaattaaacacacaaaaactatataaacatacaatacaactattgttttgaagaatttttcatttttaacaaacattttagttttttctcaaaaaactataatctaagtaaaatgtgtttacataagggtctagctatgggaaaatacattatcaactatttattcatagctaatgaaatgtaattttgatttagccaaaacatcattttaattaaaatttgaatggttacaacataaaattttgaccaaaatttatgtgacatatatatttttattctctctaatgatgcatactaaaatttatgaacgatgaatgtaaaatacaaattgatttgctccttcatgaaaaataaatttaaccaaaaaaaaaagaagaaatctctaattattgacaattcatgagagtccgaacataaaaataatattcaaaatataggttcatgaaagatttagattactctatttttggaaataaatatggtttgaacttttttttacatataagttgaatcgtttttaagttagatacaattaaattcagaataaacaattttaaagttctaaagatttaagtgtaaatttgtttccccaataattattgtatatatgtttttctcaaactcttatgagtgtatataattagattttaaatcaattcttaaaatataaaacaagctaatctcattatcataccatatttttggcttaaggtcattttgaagattaataacatgtctattttatcgcgttgtgtccgatccagaaggtaaacatcgaatttagggtttttctctcccccgagcttgcttttccgttgggtgaacgactaccgttgattttcttcgtttttttggataccgattcgattctctctcaccgatttttgaggttctttctctatatcctctcgttttttgtttccgcctacgtttatctctcgatttcgagctgtatcaactagctagggttccttaattggtttatttcgtttgaggtgatactcctttcttcttctgtttgcgtgatacgattctaatttgcttgcttcgcttggcgttccctggctgggttctctttgtttctcttcgtcttggtagatttgatttcggattttgggggtttcctgcttatggagttcgatttttacattacacagctgctattgtgatttctatgattgcgtttgtgctaactattgacctatttggtatttgccaggttctctatttttcgtggataagaagataaagttattgtttattgataagttttctgctgggaagttgcaactttttctagatttaggacgttacaaatttcaatc

SEQ ID NO: 10188 - DNA, 3000 bp, Unknown
  misc_feature (1)..( 3000): cDNA_ID_3057870_gDNA_ID_2213635_Annot_ID_181005 3000 nt of promoter + ATG
tgaaaactgtttgactaactaacacctgtaacaaggattaaaaattccaatgcttctgcatgttatgtaaagatgatacaagcgatacgacaatgttaactagcatatgaaaaaatttgtaatacaagatttgattttcgccaacattatgcattgctgacttcaaaatcagaacatatgttgacaaaggagactggcattgggaaggaaagagctagcagaactcaaatcagtaagcgaaagctgctactcacataaaacaaaaaacagtgctagaatcatgtagcaaaatccaaactccaatgacaagctaaaaaccaataaacaaaaaagtgtatgataattacctgctggtgaatgggtgttcctccataagcaacaacaaccttcacaccagtttggtaggagaattttttggcttcatcatgtatctgcaagaaaatcacagaatgagaaatgtgtatattatatacacgtacattttttctttctgaagaaactctattcttgttggtgtgtatattacctggcatgccaattcccttgttggtgagaggatgactgcaaaagggtaaaccgcccgtgaaccacggggtctttctacatgctgatctttcatgattccactaattattggaaagcaaaaagcagcagtcttcccagacccagtctgggcacaggccatcaaatctctctctgcaagcagtattggaatagcatgacgctgtaccggtgttggcctcacatacttgcacctccggatgttcagatttaatgcatccccaagatctatgtcagcaaatgtgttaacaggagggggcacgtctcccccactggtctcaactggaatatcttcataggcatcaaaattaatgccagtattctcctgctctgtaaagaccggttctaactcagcatcatctccaaatgggtttacttcacgttccctacggtcccaccctccacttctgttgttccagccaccaccaccaccacctcctcctccagcaccataaccatagccagtgcgccctccatcattcctatagccaccgccgctggcaccaccacccccactgctaggaggagcccaacgagacccagctggttgaccaccataccctgcatgatcattttgtggcaaaggagcagcaacaggctctgatggcctgttccgtaggtgtgggggaacataaggaggctttgactgagaaacggccttctctgaatcagccacatctgcccatgatgcactcatgattgaaatttgtaacgtcctaaatctagaaaaagttgcaacttcccagcagaaaacttatcaataaacaataactttatcttcttatccacgaaaaatagagaacctggcaaataccaaataggtcaatagttagcacaaacgcaatcatagaaatcacaatagcagctgtgtaatgtaaaaatcgaactccataagcaggaaacccccaaaatccgaaatcaaatctaccaagacgaagagaaacaaagagaacccagccagggaacgccaagcgaagcaagcaaattagaatcgtatcacgcaaacagaagaagaaaggagtatcacctcaaacgaaataaaccaattaaggaaccctagctagttgatacagctcgaaatcgagagataaacgtaggcggaaacaaaaaacgagaggatatagagaaagaacctcaaaaatcggtgagagagaatcgaatcggtatccaaaaaaacgaagaaaatcaacggtagtcgttcacccaacggaaaagcaagctcgggggagagaaaaaccctaaattcgatgtttaccttctggatcggacacaacgcgataaaatagacatgttattaatcttcaaaatgaccttaagccaaaaatatggtatgataatgagattagcttgttttatattttaagaattgatttaaaatctaattatatacactcataagagtttgagaaaaacatatatacaataattattggggaaacaaatttacacttaaatctttagaactttaaaattgtttattctgaatttaattgtatctaacttaaaaacgattcaacttatatgtaaaaaaaagttcaaaccatatttatttccaaaaatagagtaatctaaatctttcatgaacctatattttgaatattatttttatgttcggactctcatgaattgtcaataattagagatttcttcttttttttttggttaaatttatttttcatgaaggagcaaatcaatttgtattttacattcatcgttcataaattttagtatgcatcattagagagaataaaaatatatatgtcacataaattttggtcaaaattttatgttgtaaccattcaaattttaattaaaatgatgttttggctaaatcaaaattacatttcattagctatgaataaatagttgataatgtattttcccatagctagacccttatgtaaacacattttacttagattatagttttttgagaaaaaactaaaatgtttgttaaaaatgaaaaattcttcaaaacaatagttgtattgtatgtttatatagtttttgtgtgtttaattaaaagaaataaaactactttacaaattttgtgtgtattacctatttaaacacttttataagaaaactaaagggtgttttagtcaatttatcatttagatctcaacgaggaggatataatggtcaaatcaagacacagctcgaaagctacaaacccactcgcccctttacctcacgcgcccctttgttttgatttcctctctcactctgcacacgaaggcgagagagagagagaaagaaaaaagcgaagaatacgcagaatccatccaatttagggttagggctgcccctaatctggaaacctttgcctcgtttctgatctgttttccggatccgacttgaaggaaagaagacgacgacgcactaccaaaaacatgggcgcgaattcgcttccaacggatgcaaccctcgatctagatg

SEQ ID NO: 10189 - DNA, 3000 bp, Unknown
  misc_feature (1)..( 3000): cDNA_ID_2715106_gDNA_ID_2213635_Annot_ID_181004 3000 nt of promoter + ATG
taatgatttgaccatttttatccctaaggttggtaaaggcttatcaaaggacgagaaagctaggaagttggctttgcagcactggcttgaggcagtaagaatattcttttacaatttgtctttctctgtggctataagttttgtgtaaagccatgtgatcttaattttctagcttaacagattgatcctcgacatcgatatggccacaatctgcaattctattatcatgcttggctccactgtgacagtaaacaaccctttttctactggtaagattgctattacacaatcaaaagtatgatagtatcaagcgtacaaatttacgagctaacgtccaactttggacatgtaggcttgacataggacaaggaaaagaattgaaccacgaaagatgtccaagatcaaaactttaccaacaaagcatcaagtatcttggtccggtgagttttaccctctagtttctgtgcttggttgaccaattctgtagaaccttagatctattttcagaaaaacttggtagaccaatattattgacatgcttgttagatacctttttgtaatccttcattctttcttacaaacagacagaaagggaggcatatgaagttataatcgaggatgggaaactaatgtataagcaaagtgggatagttctcgacacaaaagaaggtcctcctgacgcaaagtggatctttgtcctaagcgtatctaagatattgtatgttggaatgaagaaaaagggtaactttcaacactcgagttttctagccgggggagctacattatctgctggaagaattgtggttgacgatggtgttcttaaggttaaagaaagaaatttactcgcttatacttatgcaaaagaagagatgttataagacactgcaaaaacgttttgtgttgagtttgagttcgttggatgatattttcaggcagtttggcctcacagtggacattatcttccaacagaagagaattttcaggcgttcatgtcgtttcttagggagaacaatgtagacctcgccaatgtaaaggtaagtccattctggtctgagttttaagtcaccaacatctcataggtttggctctggtttgtttttaggctatgattacatactttattttttatattctgtagaagaatccagatgaagaagatggagaagctcctgctaaggtcaagaggatgccttcaagaatcaaagagaccgaagaagaacattgtgactttgtggatgctgagaccggttttagtcccaacactaagcccaacaatcatgcagagctacaaacattatcaaggttccattcaaaactttcaagactggatgagattccagacgaagacgacaacatgatcgaggaggaacaggatgatgaagaagaacctgaaaccccttcagaacaagggtatgagacagcagaggagacattcatagctgaggaagagttcacatatccaaaatcaaacctgttcgatgaagacattgaagattacgagaagcctgtcctgaaggagaagataatgagacggatagattcacacaaaggaattaaatcttaccagttagctgagcggctacattcgagatggagtacaggtgcagggcctagaatcagttgtatgagagattacccttcagagctacaatttagggttcttgagcaagctcatttatctccaagagcttcttcaaattcttctaagatatctccttttgccccggttagaacacgaggaacaagtcttgggagaagtcctttggccgaagaacttgaaaatctttaggtcgatttatatacatgtgacgcgaatgcccatgtcatgaagtaatcggcttgattcttttttgttacgcaagataaaaaaactagggcttcatggaagaatggttttcttatgtgtgttccttattcttcaagtcacatattcattgttcttttgttggtgtagtaatttctgcaactctgcatatttggaaaaacagaaaatcaagttttttttggttcatatttttgtcatataattattttataatccactgaatcatataatcttcactaatttaattgtcgtctaaaaaatattcatccgaatgtaaatccaatctgaagctaataactactgtaattaggtttaaattagttcaaaatttaaacctaaagaaggagatatcgtaagacttggttgttctctgtttctgactgctctaagaacaaggaaaccttttttttgttctgttttgcttttccggattccttattgacgcttgtagttgactctcattctttctgaggtctgcttcttcttgaccctttgtattttttatttcttctccttaaatacacaagttaatctcgttcttttagggtcaatgttacatggttcttggatactaatagctggtttcgtttagttctcgtttacactaaacgttagttactttttttttttcctgttagcacacacgaattgtttgtttaatatgtgtcttctacgtttcattttaatttcttaaaagtgaaacttttggtagcacaaaatcaataaattggcagcaatcacaaaatcacaatcagaaagaaaaagatagtaattagactaaaattgtgcgttgagtcaaattaagtcacgcaaatcacacgtagacttcactttcaaaaagcgctgaatcaaaactggtggctatgaatttttcccatctctcaaaatctttataacttggtctcaaaatttaacaaatactaatttattaataaatcaatctctgtctctctctctctctttctctctgccagcgaacatccattggagctcctcactatacggcccaagagatagagggagagagaagacatcataattcccaaacaaaagactttgggtataaaattgggtttattgactttgtgaaacctacccagaaaatctaccaactgtctcgaagtctctctcctctttcttgaaacgggaaagagggagggaagaacaataagaag

SEQ ID NO: 10190 - DNA, 3000 bp, Unknown
  misc_feature (1)..( 3000): cDNA_ID_2715110_gDNA_ID_2213635_Annot_ID_181003 3000 nt of promoter + ATG
ggcctcataatcgaagtcgcgaatcagtcctcttctctgatgcttgcgtgtgtttgaatttcaatgaccatggaagaagacgaacaactctcgtttctctcccaccgtaaaagactcttctcgagatcttaacttcttcgcccggtttagcactttgattctggtaaagtttgtagaaccgggtcggaccaaaaactttttattcgctgagagcaaacatcaatatttcatctcttcctcgcaaattataaagttgcaacggattgaataattttttgtgatgagctaattccgtatgtcatgttgattcatgatgcaataaatcattttggtaaatatgttgagattttgataataatgtaaaagtatatcagacttgagatctgcggttgcaacaagatacagagaacgattgaacaaagtgaggtcaccaagagaacattgatgaaaaatatccaacacacatgagccgatgagtgttccctgccacaaatgttcctccgctgctagaggataagggcttgaaatgccagacacctgagattggttaaggcgcatcgtcataagaaattaacagcaactacatgaacagcaaaaggggatgacgtgaacgcgtgagatggatttaagcacattgctttttgtgatcagaagggtaaaagaacaatcactggtttactcaagaacagtcaaaagactttagagaagcaacttacaagcaagtcacaactagctgtcttcttccaagcctcctaatctggtacctggatcataacttataaacagtcggaactcgtttccgagtttgctagagtgatgaggcttaaacacacaagggcgaacacccaatagctcagctgcatgttctctttgcacctctcctgcaagacgtgagatatctcctagttaataaatcataagatcatataaatttgacttgagaaaacaaaagtacccattgtacctgtgagaagaagcaacaatgaatctactgggcttgcgaggaacaaaattgtttgactaactctttccaggcattccctactctgccaagcataaacgaatcaagatcattaacacgctaactagaaggtactcaaagacatttatgctttgaagatagcaagcaatatagcacacaaaaacatcacagattaatgatatcctcacaagtcacaaatactcctacccgggaaatatttcaaatgataatcaaaacgcagcagagagccacaaagtatccatctttaagaagtgacactaagccatgaccataaccaactgatactccattgtaaagcttacactttttttctttcatcttgtctgcttttggactttctataatcttttaaaagaagattaatttataagcaatgcctatctagcagaagcttcttgaatgtcagaagttcagagcagattacacatcagtctctaaacctatctatcaaggggcagctaaaagatttccaaaattcccatgaaagaacagcatcggaaaagttaagaacttgaagaaactttaccaagtagggaggatctgcaacgattatatggaagcaatgtttcagctgaagcggcagatcttctggttcgttgtaatcatagaaagtgaactcttttccatatctctcgaatctcatatcgtactccagcaattgcacctgaagactaggatctcttttctgactcagcacaaatcaaaacccgtcgcacagaaatttagcatcaacgacaacaaaagtatcgatttttagcaaaacggattcgatacaaattaagggtactgaacaaaactgattaatagtaccttgagataaacgtagagagtagggcaagcaatgcaagcgactctgcagcctggaattctttgagagagagtgaccacttcatctgctacagtctctgcagtttcaggttcgtaccagaactggctgagtctccaatcctccgtaaccagctccactttatcggattcttctcctccggcgacggaagacgccggtggcgtgctcgcaacagtcttgttctggtctgctagaaattcccgaagcgccgccaaagcttgagaactcaacactagtggatcgtcatcttctacatctccgtctcgtggagctgaaacttgaccgtttaacttctggagctcatcttctttttccatttaagcttcggcgtcagaattccgggataaagtcagatccttcggaaaagagaggacttaacggacacagcgaattagagagggctagggctttggttctgcttgcgtttatacagaattttcataaaaagtccccaacttttgaatgttttctattgaagacatgaattgtttttagtgtctttgattggtaaactatttacagtatatattgttatgaattagaaaacagtagaaatcccataattagcttctgtgattttttttaatggtactttagggaaattattaaaaattgaagattttcttatgatttttgtttgggtcaaattgataatgttttattttctgggttaacataggaagtttgaatttttatagggacctagttttaaaagcgaaacattgacgccaaaattaggataaactgaggaggagccaacaaaaataacagagcgatcgtggaacagaggactctatttttctcccagccaatggaacagatttgcatcattgagagattgagatttcatgagaatctcttaaatcagaaatggccgccattatcgttctctctcacgttcccatctaatcctagacccattcaaagcctcctcatttcctttttggctctgttgttttcttccattaaaagaatctcttctctgtttcatttcgtctcatgggttttgtttgacttccaggttctgcttcttcttcttcaccctttctatgtttttggtgattcgatgtaatgtctcaatgatggaatttggatatttgacattttcaggacataataaggaactgcttgaatctggtttcaagtgaaa

SEQ ID NO: 10191 - DNA, 3000 bp, Unknown
  misc_feature (1)..( 3000): cDNA_ID_3035496_gDNA_ID_2213635_Annot_ID_181002 3000 nt of promoter + ATG
gctatgaatgtctcctctgctgtctcatacccttgttctgaaggggtttcaggttcttcttcatcatcctgttcctcctcgatcatgttgtcgtcttcgtctggaatctcatccagtcttgaaagttttgaatggaaccttgataatgtttgtagctctgcatgattgttgggcttagtgttgggactaaaaccggtctcagcatccacaaagtcacaatgttcttcttcggtctctttgattcttgaaggcatcctcttgaccttagcaggagcttctccatcttcttcatctggattcttctacagaatataaaaaataaagtatgtaatcatagcctaaaaacaaaccagagccaaacctatgagatgttggtgacttaaaactcagaccagaatggacttacctttacattggcgaggtctacattgttctccctaagaaacgacatgaacgcctgaaaattctcttctgttggaagataatgtccactgtgaggccaaactgcctgaaaatatcatccaacgaactcaaactcaacacaaaacgtttttgcagtgtcttataacatctcttcttttgcataagtataagcgagtaaatttctttctttaaccttaagaacaccatcgtcaaccacaattcttccagcagataatgtagctcccccggctagaaaactcgagtgttgaaagttaccctttttcttcattccaacatacaatatcttagatacgcttaggacaaagatccactttgcgtcaggaggaccttcttttgtgtcgagaactatcccactttgcttatacattagtttcccatcctcgattataacttcatatgcctccctttctgtctgtttgtaagaaagaatgaaggattacaaaaaggtatctaacaagcatgtcaataatattggtctaccaagtttttctgaaaatagatctaaggttctacagaattggtcaaccaagcacagaaactagagggtaaaactcaccggaccaagatacttgatgctttgttggtaaagttttgatcttggacatctttcgtggttcaattcttttccttgtcctatgtcaagcctacatgtccaaagttggacgttagctcgtaaatttgtacgcttgatactatcatacttttgattgtgtaatagcaatcttaccagtagaaaaagggttgtttactgtcacagtggagccaagcatgataatagaattgcagattgtggccatatcgatgtcgaggatcaatctgttaagctagaaaattaagatcacatggctttacacaaaacttatagccacagagaaagacaaattgtaaaagaatattcttactgcctcaagccagtgctgcaaagccaacttcctagctttctcgtcctttgataagcctttaccaaccttagggataaaaatggtcaaatcattatataaagactggagcaatgggaacgaaaacgggtgcatcaaaccaacatagttgataggcttgatgttaccttagcagctcttgttcttgctctagaccagcgtgaaactgcagtctcttgcttctcaatttcaaaaaacgatatagaacttcttttaagttcagcaaagtcaagtaccttccacctgcaaattccatttagttactactaaacagataattttatcctctctatatataccaatgccaataatcataacaccacgaaccatctttgctcaacgactacagcacaatcagctagccttcttctggttcgaaaacttctataaactttctgtaactttaatgcagcttgatatgttccatcacctaataacaaggctaaaaattcttttgcatgttcgttttcgcaaacaggtttccatatccgcattttatatctatcatcttctttcataaaagttaaaggtttaatagagaaattgttctccacatctcctggagaaattcttgatcgttgtgtccctttaccgctaagggatctgttgtatagcgtctttctagcttcaggtgattcagttatggttgaatccgagtcaatgtcattaaaactgattgatcgaagaatggtctttgtctctgcacaatcaatacaaatatgcctcagatcaaaatgccttcaaataaacgttcatagaagttgtcacaaatactaacccattttcacttgaaaccagattcaagcagttccttattatgtcctgaaaatgtcaaatatccaaattccatcattgagacattacatcgaatcaccaaaaacatagaaagggtgaagaagaagaagcagaacctggaagtcaaacaaaacccatgagacgaaatgaaacagagaagagattcttttaatggaagaaaacaacagagccaaaaaggaaatgaggaggctttgaatgggtctaggattagatgggaacgtgagagagaacgataatggcggccatttctgatttaagagattctcatgaaatctcaatctctcaatgatgcaaatctgttccattggctgggagaaaaatagagtcctctgttccacgatcgctctgttatttttgttggctcctcctcagtttatcctaattttggcgtcaatgtttcgcttttaaaactaggtccctataaaaattcaaacttcctatgttaacccagaaaataaaacattatcaatttgacccaaacaaaaatcataagaaaatcttcaatttttaataatttccctaaagtaccattaaaaaaaatcacagaagctaattatgggatttctactgttttctaattcataacaatatatactgtaaatagtttaccaatcaaagacactaaaaacaattcatgtcttcaatagaaaacattcaaaagttggggactttttatgaaaattctgtataaacgcaagcagaaccaaagccctagccctctctaattcgctgtgtccgttaagtcctctcttttccgaaggatctgactttatcccggaattctgacgccgaagcttaaatg

SEQ ID NO: 10192 - DNA, 3000 bp, Unknown; identical to SEQ ID NO: 10184
  misc_feature (1)..( 3000): cDNA_ID_3035499_gDNA_ID_2213635_Annot_ID_181001 3000 nt of promoter + ATG

SEQ ID NO: 10193 - DNA, 3000 bp, Unknown; identical to SEQ ID NO: 10183
  misc_feature (1)..( 3000): cDNA_ID_3035507_gDNA_ID_2213635_Annot_ID_180998 3000 nt of promoter + ATG

SEQ ID NO: 10194 - DNA, 3000 bp, Unknown; identical to SEQ ID NO: 10191
  misc_feature (1)..( 3000): cDNA_ID_2715114_gDNA_ID_2213635_Annot_ID_132133 3000 nt of promoter + ATG

SEQ ID NO: 10195 - DNA, 3000 bp, Unknown; identical to SEQ ID NO: 10190
  misc_feature (1)..( 3000): cDNA_ID_2715110_gDNA_ID_2213635_Annot_ID_132134 3000 nt of promoter + ATG

SEQ ID NO: 10196 - DNA, 3000 bp, Unknown; identical to SEQ ID NO: 10189
  misc_feature (1)..( 3000): cDNA_ID_2715106_gDNA_ID_2213635_Annot_ID_132135 3000 nt of promoter + ATG

SEQ ID NO: 10197 - DNA, 3000 bp, Unknown
  misc_feature (1)..( 3000): cDNA_ID_2715102_gDNA_ID_2213635_Annot_ID_132136 3000 nt of promoter + ATG
gagctgaataaacaataaaatatgtggtcaacaaatcgatgcttgaaaactgtttgactaactaacacctgtaacaaggattaaaaattccaatgcttctgcatgttatgtaaagatgatacaagcgatacgacaatgttaactagcatatgaaaaaatttgtaatacaagatttgattttcgccaacattatgcattgctgacttcaaaatcagaacatatgttgacaaaggagactggcattgggaaggaaagagctagcagaactcaaatcagtaagcgaaagctgctactcacataaaacaaaaaacagtgctagaatcatgtagcaaaatccaaactccaatgacaagctaaaaaccaataaacaaaaaagtgtatgataattacctgctggtgaatgggtgttcctccataagcaacaacaaccttcacaccagtttggtaggagaattttttggcttcatcatgtatctgcaagaaaatcacagaatgagaaatgtgtatattatatacacgtacattttttctttctgaagaaactctattcttgttggtgtgtatattacctggcatgccaattcccttgttggtgagaggatgactgcaaaagggtaaaccgcccgtgaaccacggggtctttctacatgctgatctttcatgattccactaattattggaaagcaaaaagcagcagtcttcccagacccagtctgggcacaggccatcaaatctctctctgcaagcagtattggaatagcatgacgctgtaccggtgttggcctcacatacttgcacctccggatgttcagatttaatgcatccccaagatctatgtcagcaaatgtgttaacaggagggggcacgtctcccccactggtctcaactggaatatcttcataggcatcaaaattaatgccagtattctcctgctctgtaaagaccggttctaactcagcatcatctccaaatgggtttacttcacgttccctacggtcccaccctccacttctgttgttccagccaccaccaccaccacctcctcctccagcaccataaccatagccagtgcgccctccatcattcctatagccaccgccgctggcaccaccacccccactgctaggaggagcccaacgagacccagctggttgaccaccataccctgcatgatcattttgtggcaaaggagcagcaacaggctctgatggcctgttccgtaggtgtgggggaacataaggaggctttgactgagaaacggccttctctgaatcagccacatctgcccatgatgcactcatgattgaaatttgtaacgtcctaaatctagaaaaagttgcaacttcccagcagaaaacttatcaataaacaataactttatcttcttatccacgaaaaatagagaacctggcaaataccaaataggtcaatagttagcacaaacgcaatcatagaaatcacaatagcagctgtgtaatgtaaaaatcgaactccataagcaggaaacccccaaaatccgaaatcaaatctaccaagacgaagagaaacaaagagaacccagccagggaacgccaagcgaagcaagcaaattagaatcgtatcacgcaaacagaagaagaaaggagtatcacctcaaacgaaataaaccaattaaggaaccctagctagttgatacagctcgaaatcgagagataaacgtaggcggaaacaaaaaacgagaggatatagagaaagaacctcaaaaatcggtgagagagaatcgaatcggtatccaaaaaaacgaagaaaatcaacggtagtcgttcacccaacggaaaagcaagctcgggggagagaaaaaccctaaattcgatgtttaccttctggatcggacacaacgcgataaaatagacatgttattaatcttcaaaatgaccttaagccaaaaatatggtatgataatgagattagcttgttttatattttaagaattgatttaaaatctaattatatacactcataagagtttgagaaaaacatatatacaataattattggggaaacaaatttacacttaaatctttagaactttaaaattgtttattctgaatttaattgtatctaacttaaaaacgattcaacttatatgtaaaaaaaagttcaaaccatatttatttccaaaaatagagtaatctaaatctttcatgaacctatattttgaatattatttttatgttcggactctcatgaattgtcaataattagagatttcttcttttttttttggttaaatttatttttcatgaaggagcaaatcaatttgtattttacattcatcgttcataaattttagtatgcatcattagagagaataaaaatatatatgtcacataaattttggtcaaaattttatgttgtaaccattcaaattttaattaaaatgatgttttggctaaatcaaaattacatttcattagctatgaataaatagttgataatgtattttcccatagctagacccttatgtaaacacattttacttagattatagttttttgagaaaaaactaaaatgtttgttaaaaatgaaaaattcttcaaaacaatagttgtattgtatgtttatatagtttttgtgtgtttaattaaaagaaataaaactactttacaaattttgtgtgtattacctatttaaacacttttataagaaaactaaagggtgttttagtcaatttatcatttagatctcaacgaggaggatataatggtcaaatcaagacacagctcgaaagctacaaacccactcgcccctttacctcacgcgcccctttgttttgatttcctctctcactctgcacacgaaggcgagagagagagagaaagaaaaaagcgaagaatacgcagaatccatccaatttagggttagggctgcccctaatctggaaacctttgcctcgtttctgatctgttttccggatccgacttgaaggaaagaagacgacgacgcactaccaaaaacatg

SEQ ID NO: 10198 - DNA, 3000 bp, Unknown; identical to SEQ ID NO: 10187
  misc_feature (1)..( 3000): cDNA_ID_2686560_gDNA_ID_2213635_Annot_ID_132137 3000 nt of promoter + ATG

SEQ ID NO: 10199 - DNA, 3000 bp, Unknown; identical to SEQ ID NO: 10185
  misc_feature (1)..( 3000): cDNA_ID_2715090_gDNA_ID_2213635_Annot_ID_132141 3000 nt of promoter + ATG

SEQ ID NO: 10200 - DNA, 3000 bp, Unknown
  misc_feature (1)..( 3000): cDNA_ID_2715086_gDNA_ID_2213635_Annot_ID_132142 3000 nt of promoter + ATG
gtagttatctgtagaagaatcttcaaaaaacctcagctaatcgaataatctaagaaatagaaacgactcgtagtaacaaaacaaaatcacgatgaagtaacacaaagctgagaagaatcgttccctaaaacgaacaaatgcacaaatcattaaaccctagaagcaaaatgaaatcgaacaggacatcgctgcatagatttaacgacaccatgcacagagagatatgaagccagaccttaagaaactcgactagaagaaaaatcttagatcaacgatcaatggtgttcgaaaaagcttgaggatataaaccctaattttcccttgttctcgcgatcgcacacgaagcaaatgaaacaaaggtttctgggaaatgagcaaaagagaaaagatgaagagatatttgtatttcgatgaactttattaatttccaaaagcctttctcgtttttttattttattaattttcagattgtttgccgttttccaacaacgaaaagcgtgccggcgttgctataacgaagtgaactgtgtgtcgtcataaattaacatagcgcgtgataaacacgaagagcaaggattggatagagacgaatatttattgtggtctggacaaaagtaattactgacaaatttagatattaattgccagcaaaagtatttacataccaacttattttaaacaaatgtcataaatatgagtctgtactttcatttccattgaaaatcataattttctaaatatctatattattatattatctgtctctacctaatttgaatattacaatgaaaatttgtaaaaaataaaatatttttgacatcatacatatatttcaaaaaaatattgtcagctaactcaacaattggccacaaatgcaagtaaactaaaaaacatacaactacttaacatatatggattgtatgattatacaagtcgtcaacatcataaacatataatctcgggttaaatggtcgaccaactccagcgttgatcagcattgaccaacaaaatattcaaaactaattattagtattaaaaaaattaatgttatttgatattgtaaaatacaaaaaaatatatttatatccaatataaatatattttgtatatatatataatgcattaattcatataatatttactttattttttcaatttcaaaactaaactaagagaataaatatttttttaagatatgaactattcataataataataataatagttagtttcttaagaagttaaatttttaattgctaaatatttttaatcaatagttagttttttcttatattattcgtaaaaaacatttactttgaatttaaaaattaccgtgcaaaatttagactaaaaagttatatactcaattgtttttcatattactttcttatgaaacttatatagtcatgtgtatttggttctgtaatgatttattttctaatgaataaagaagtttatatattttaattgataatacaaaaaaaagattctttcactcatatgtttctaataagatttttctggttttaatttcagttttttttttgttttaaaaattttaatcatttttttcatttttagtttagttttgaaattaaaaaaagctaaatattttaagaatcaatgtattaaatatatatgcaaaatatttttatagtagatgtaaaaattgttttttgattatagaataactagtaaaactagatttttaatattaaaaataaagtaaaaatttatttttgaatatttttgttggttaacaccggttgacgttagagttaattggttatttaacatgaaattttatatttataatgttaactatataatattatatacttggttatgcaatctatatacatcatttaattaagtgttatttagtttagttgacatatatagtttgtactgtattatattttccgtaagtttcaatcttttttattataaataggtgaatatatgtgtatatagaaaaaagagtattaaagactttttgtttccctttggaaaataaaataaaataaaaatacgagtccatatttggtcttgaacgagacttgcgttcattcctagggggatgaacctctttgttcacctccttttgcattaactaataaaaatatgtcatgtcaaatcctatttaaattacataataaattgaagctataattataatccaaaccgatatataatttcgtttaattacaaaatctaaaccctaattcttctttgtaaatccaaaccgccatttaaactcatttagtcgtaaaaaaactaaaccctaatcgtattttctaaacccaaaccgacatttaaccttgtttaattgttaaatctaaacctgttaataaatctaaaccaatatttaacccgtttaatcataaaatctaaaccttaatcgtactttctaaaccaaaaccgatatttaatctcgtttaatcataaaatctaaaccctaatcgtattttctaaacccaaatcaatatttaaccttgtttaattgtaaaatctaaaccatgattttttcaaataaactcaaatcgatatataattttgtttttgaggcaaattagattttataattaaattaaacttttattattattattaggttttaaattttaatgggctaaaacagtgaatatagaacccaagtatttttctttggtctttgtccatctttggaaattaatttagtcgtagcgaacaaatctatcccactcattggatttcaatttcataaattttaggttgtaaaattcgggtttggagaaaattgggggtaaatctagggttctgggaaaattagggttctgggaaaattagggttcatccatgctgtcgagttttagggtcaagtaaatgacggatccattaggatccgttttatatcttatgctctctcgtctcaatatatatatttaaaaatctcagcctttgggcttcgttagtgttggtttgctttcagaatttaacttagttacggtaaaagcaatg

SEQ ID NO: 10201 - DNA, 1519 bp, Unknown
  misc_feature (1)..( 1519): cDNA_ID_2715056_gDNA_ID_2213635_Annot_ID_181022 3000 nt of promoter + ATG
ttcactatcggctctgcattgtgagattcaagtcttcatgcgtgtaaagcttcctagggattttatcgaattgttcagacatcgttctcatatactctactctctttggtttcgctacttcgaagcaactcaaaccacaacaacttcctctactcatttattctgtttttaaaaaaaaaaactgattgtgaaatatcaagagtccaaaaaaaatttgaacttttaagtaattcgaatcatagaatgcagcatattacaaatattcaaaactatacgaaagtggagcccttgtgagacggacacaaatatgaattgtggtaatgcccaacgaaataattttataataatcaaaatggaatattaatatatacagtgattgcactgtttacaataaagtctttgcctttatttttctacacctgaaaattgaatcgttatgacctcttttaaattatgtgttttttttgtcccctaaccaattcaaattctcttatgtttgaaactgcaaactgaactgaaacatgtataaacatcatcaagctatatatttccatctgcattggataccaaatataaacatcatcaagcttgtgacaaaaaaaaaaaaaaaacatcatcaagctatatatatttgtagatgagatcatgctatatgtataaaagccaaaatagttgttgaaacaaaagattttccttttatgtatagaaaaaagaaacacttttaatagctcaaaggagggagctttcagtttcctaaattcaaaactctctttgtctctgtctgtctttctctctctctctctctttgcaacggctctctctgtcgtcatttcaattcaaactcagcttctctcatttttttaaaaacgtctcttgctgcttcttcacttctcttagctcactacccaaatccctaatctcaaatctgctttgagccttcctgatcttacgcattcctccaaaaccccccaaatattttctttgttttgtttgtctgatttgataaatctcattttgtgtttttatcttcttccatggtcgttgttcttgttctacagtgcgattcgtgagctgagagagataaaagtggagagctttggtcgatctttagggctagatctcccaaagccaccattgtttcgatttgggtcaatccaatttgcaaaacatctctcagctgtgtctgtctgggttctcattttgctgaattcggtatagggtttctgcaaattacacttaatggatggatccataagtaaaaaatgagatctttggcagcctgagaaactgagaggtaatcaaatttcattcctgatctaatttcctttaatcttctgctatatcaatcacattctctatatccttcagctgaaattgggtgattcattataataaaatggaaaagttttgatcttttttatctggggtcttgttgtttgatgggatccagcgtcttataagtgcattccattgaaattaaactgattcaattgttttgatccataggtaaattaagatg

SEQ ID NO: 10202 - DNA, 3000 bp, Unknown
  misc_feature (1)..( 3000): cDNA_ID_2715060_gDNA_ID_2213635_Annot_ID_181020 3000 nt of promoter + ATG
taaatatcataatctttatttaactattttaatcatcaaaacggttatgtctataattaaactaaaatgttagatatcgagaaatagctttaaaatatgtaaggtttggtaatagttgtgtgtttggtctcaaaacaattagaagatgttaattcaagggttgattgtttaagtagatatcaaattgatttttgttttaatgagttggttatcagaattattcgaagaatattaactttggcccagcaaaaaaaaattataaccggggaaaaaggaaaaaaaaaaaaaaaaaggaatagattcgatgataatgttccacgtgcaattctttattttttcttttgaaactttcctccaaatcttattgaccttgacgtgatccacttttaattaaattttccctaaatttgattgctaactttgccataattgcacaacacatagtcatcatcagtacgtcattagatttttttaaattacaggttctgttcctcacattttaaccccttatttttttcgatatcgtaggatcatttttatttatttcatatgatgtcatttcttctttgttttaattttttaatattattccttaacaatgaaaaaataataatagtatgaaaagtattaagtatgataacaatttaaaaatccgaatttgataaaagttctctttattcaacttataaacagaatccttcatccactccattcattgtattaaagaccatctctttttaaaataggtaaaatatatatataataggatttaacccgtggtacactacaaggcaaatattttatttatatataataatataaattttacggttttagtttagtattaaagttatataattttatattaatgttgtaactaaaaaaaattggtgatgataaaataataaaataaatatttaacatgtgttatatcaatccaaacccgtcctgctattcatatcaatctaaatccgtcccgctatattttttgtctcatgattttttatttttttataagtttaaatattagttgttgaattagttgtgattgtgattttatgccgaaaaagttatggacttttaatttcatggaatattcaaaccaagataaggaatgtttttaggtgcacatataattggatttgctcattttatgggattgtaaatgtattttggtttgtttcattttaattgattgccgaaatttaatagaaataattcaaatagttcaaattttggttgttttaagatttagtgaatattgtaggtgagataaggagaagataatttatcgtgttttgcgtgacatatgggattgtcatatatttcgaatatttttggtttgttatacaattaattgccttaaaaaaatataaactattaattaaaaaaaatcaaataattaaaatccagtggcagccattgtaaataagtctcaactccaaataagtctcaactccaggattttttccacaaaatgattacaaaaatgtatatgtagatatatatatatatatatatatatatatatatattgtcaaaaaataaaatatagcatatgtaactaatttttgttcttcttataaatctccgtattattaagttattaacaaaaaaaagcaaaaacaaaagcataagattaccaccaccaatcaaaaaagaaaaagagaagcgacggtggggattcacgagggatgatgtgtgatgccagctgtcgatccaagagaggtgcatctactttatgacacgtgactcatcaactcgcacgtgacatagccatcgtcacttggtcagtcgtctctcttcttcttcatcttcctctcctttccctcgtcttcatcactttcctcaaatcccatcactctctttctttcgtttggtccctcaaaaactatataaaatcccaatttcccagctctattaaaaaaaccatatacgtacacacatacaaatactctctgattattttttgtatgtgtgtacgaaaacgcatagctctttgttgtctttgatcgagatttttgctgaatctatcttcgcagtgagatcgattttgttatttgatttcgtttactcgtcaatcggaagttcgatcggaaattgaatgcgtggatctgattacggtgattttacaaaaaccctttttgaacttttctcctcttttttttgttctctcgaattgtgattcatgtttgtggcactttgagctatgtattggatcgagcttaggtgtgtttctagatggtgtttgctttcgtatcggttttaagttatggtgggttctgtgttaggattgctttcgtgttgaaactgagtttctgggtagatcgcacttatgaactgttctattcgggagtaagtttatgtagaattgtggtatttagtacacgaggatactcatgggatctatgttggtttgctatattcagttaagatccttaagagattctctcgttgacttgagagtgagattggattatgagagtggaattctattgttcttgttgaaatgctgatggtttttcttatcgttaactcttattttccgcttcttgttttgtatttttggctgataatggatcattttatgcatccagtgagatgtttggtgttaaagcttagattgatcctttagaaaatatttgatgcagccatcgttgaagaggagaacgtttgaaatttcctctatttggcactgcactagttaggttgtgatgtggaaaaacaagttcaactagtttgtttcttcaatgtgtatctatgaattcattaaaatctccgccttctttgtttccattttttttatgaccatcgtagtttttaattaccattttcgtctctgtgaacgcagatcaaatgacctccagcttaagggctactggtaaatgaagtttgattctcaatattttggtctctaggatttccttcttttttcgactgttccgtttatgggataagtaggggctgatataactatagacattaaggaaattggcaatg

SEQ ID NO: 10203 - DNA, 3000 bp, Unknown
  misc_feature (1)..( 3000): cDNA_ID_3035561_gDNA_ID_2213635_Annot_ID_181019 3000 nt of promoter + ATG
ctgggataaagtattgggatctcccatgttccagaataagccattattaccttatgaagaatggaacatagacttctctgagctgactgttgggacacgtgtcggaattggttaggatctttagctcaatgttttcgaatttatgtgttcttaaaaaaattgttggccataagtttccttaagagaaacgtctagttatcttacttcacgatccttaccctcgtatttatctatcttcaaaagtttactttttttttttgaattagtaacccatctaaatcttcttcgttgatttttccttccaggatttttcggagaagtattccgtgggatctggaacgggacagacgttgctatcaaagtgttccttgagcaagaccttacagctgagaacatggaggatttctgcaatgagatatcaattcttaggtatgtctataggctttctctgttttattcaaaattggcaataacgtctttacttgtcttctgactttctttcctgccttctccttctgcgtccaaataaccactagccgacttagacatcccaatggtactaaactactcatctatctctatgaattttcactgtgagattttagtatatgttttcatcaatgcatgcatcttcgacttcttgtagttatactgttccttggagcatgcacaaagcctccacgattatcactgatcactgagtacatggaaatgggatctttgtattacttgctccacttgagtggacaaaaaaagaggttaagctggcggaggaagctaaagatgctgcgggacatttgcaggtaatttcatcttccatacaaaaccgtgtatccttctttccaacatagtatgtagtattaatatggaaaattttggtttgaggagaaggcaataacacttccaaataggacctggaattgtgtctcgatgagaaagtttcgtaatcatctttaattaacaaacagcgtttaaacttgtaaaatgttgctaggggattgatgtgtatacaccggatggggatagtacaccgtgatataaagagtgcaaactgtcttttgagcaacaaatggacagtcaagatctgtgattttgggctgtcgagaataatgacagggacaacaatgagagacacagtctctgcaggaactccagagtggatggctcctgaacttatccgcaatgagcccttctcagaaaagtgtgatatcttcagtttaggtgtaataatgtgggagctatgcactttaaccagaccttgggaaggagtaccgcctgaacgggtaacttaactgaacaagaagaagactctttagtgacatatgtgtatatataacaagtttcctcatatttcttctcaggttgtttatgctattgcttacgagggagctcggcttgagattcctgaaggaccactgggaaagcttattgcaggtcttgtgacttgtcaaagtgttgttatttcgtttttcctgaagctttgtttggggtttatggagtatccttttctgatgtgttgtctcttgttcgcagattgttggacagaaccggaacaaagaccgagttgcaatgagatactctctcgtttgctggattgtgagtattcgctttgctaactttctctcaatcatattttccttctgtgaatataaaactttgcagcgagagaggtttttgttttcttcgtttcttttttttgaatattgttggctttctcctttgagtttgtacaaaagaactttggcgctttcacatccacaaaaagctttgtggaactcttttccgtttaatcatttgcaaattcgtaaatttcaaaacctctgaaacaaaaaagtaagtcttataaattttacaaaaggtgagaagagttgctcattctttcagtttaaatgatcaagcttgctactctttttcgtaccataaggtttgttccctgctttgcatttgctataagaaaattacggacaaatacatgtacttttcgtttatatttcgtgccttaagaaatgaaaaggagctttgattgacaaagaaaaaagagcaaactacagtttttgcagaacttctagttatttaaagaaaaaacgattttatgttcgtagccgtaatttgtcattacctatttgacaacaacatacattctagtaccgagtttaaattcggtgatataacaacgatactagtagttcgcgttacccatttagcttatcacctaaacacacaaaacttagaataacttattctaatatagcaatgtgtcattaacttacaaaaatagatcgtttgatcatattctacttggcagtactatcattacattttacggaaactaaaccaaacatctaacgagccatatccgattttttaattagctttgatttttctctacaatctacagtttcagaaatttcaccatgctataaatttgtcaattacatactatttaggatgtgataccaattcatttggaaccgttatcatattctaattaagttagacaacaaaaaaaaaggaaaatatcaaccaaaacttacatattatattaccaacgattcacccaaaaaaaaaatatattaccaacgattcataatgaaatttaattagaactaccacacataatattactaattaactttagacttatcaaattgcatattaaaatgaatatttaaagcttttgtaagaaaaaaaaatatagagaaatattatcttgttcggtagtcaacattaacaaaataaaataaaaattaaaacgttttagctgttaaaaaataaaaaccaaattaacgatgtatataaattagctagagctggctcgtttagtctggctcacggtttagtacatgcacacaaagcaaaaacgctggtttgtctttttaaaaaaaaagaacttcgtttctcttcaattccgttaccgtcactgtcaccgttcacctccgtttatctcatcctcaccgttcatcttcttcgatctaactcgccgtcgttcaccttataatg

SEQ ID NO: 10204 - DNA, 3000 bp, Unknown
  misc_feature (1)..( 3000): cDNA_ID_2991065_gDNA_ID_2213635_Annot_ID_181017 3000 nt of promoter + ATG
atctgtatatggagaaaatgaaacctttagagttttgtctatctaatcacaagttcagagaaataggcttgtattttggaattgtacagaagataagctctcagtagcaaacaatccaaactttgatcagtcacattacttataaaacgatctttgtgtatggtaaaaaagattataagtttaaatcaacccgcagcttggaaatctccaaagtcatcatctggtgcatcttcaacccctccatctttggcttttaggtcttctttcttctcttcttcttcttcttctcgctttgtatctaaatcttgttgttcagacgatctttggaggctgaggcttggcggcagacttgacggggacttctgagcagttgtgacaggggaaagcggtcccggaggtggaggtggcaggatgattgaaggaatggtggtttctattgacttgcctttatcctccaacgagagattgcccagactcttctctaccgtttttgacttgctgtctttatcgcttctctgtttcaatcattttgatgtgaaaaacaaaaagaaaccttgtgggaaatgtatccagacaataactgtaaatcttacatttttgagttggagaacaatggtttctccttcctttaagctgtaatcaacggatgaagtgttctgatagtgttgttccatttcttctgctgttttcttcttgttcaaatacctttagcaaagagagagaaagagagggtggtcagattcaaacatgatttagtttttcgaaagaacacttagaaatctggaagtggaatgttacttcatatggtcatgtagtgctgcttggaaatcatatgcttctgttctttcccggaatccgagtccgataaaagcatgtcgaacacgaccatctgcattgcatcaaagaactaaactcaaataacaactacaagttaacatctctatatctatatggaaagtacgtacctatcttttcttcaacacggagaacaaaatatcttcaagacaaaacagattattttttgttagactagctgcacatcatgagaagagcaagttaagttatgtggtcaactttttgttacctgctactgtcgattactgcttctacaggatgaagttccccctctcttagaaatgcctgagcgtaaagttcccctgtggttttatctactagttttataatgcattcttctcctttgctcaccactttcaaagctccttcccatgcccatttgttcacgtcccactcatctgctctgcaaggataaaatttatacaaaaaaagtatcagctgatgtctatctccatcttccaatggattacttgatgcactttttcaagtatcttttaccaaagaagccaagttgagttgatacaaagcgaatgtaactagataatgaccatcttgatgcaaattaaggttaagctaccattcatagtcatacatacttcacgattggttcaataagattcgttccgagtttctgatcatttgctaagccgaagggtttatcgggaaaaggggttttgtaaaaatctcctaactacatatatcagaatgactgtttctatcataaaggtaagaaagaacctgtacgaagctgcggttttccttggaggtatctgcatacacaaacaaaaagacaatgaagaggttactttgcctagcatccccgtaaagtaacagacacagaagaaagcataaacgataaaataacattgatacatcaagctccaatgttgtccattacgaatgagaattttatagttaaacctaaataacaacagttcacaatgtctatgatttcatcaaggtagccaatttggaatctcatacatcctataacacaatgaccatgtaacaatttcacgagtatctcaaaagctagtatgatttcagagagaccccatcaagatatcacttagcatgatattggttaaaattaatgtactcttttatcacaagccttgaatctatcatacgaaatctccttgaaaagatttttcgctgatagttacatgtgcaatcgatcaccattgcaaatccaaacaaaatttcgagtgatcaagactcaacgtcaagttttcaacatatgcaaattaagacaacttcctcaataccattgcaagaaatctataacaccagattgaatttacgttataactaattatcagatccaaaacatctcctaaaatcaccaagtgaacttgcaaagaaaggatgtaacttgagcataaaagacacaaaactcatcaaaaattataaaatcacatctcatgataagccaagaaaagttaccaaataaacatagcattcaggcacttggaacagagcaatctctatagcttctctctcctcgttatcatcgacattcacaggatcagtggaagacttcttgtcttcctccatagtcgaagaagacgaagcttgatccatctcagaaacaaagaatttaacttggagaaaaacccagatgagactaatcgatcaaacaaacccgtaaatcttaaatgttaagtctttcccgaactgtgattacaacaatctcacgagtcgcgaagacgaagaaacgtagaggtttcgcgttaggtgtgtgtagtgtataccattacttcaatctgagctacttcaaaaccatcagatctaagctacctctgttaaatctgaaccgtctattacgttgactttgaaaccctgatatagactagacacctatgtatcctccaccgctgggaagtcaacattgaagcagttgatggaccaacaccaaccaatagaaagaacgtccacatttactttaatgggccttttaaactaataggcctaggcccattataaatacatggatttgttttattttatttttctcatatctgtctcttggtggtgatgagtaggtaaactgtgtgcgcttattaacttctctcacactgactctgcgaccctaatttgtgagctctcttctctttgcgcagtcaatttgctacaacttagaaa

SEQ ID NO: 10205 - DNA, 3000 bp, Unknown
  misc_feature (1)..( 3000): cDNA_ID_1022623_gDNA_ID_2213635_Annot_ID_181016 3000 nt of promoter + ATG
aaccgactctacattgcataaaccgaaaaatccaaagcaaaggtgggcacaccagatataaacatagacatacctgagccatcataagtgctacataaactccagcggtgaagggatacaatggacccaagtcaccagcaggtctggacttcctgacgcgttcacccaccttccacattcttgtctggtcaatatttcccatagggaatgctggcaagccttccttttcctgttataagtaagagaatccatcaaaactcctgcacaaactgtgtttgggtaattgtaacaaaaggaagattcggaagagtcattacatagaagcgacgaccggctaagacaacacttcggatttcgctgccactttgtacatcctcgtaacattcatagagaatctccatacaaggatagaaggatgcgctgtatgcagtctcaaaatcttttttaccttcttcagacaaggagttgtacacagccaacattccctgatgttcacaattcattagaaacaggttttaaatttttatatttggctaaaaacgaattagtctgttctctacagatatcttcctactaacctgggtagagatagtccttgaaattgttcctgtgatgcattctactgtgttcttgtaagccaagtcttcactcatcccattttcggtgtatcttctaaacagagactccacgattccgtgaacagcaccaagcaaaattccttttaacaaaaaagaagaagatatgtaagtatgggattgagtgatataaagacaggtctaaaaggggatcaaactcacctctttctccaaagatgtcactcctgtactcctgttcaagagtagtagcaaaagtaaacggagaaccaagtgctactgaccatcccaatgcaacatcggcggctctaccgtcaacatcctgccaacagaatagcagaaatagtggtgaaaaaatgaacacatgaggtataagagcttttcagtaaagatagcttttgcagtagagataaagagatagaaaacctggtggactgcaaaactggcgttgattccagcaccgttaatttcttttccttggacgtaaagcctcctcacagaaggacccattcccttagggcatacagcgaccacactgatgttctttgggaaatcgagtcccgaggactgtaaatgccctagtagaaacccgtgtgataaaccaagaatgctgtttggcttcatgtgagagaatattttctcatagttatcagcctgcaaaaacaggatagaataaaatcgatgtatacaccttaggactaatacctcaacaagtagtagtggaaatatataacaaaagtgcacttacttgagcagcatcagagatcaaaagcaatacaagatcactgccagcgatagtttcccatatatcacccaaagtaccactttcttcagtgaagccagcagcacgtgcctcctcaaatgagcgagacccttttctgagaccaatctacgtaatagtatattaaaacgaaaacaaagtcagaacagagccttcacgtaacaacagaaagcaaacaaatacaagtatgaagccaactctgcagttgaaataccttgacaacaatgtcagactttgcctccacaagtgaatcccttaaattctgagcctgggcaggtccctgcatatatagataaagcgtttattacaagagaagagatgctgaataaaaagaatatgaaacaatatattaatcttgttcattccaccaactcaaatgcatcaaaagtatgaaaatgaaaacactttattcatatcctttttctgaccaatttcgtatcacaacacagaaccaagattccttattcgcaatccaacgtaagcaatttaaaaagcaatcaaacaagaagcacagtagctacagataaagagaccaaaaaaggtaagtacctgagatccccagccaatcacaccaatctgcttaatccccttgaaagcatctgggagatgcttgaacaagtctcttcctcctctcacaatgtactaaaacaaagatcagcagaaaccaaacattagcaacaactaacaaaatcaatacacatcaaaatgattatagaataagcacaaattagaacagaaatgaataagagggtaaatgagataaacctcttcgtaaccagcaagagaaactttctcctttttgaagacagatgtctcaaaatcgagagaaacaggggctttgaccgcagacgaagaaaccatgcgagcggcaagggaggatccagtggcgccatttccagcgacggtggcagtaagcgacctcagagacttggaagaagacgagaggaaaccgatattgggtagagccaaggttctggctttggaagaccaaagggttttggatgaagaagaaggagatgggcatgaaagagaaggagcgatggatgaagtagccgccgccattttctaagttgtagcaaattgactgcgcaaagagaagagagctcacaaattagggtcgcagagtcagtgtgagagaagttaataagcgcacacagtttacctactcatcaccaccaagagacagatatgagaaaaataaaataaaacaaatccatgtatttataatgggcctaggcctattagtttaaaaggcccattaaagtaaatgtggacgttctttctattggttggtgttggtccatcaactgcttcaatgttgacttcccagcggtggaggatacataggtgtctagtctatatcagggtttcaaagtcaacgtaatagacggttcagatttaacagaggtagcttagatctgatggttttgaagtagctcagattgaagtaatggtatacactacacacacctaacgcgaaacctctacgtttcttcgtcttcgcgactcgtgagattgttgtaatcacagttcgggaaagacttaacatttaagatttacgggtttgtttgatcgattagtctcatctgggtttttctccaagttaaattctttgtttctgagatg

SEQ ID NO: 10206 - DNA, 3000 bp, Unknown
  misc_feature (1)..( 3000): cDNA_ID_1396596_gDNA_ID_2213635_Annot_ID_181012 3000 nt of promoter + ATG
ctagatttacccccaattttctccaaacccgaattttacaacctaaaatttatgaaattgaaatccaatgagtgggatagatttgttcgctacgactaaattaatttccaaagatggacaaagaccaaagaaaaatacttgggttctatattcactgttttagcccattaaaatttaaaacctaataataataataaaagtttaatttaattataaaatctaatttgcctcaaaaacaaaattatatatcgatttgagtttatttgaaaaaatcatggtttagattttacaattaaacaaggttaaatattgatttgggtttagaaaatacgattagggtttagattttatgattaaacgagattaaatatcggttttggtttagaaagtacgattaaggtttagattttatgattaaacgggttaaatattggtttagatttattaacaggtttagatttaacaattaaacaaggttaaatgtcggtttgggtttagaaaatacgattagggtttagtttttttacgactaaatgagtttaaatggcggtttggatttacaaagaagaattagggtttagattttgtaattaaacgaaattatatatcggtttggattataattatagcttcaatttattatgtaatttaaataggatttgacatgacatatttttattagttaatgcaaaaggaggtgaacaaagaggttcatccccctaggaatgaacgcaagtctcgttcaagaccaaatatggactcgtatttttattttattttattttccaaagggaaacaaaaagtctttaatactcttttttctatatacacatatattcacctatttataataaaaaagattgaaacttacggaaaatataatacagtacaaactatatatgtcaactaaactaaataacacttaattaaatgatgtatatagattgcataaccaagtatataatattatatagttaacattataaatataaaatttcatgttaaataaccaattaactctaacgtcaaccggtgttaaccaacaaaaatattcaaaaataaatttttactttatttttaatattaaaaatctagttttactagttattctataatcaaaaaacaatttttacatctactataaaaatattttgcatatatatttaatacattgattcttaaaatatttagctttttttaatttcaaaactaaactaaaaatgaaaaaaatgattaaaatttttaaaacaaaaaaaaaactgaaattaaaaccagaaaaatcttattagaaacatatgagtgaaagaatcttttttttgtattatcaattaaaatatataaacttctttattcattagaaaataaatcattacagaaccaaatacacatgactatataagtttcataagaaagtaatatgaaaaacaattgagtatataactttttagtctaaattttgcacggtaatttttaaattcaaagtaaatgttttttacgaataatataagaaaaaactaactattgattaaaaatatttagcaattaaaaatttaacttcttaagaaactaactattattattattattatgaatagttcatatcttaaaaaaatatttattctcttagtttagttttgaaattgaaaaaataaagtaaatattatatgaattaatgcattatatatatatacaaaatatatttatattggatataaatatatttttttgtattttacaatatcaaataacattaatttttttaatactaataattagttttgaatattttgttggtcaatgctgatcaacgctggagttggtcgaccatttaacccgagattatatgtttatgatgttgacgacttgtataatcatacaatccatatatgttaagtagttgtatgttttttagtttacttgcatttgtggccaattgttgagttagctgacaatatttttttgaaatatatgtatgatgtcaaaaatattttattttttacaaattttcattgtaatattcaaattaggtagagacagataatataataatatagatatttagaaaattatgattttcaatggaaatgaaagtacagactcatatttatgacatttgtttaaaataagttggtatgtaaatacttttgctggcaattaatatctaaatttgtcagtaattacttttgtccagaccacaataaatattcgtctctatccaatccttgctcttcgtgtttatcacgcgctatgttaatttatgacgacacacagttcacttcgttatagcaacgccggcacgcttttcgttgttggaaaacggcaaacaatctgaaaattaataaaataaaaaaacgagaaaggcttttggaaattaataaagttcatcgaaatacaaatatctcttcatcttttctcttttgctcatttcccagaaacctttgtttcatttgcttcgtgtgcgatcgcgagaacaagggaaaattagggtttatatcctcaagctttttcgaacaccattgatcgttgatctaagatttttcttctagtcgagtttcttaaggtctggcttcatatctctctgtgcatggtgtcgttaaatctatgcagcgatgtcctgttcgatttcattttgcttctagggtttaatgatttgtgcatttgttcgttttagggaacgattcttctcagctttgtgttacttcatcgtgattttgttttgttactacgagtcgtttctatttcttagattattcgattagctgaggttttttgaagattcttctacagataactacttctctcgaatcgatttgcatttgttcttcatttttagtatttggatttgttgactctttctctcatttcttacatgcatagctgcaacttatttatggaaaacgaacttgttcgaactgatatttattacgatatccaggggctttgatcaaactcaaaattgaagaccaatactttgaaggattctggtaaagctaagcaact

SEQ ID NO: 10207 - DNA, 3000 bp, Unknown; identical to SEQ ID NO: 10200
  misc_feature (1)..( 3000): cDNA_ID_3035492_gDNA_ID_2213635_Annot_ID_181011 3000 nt of promoter + ATG

SEQ ID NO: 10208 - DNA, 3000 bp, Unknown; identical to SEQ ID NO: 10206
  misc_feature (1)..( 3000): cDNA_ID_1396596_gDNA_ID_2213635_Annot_ID_132143 3000 nt of promoter + ATG

SEQ ID NO: 10209 - DNA, 3000 bp, Unknown
  misc_feature (1)..( 3000): cDNA_ID_2715082_gDNA_ID_2213635_Annot_ID_132144 3000 nt of promoter + ATG
acaagccatacttcaagctcaaaccgtgcaactgagttccagcacgaacatccaacgatgcacaggacaataaaccactcactgttgactggttcggcaaatatccaaaatacctcatctcagagaacacaccccaagctttatcaacatccccgtatttgctgtaccctttaatgatcgtgttgaaagacactttatttctctcaggcatttgatcaaacactttgcctgcaagtgatacctcgccaagcttctcataaagactgataatgttattgcagacataaactggctgcaaaagaacagagcataaagtgatggagagagcgtgaagagctttggtccttgcaaaggaaggagcttttctgcagacattgagtaagctaactacacgatcgttgtgattggcgagatctccacagctgaggctcatgcagaaggatactgaaaacagagtacttcccagatcgatctcagttataattaagaactaagtttcgtgcatcatgaagaaagttctaataaaggtctgaaattttaaaagttcggatttttataaacatcaagaacaaagtttgaagttcagaaccagggaactaaataattgatctagaccgcaccggctggttcaaccacagtatcacggttttatctgtccaattgaccaatctggcccatattattttacaaataagatctttcaaattggcccatatttaacaaaagaaaatcgaattaatattatggttttctaaatgaaccaaaatcaactcaactttttttttttgaataattttatttttattccataatttaatttgtttatcatttccaatgaaattttatcattaataaaaaaggttgctctcctcatcccttccatctttcctttcacattttttagattatacctcatgtttgaataatattggtttacatatctaattcatattgaaaaaccctccaaatctctagagaaaaaggacgataagagtacttaactcacaaagggcaaatacccaacttttgaatctccttacatattttatgacaaactatgaaggtgtcctccaaatactctttaatcatcttttgattatcatctataatgattgtttcttcagacctcatacccatatcttcgagcggttttagtatctttactgtctcgttaaatagattctcatttaccatttctaagcatttcttctcttctatcgttagatcaactttcaatttttgtatgtctttgacggcttccaacaaaactaacaacaacaaaaagaaaaatcaaatcaaaagatttcactataaagaacaaaaaataaacaaattgttagttaccatcatagaacaaataatattcagctgccacaacccttttgaaaagttgaatacgttctgtgcttttgctcatctcaacaattttgattaaaaaaaaaaatatctaatgcattctttgttacaaggtcgagatgttattttgtagcgtatatagtgtttgaggcttctttgtttggaaaagatcgctttcgaaaaataataattattattattttccatgttatgcttcatataaaatgtggactcaggcctccgaaataacaaatagaaaaaattgtgttgaatgcttaaaaacgagaaagaaatctctcaactttgatttactggacacgcattgtatttgttttctataattagttcaaaataataatttgtaaatagttatctaaattcggtaaaatacaaaccgataacttttcatatcaaatacaacaaaagttagatataaatcttaaatttctatactttaaaattgagtaaacctgaaaagaatgaaatttagtctacctaaatttattaaaaaccaacaaaattttcataattcgaaccttaattatttcaggtttgaaccgcttatatttatgaaaaccaaatgaactagctaaaacgaaaacaaaagcgaaaatgaacatgacaattttgacaatgttaaaatgtgattctttcattaatttgacaaattcaacaattcttaagaagatcaattgaattgataaactatgctgctcttcttgggtaattctcacattttaaaaaaaaaacaaaaaagaagaagaagttaattctaccttaatctgcaacaaatcgtcttcaagataattatatcacgaattgatatttcttgtctcttaatcttaacgaagaaactacacctcctggctcctactgaatgtgcgttgaacactcacctattgactcatcttcaccattccttctttcttcaatctatcatagatataaatacacttcttttaagtcaccaatcttgttttcgtaatggtacgagtcataaatcttgatttgtctttggtaagtcatgtttagttgtggattatttgtttttacgcattttctagattttaaaattttatctttatataaacaaaaataaaacgaaaaactttcaatctttgagcgccaaaaccaaaattttcatcgaaaaggaagatcaattaaaatattataaaatttcataataatgtcttcaaagcacaaaataatagttttagtattaaacccactcggggaaaaaaaacacataaaaaaaccaaaatcgatttcattgattttttccatattcacagcgaaagaatcgatccttaatacaaaattccttcaagatctcacatctcttataagctttctcgataccatcattttcctttctttttttcttttcttcgattctaatttggttctgccggatcttcaaccttgtctgaagaagacattttctagggtttctagagattggtcgggttttcggttcaagtaaatggtggatcagcctatcgtacgctccacttcattaggttatcaacgacaatattcatcatctaataatcatcatcaaggtcttgcttcgattctgaatctctgctgctgctgcttcgatagtgttcttcgacaatcaccaggtgttattgaaaagcaatg

SEQ ID NO: 10210 - DNA, 3000 bp, Unknown; identical to SEQ ID NO: 10205
  misc_feature (1)..( 3000): cDNA_ID_2715075_gDNA_ID_2213635_Annot_ID_132146 3000 nt of promoter + ATG

SEQ ID NO: 10211 - DNA, 3000 bp, Unknown; identical to SEQ ID NO: 10204
  misc_feature (1)..( 3000): cDNA_ID_2991065_gDNA_ID_2213635_Annot_ID_132147 3000 nt of promoter + ATG

SEQ ID NO: 10212 - DNA, 3000 bp, Unknown; identical to SEQ ID NO: 10202
  misc_feature (1)..( 3000): cDNA_ID_2715060_gDNA_ID_2213635_Annot_ID_132150 3000 nt of promoter + ATG

SEQ ID NO: 10213 - DNA, 1519 bp, Unknown; identical to SEQ ID NO: 10201
  misc_feature (1)..( 1519): cDNA_ID_2715056_gDNA_ID_2213635_Annot_ID_132151 3000 nt of promoter + ATG

SEQ ID NO: 10214 - DNA, 3000 bp, Unknown
  misc_feature (1)..( 3000): cDNA_ID_2715238_gDNA_ID_2213637_Annot_ID_132184 3000 nt of promoter + ATG
ttctttcaaaaaataaacaaaactcaagccaaaaaaatatatttatacctttttctttctttccttttcaacaaatcatcagcttttatgagaaagagagattgagattcaccttctttaatttttcgcgtgtgctttgatctgacttgaaggaaaaaaatttcagaccatcaatttgagaatctgtcctatctggctgatttagttacatgactcgttgaatgcttgaattggatttacagtttggttttcgttttatgtttttgctgtttgttgcaaaattaatctcattacttgctctttgattctttgtcttgcttttccaatttcatattcgagattattctcttgaattggagattaaagcctcgtagtggacttcgaatcgtttgatagtaatggtcgaatcactagttgatggaactcgttgcttagttcatgttctgtgaatttgattcatgattatatttgggttgtatcttttcagaaaatctggttattttatgtgttcatcataaacggtttataagttttttgatggttgattcacttagtgaagaaccttgttgctagttctcgttatgtgaaattgatagaggttttagcttagatctgaaattaattttcattcacatatgttagattgaattctacatttgtgtttaagatatagatgttaaaaatttggtgcaaaatcgagaagattatcttaacacagttaaatgaacagacctcagtggacaacaatttctggacaacgatttctggacacgttcttctttacctttttatctcaaaatccaatcgagaagatcatcttaacagagttaaatgaacaaacctatgtggacaacaacttctcgacacgttcttcccttgaatttgtgatcatttatgttatattttgagatgttttgtatataaaatcaaacttggacttgtattttaaaacttcaaaatcaaattgagaagatcatcttaacagagttaaatgaacagacctttgtggacaacactttctggacacgttcttctttaccgttttatctcaaaatccaatcaagaagatcatcttaacagagttaaatgaacatacctatgtggacaacgacttgtggacacgttcttcccttgaatttgtgatcatttatgttatattttgagtgtctatatacaagtgaactaatgtgttgaataagcaaaaaaaacagatgatttgttttgaccaacttgtgattcttgcatcaccaatgacattcttttcattaaaaaaacaattgatgaaagctctacacatgaaccatttgtgttccagtgtttgtcatatttctatgtcatgtttcaccattactccatatggtcaagtctaagtggacaatttatcatggactaaactatcattaactagttcggttttgtgtgttgctatttgaaagcaatgtctacagattgttcttgggttttggagacatctaagattattgggttctacagaaataattggtgttcaaagcttggatagtttgtctccatgataacgtgtccacgtaaacgtaaccatgtggaaataagtgattctcataagcaaaagaatatgcttttaaggttagacgttcaatgaaacatcaatttatcaagaaagaatcaaattgtaccaaacaaggcgatcaaatggatatgaaatttaatactggaatttgccaacttgggttttccataaactctcaaatgtttgattttgataaactcttaaatgtttgattttgcaaggaaagaaaaaaaagtaataatgagaagagagagagagagcgcgaaaagaagaagcgacgaagaagaaggaaaaaaaaggaacgtggagagatgaaactttttttttaattataattttttattttttaggggcaaattggtcaaaagtttaatgaaaaagttggaaaagtgcctcatccctgacaagtgtctcaaaaggaataaaattttctaaaagtgccttaacgtgtcacattccctttttttttctatttgtcccaattttctaacgcctgtatatatgaactagtggaatttcctgcttgatatataaagaagaattgtaagtacaaaaaaggttttcacaaacataagcagatgctatcagtcacaaaaacctaaccttatatgtactcttttttttttaaaaccttatatgtacttcttattatagtaaaataataaaatgtacggtattacttcaaatttgaaaaatgttgaaactcgttacataataaatgaaaagaataaaacgtcaacttaattatgttttatctttaaaattttccagccgtatttccctaaacttatttgcacttgcggattagcatttattttcattgaatattgtaagaaaaaaatctatgcaatatcttgacgtttttcatttttctttcgttttgataaatacatattttaatgattttgattttgattttaattttcatttaaaaaaaatcaaatgataagttacattttcccgattgaatgtcatttcaaaacaaaaaaaaaaaatcaaatgataacttctgtttaaaaattttaagatttttttttttgggtaggataaaatttttaagatattagctaatcaaataaaatattctacaaatctaagttaagccactaattaactaaatttgtacttcaatagaaatcgccaataattatgcataaaaatctgccaaaatcagatttctatgagatttcactgttacgatctacatcttatataaagttctttctttttttcgtcgacaagaaaattccacagtttcaaccccaaatttttatattttgaccccaaagaaaaagagaactcaacacaaaaaatatatatagaattttctccacttgtaaaagcggtatcgtatctcttgcccttaaagcaaagaacttgtctctccttctccattcactcctcttttggaacatcacaagcacacaatcctctccgtctctgtttcaatg

SEQ ID NO: 10215 - DNA, 3000 bp, Unknown
  misc_feature (1)..( 3000): cDNA_ID_2685858_gDNA_ID_2213637_Annot_ID_132186 3000 nt of promoter + ATG
aagatctccacttttacttgctcttctccactttttaacctcattccaactaggaagtaagatccatgtatctctttttaacccttaaaacattggaaacaagaattctcttacacatgtatcggtagttggaaatgccgacccaaaaggaccaaaactcaccattatctcaagtgatagagcttctcaagaaactactccaccatttccacaatctccttttgtatttcttcatcctctggatcggcgtgatagttggaatcattgtttatccctctctacaaggattatcttcgccttcttcgttaaccatccaaagtgtctcccaactcttctttgtaacccctcctcctcctattctttctccttcatttcaggacaatgggcttgacatgtttctgataccactgaagaacatcatgcacgatatggaagataatgaacttctgtggagagcttcaatggatcctaagatcagggattacccttatcctagaatcccgaaggttgctttcatgttcttgacttggggacctttacctttggctcctctatgggaaaggttctttcgaggtcatgaaggtcttttcactatctacgttcacaccaattcgtcttacgacgagttcatgccgcaagactctgtgttttatggccgccgtattccaagcaaggtcagcttcccaaattattaagaaatttatttcgatacattaataggtttggaattaacgtgataaataaaatttataaatatattataaataatatatatatatatatatatatatatataacggatcgaagtacatgaatacgatatttttcctatcttttttagtaaattacataaaaatataagaatatttggtatcttaaaagaaaacatattaattattacactataatacataaaataaaatcaatccaatgtcattaactataaacgtatgcagagagtggattggggaaacgcaaacatggtagaagcagaacgaaggttattagcaaacgctttattagacatcaacaacgaacgtttcattcttctctccgaatcatgcatccctctcttcaacttctccacagtttactctttcctcatcgactccactctaacccacgtcgactcctacgacctcacaatcggtcgcgtccgctatgaccgccgcatgtatcctcacatccgcatgcaccaatggcgaaaaggctctcagtggttcgagctagaccgagccatggccctcgaggtagtctctgatacgttctactggccaatctttaaagcttactctcgctgccccgacgagcactatatcccgacgctactcaacatgaggccgagccttgggttgcgtaacgcgaataggacgcttacttggactgactggagcaagcgtagggctcacccgagattgtttggtgagtgggaggttaatgtggagttcttggagtggctaaggatgaagagtgttggtgattgtaagaaaaatggagaaaataagatgagactttgctttctctttgctcgcaagttttcgtcgactgctttggatgagttactccggttagcatctatcgtcatgtatttctgatcactctcttcccccttcgtccaaaaacaaagatgcaatcggtttaactaccaaatcttctttaagtaagtgaaatatacagtgtgtgcttaacaagttactttcagtactagggatgtgagattaatcaaagtccttgataaagttaggaactagcctgtcatcaagttataaacagaagataacttgagaaacattgagaaaacacaaaagcctgaccccccaatctcatttggtttagtcctccattagcatttatgagaaggtatccattcatattagcacctaactctgcagacaatgtatactcatatggtaagaacttatagaagagaaaaataggaaaagaaaaaaaagaacaaattgctactaataggactaaaagttttgcctagacacctgaatactcaaagaagaataaagtcatgtcagatatttaatctccttctcccatcttcttaagcgagatagaaactaagccacaaatgtttaaccaaagaaacacttgaaaacactactaccaccaagaaatgtgaagaagatcttaattaagcagctcaatacacatccatttttgggcaacactcaaaacgcaatttatcaagttgtagaaacagaaacaaaggctaaaccacatataaacaagaccttctcaagccaaaagtcgtaaatgttcgacaagagaaacactattagtaacagaaatgtgaagattttatcttaatcaagcatgttctagtatgagaaacacctaaaaagatagcacaaaaagcaagaacctaatgagaagcaccaccaccaatggcaaaattttctatacaattgttgattttttccccatttacatattgattattccattttgctatatttagtttttttttttttttttttttattcattcaaattcaattttacatatatttatgtgacccaaaacataattccaattcattttctacaaaaattcaatttttgacttaccatatcacaaatgatattattaaaataatatcaataataatataatcactcttataataaaacttcgtaatggccacaaaaaaatcagtaattttcgatttccttaaaaagtcatcgaattaaatatgaaaaatcaacgagttagtttgtccaaaacgaataaaataaatttaatagtaccttttattttttcggaaacccttgtttcgttttttttcctcgatcttcttcttccccaatctctcttattttgtgagctttttagatcctcctttcttcatcgtttcttttccgaggtttcaaattcgttcaatttctcgattgaagatacctgaaatcgcgttattctaggtccgccgctgttggatctgcaaattccccttcgaatttgaacatttgtgatttcaaattcttcgagaag

SEQ ID NO: 10216 - DNA, 3000 bp, Unknown; identical to SEQ ID NO: 10215
  misc_feature (1)..( 3000): cDNA_ID_2685858_gDNA_ID_2213637_Annot_ID_181086 3000 nt of promoter + ATG

SEQ ID NO: 10217 - DNA, 3000 bp, Unknown; identical to SEQ ID NO: 10214
  misc_feature (1)..( 3000): cDNA_ID_2715238_gDNA_ID_2213637_Annot_ID_181083 3000 nt of promoter + ATG

SEQ ID NO: 10218 - DNA, 3000 bp, Unknown
  misc_feature (1)..( 3000): cDNA_ID_2714191_gDNA_ID_2213638_Annot_ID_132188 3000 nt of promoter + ATG
gttactgtttacagatatgtatcacgactagcacatcagctggattggatcagattctaccatggatgttctaccataaggttctaggcgtctcaacattcttccttttcgttgaagggaaagctgctactccgagtatttctaaagtgctcgagtctattcctgtgagttgaactacctctcttcgcgtccactgtttattttgttttggctgtatatctctagctctttagtcctgtaggtataaatttgtatttaaggtatgcagttttcgataaatgtagtcccatgtctcttgcagggtgttaaagtaatatacaggacgaaagagcttgaggagaagcaagcgaagaggttagttagttatcccattgcatatttgcgacaaagctatagctcttcaaggcactaaacacatgttttgttgtatattctgaaattgtagcattgttttgttgtattttctactactgatcattttactgtcattcttttttgttttgtttcatcagccggatttggaatgagacctggctttcgtctttcttttataagccctgcaattatgagttatttgtcaaacaatctctcaacatggaaatggctattgtcatggctagggtaagtatttcttttagaccttatttggttcagttttgactcatgtctcatgttacattctcatttttcttgttcttactaaatatcaggatgcgggcatggattggatacttcatcttgacactgatgagctgatatacccagcaggtgctcgtgagtactcactaagacggttgctgcttgatgttcctccaaatgtggatatggttatatttccaaattacgtgagtgatatctcattcacacttcttgcattgcttattttcagctagttttgtgagtctaaagtttcttttatgatctggcctttgctatgaataatgcttttggattttgttgtttaggaaagcagcgtagaaagagatgatatcaaggatccttttacagaggtataattcagtttattactgtctttacgtaagagagtaggtttattaatatttgtttgttatgttagtattacttctgagatatgtgtggtgcaagcaggtgtcaatgttcaagaagaattatgatcatcttccaaaagatacatattttggaatgtacaaagaagcaacacgaaataatccaaattactttttgacttatggtaacggcaaatcagttgctcgggttcaagatcaccttcgtccaaatggagcacacagatggcataattacatgaaaactcccaagtatgtctatcatatattcaaacataactaaattttctattggttgaggaacatgataggactttgttgttactctaatatagaaccatgtaactatcttaaaggagttagcagtggagtggagttccggttaacagcgtagttaattttttctgtttgtgaagccaatttttttttggaaatactaacctgatgattcttgctagtgagatcaaattggaggaggctgctgtcctacactacacatattcaaaattttctgacttaacatccaggcgtgatcgatgtggctgtaagcctacaaaagaagacgtgaaaagatgctttatgttggactttgacagatctgtgagcatcttttcttaaaatctctaaaagtccttagtcatttcttaaaatctctatatttcacttcctcttacccttttatgatgctgtatggatcaacattgtaggcatttataattgcgtcaacagcaactgacgaagaaatgctaagctggtaagagccttagcatcgttcttggttacttgtgaaatagataacttctgacactctttgaacaagtttggtcctattgtgattacaaaaatatctggtcttgatcaaaaagtaatctaccctgtgtaggtaccgtgaacacgttgtgtggggtgacaaagacgtgaagacgaaactccttaggaagggtattctgactcgcatctattcaccaatggtaagaacatactctgcaattcattatacaaaattccaaacacaagtcctggaatgttgagttcttgcaagtcaattgtaaaatattatatacatttgtggtaaaatgcaggttgttatacaagcattgaaagaatctggtgtcttcagctcggttgtctcatcagcttctacaaatctgtcaaagaaaaagttcttatcatcaattcacaaaagcaactcatccaggtctactgcatctgagtcccttccatcaaaggaaagcaagtctgagggcatctctgcaaggcaccttcttgaggctgaatcagccatccctcctttatcgccacctgggatggaacaagctagattttttacagaggattaacaggttttagcacggagctgatgcattcgcttttactgatattgatactggttgcaatatgagtgctgtgtagctttaggatggcaaatgaagtggaacaaagaagagtgaagaaagcggctttgtgtgattcttcctaatcatattgaaaagtcatcgattctcttgtctcattttgctctccctctgcaacttatgatagatgagtttgcagcatttttctgttgtcattgttacttctatgtaagtttattactatgtacagaacttcaaagcacagagccttggactcatttttctacttacatcgatcgccttataactacaccactactgtcatggcctcttcatgggcaagagtaataccaaccttattaattcaagtttaatacaaatcgattaacatgcacctaaccggtaatgactcaacacgtatgttatcatgaggatgacacaatctaggattccaaaaaaaggtatgaagaaagagtcaatggtccataaacgaagatttggcaccaaaaagcggagactcctcaagttatatataaaaagcagagtaagaaggaggttttgatgtgatgattgttgtctgagagagagagaagaagaag

SEQ ID NO: 10219 - DNA, 3000 bp, Unknown
  misc_feature (1)..( 3000): cDNA_ID_2704713_gDNA_ID_2213638_Annot_ID_132190 3000 nt of promoter + ATG
acgttatgcaggaatgctccaatatgatggagagcttaagcttcctagccgctatcttgtttctccaccattgattgacagaacttctggtgaatatctggcacacaatggcgttcgtacttttgcttgcaggttaacttttagaatctctcaaatctttagttattgtctttgccattttcttctattgctgcttcctggtttatttatttgctggaattggattcataattgaaactgtgataagagtaatccagtcttctttacttgctcggtagaggtctaatttatgattgggggttgtttgttgattaaaactagtgaaatctcctagctcactttttcttgatgagattataccgttgatggttagttacatataatgaatgaattctcagctattaacctattaaaattttatttcactgaaacagtgagactgtgaagtttggccatgtaaccttcttctggaatggcaaccgctctggatatttcaatgaaaagttagaagagtacgttgagattccaagtgatagtggaatatcattcaatgtccagccaaagatgaaagcactggaaattgccgagaaagcaagggatgctatccttagtggcaagtttgaccaggtaaggtgtattctcttatcacattgtatcaacccattaaaacaattggcttctgagtttggtgccaatggattttcaggtgcgtgtaaacctgccaaatggagatatggtggggcatactggtgatattgaagcaactgttgttgcctgtgaagctgctgatcgtgctgtgagggtatgatttcaataaatttgtgacatgggaatgttagaaaccgttcttagtagcaatgactcacttagttttggtgtcctggtttgcagacaatccttgatgccatagaacaggtcggagggatatacgttgtgactgcagatcacggaaatgctgaggacatggttaaaagggacaaatccggcaagcctgctctcgataaggaagggaaccttcagattcttacctctcacacccttaaaccagtaagttctagcactactaaaacagttcgtgttatgaccattgcaactgagcatagattaagcatgaggggttgtaataccagaagtggttggtgtatcttatatgaaatttggacatgatgtgtgtgtgcaggtgccaattgccataggaggtcctggcttgtcagcaggagttaggtttagacaggatatcgagacacctgggcttgcaaatgtagctgcgacagtgatgaacctccatggatttgtggccccgagtgactatgagacaagtctgatcgaagtcgtcgagaagtgatgattcttgttgttgtagttctttttaaaagtcccacctgagcctctatagactctgattctcttttaagttactattttcaccgctctctaataaggctcgtgattttttgggagccatactgtatactcgccggccctctcacgatgttgttcaattcacagactaaatttgatttatctatttcgccaaaacataacttcattaaaaaatgttctccaaataactaaacgaattaaataaaagaaacctttcatgtaaagttaaaggtatgagactttaagggcagttgctgaacattcgtaacacatgggagaacaatagagaaagttgaaaagaaacgtagcatatagaaaaattatctttgtaaccaagttgatttagaaaaatatcactatttgtgaaaaatactagatcagtttattattactttttttttttttgtatattcacaaatatcatattcatatagaagaaaataaacaaagttgtaaaaatctggcatttaaaataaaattgaacacttcaatttatttcctttcataataataattttggcataagatatttgcaaattgatctggttcggtatggtcgacaaaataattttccacgctacccttccagccgtccattcactatttgccctcaacgttaccaaataacggtccagattcctagggcaagatctaacggttagcaagtaaagtcgtaccatcagaaagaataacaattctttcacaaagtaaacataaccaacggttaacaagttcttagggttaaatcagtaagatccaacggatattaaattgcaaggcccaaatagtttttttgcagcagataataactcgtccccactggcgagtgacgaccgagactctgtgaccctatttttcgagacgataaaagggcaaacaatcgctcttttcaaagctcgcctcttcaccacagagaaaacttcgtctctcttctctgcttcgccctctcatttcctgtgagataaaggcggagtctctctccagttattttgctcatccatcgattcttaggtatgactcgtttctctcagatctgtgattctttataatctcgtcgttcttcaaatcattgttatattcgtttcttcgatctgtgttttttagatctgtaaggtaaatgagacgtttcgatctgtagatctgattgttatattgatagattatgttatctgctttgcttaaagtccgatcggaatgttttgtgctcattgtcgaatatctgatgtatcggtttcatagatctgcttctttttgtgcgtttcgttgatctgataatcttctagtgatcaaaatcgtttggatctgttgactttagtttaaaatgtatccgatctgatgtcgaggcttcattattggaagttgttattgttgtaatcctgatttaagttgctgttcttaaatttatatgatctttgcgttataatatgacatggtagatcttggttcatggttcactgttttccaataaacttggtttgtttggttggatagcgttctgtgatacgaccatgtcttgtgttggataagaattctctgaatttccttggctggtttgtagtatgttattcacgtctggtttctcatcaatgattatgtgattttgcagagttcaaaatg

SEQ ID NO: 10220 - DNA, 3000 bp, Unknown
  misc_feature (1)..( 3000): cDNA_ID_2714183_gDNA_ID_2213638_Annot_ID_132191 3000 nt of promoter + ATG
agatgtaaacataaacgttgtaacattgccaagtgcaaatcatcttctacatatcctaccggattctaacctctttggttccaaaatctattggttcatcggtgatcttctaatataaatgtgagggtcaacaagttgcatgaagcagatagctgcaaaaaatgttaaaactcaacaaatctcaagaacacactagttccttttgaagaatgctaagctcaatgtaacaaagttgagtatggatgataggatgatatacatcttcttcaactgtctgcttctcagacaaaaagatgttgaaattattacaaaaagggcaaagctttacagcaaaagtagttagaagaaaacaaagtgagtgcactccagaaacaatccaactcttttcattctcatggagagaccaccaaagtttgttaatttgagagcacaagaagaaaacaatattacttatttccttatcaccagcagagaaacaagatgaatgtggaagtatcaacttgcttaccacaaagaaaaaataatcagaaaaagaaacactttaccaaaagaagaataattgtagaagaaaaaaagaaaaagacagtaacagatgatcaagaagatgtgatgatgatgatgatgtacacaaaagtatcctaagctgcgtattcggtttcaagcattggttgtgtacgagtcgtagtagcagttggtgctcttgtttcaccaacctgagtcatcctcagagcttcccctgtctctccagctctctccatctccctcattttctcttgcttcttgtaatttcgacatctcaaaaccagaaacagtaaaagccccaacagtatcaatccaccaaccaccgacccaacaatgatccaagtcttggaattggaatcagagctcttcttcttcttcttactctcaatcccaggaggagctagactcggagcagaagccacagatttcaccaccacagagaaatgtccctgatgctcagtctcgcatgtgtttccaggctgaatcgaatcgctgaaactcgcttcacctttagaatcgaatctaacacacttagcactagacccttgcgggattcgttccagatcagagaaatcgattctgataggatcattagacacccttaaatcaagctgaggcaaattaagcgcagagagattcttagcatcgtaagcgagaagacccaagacaggagcgacataatcataaccagacaaagggtaatacaagtgagagaaattagctaggttttgataaaccaaaacaagccttgtcacatacggcttgacgataacgccgctgggaattgagaactcattaaaaggagtgactccacgttttctaaagcttccgcttctgagtctcatagcagcgagtttgatcccagtcaaattggaaggaacagtagtagcctcgtagagaatgccggtacgaggacgaagcaaggctctaaaagagtaatcttgaagaagagcatcgagtgaagaagaagaagaagcattgggtgaagaagattgagcagagagcttttgtagacgaagagatagaaacagaagcagcagcagctggagacaacggagaaaccccattgcttttttttgtttctttcgcctctggagcaaaaaaaaatccccccagggcgagtcaaaggtgggagacacaggaataaaaagtcgccgtcacgtctgagtagaaaaagggtaaaaaggggaaatggtgaagagaagaacaaatcgaggaatgagggttaaggagcaatggaggaagctgaggaggaggaggaggaggaggaggagagagaatgaatggtcgccggtggaaaagagagagagagagaaaggagagaaggagagagccaaaaggacaaaaaggagaagaagagtgttgtcgtcagtcccatttgttcacaaaaaaaaaaatgatacagcctgttcatctgattttttctccctttacacattaacaaaaatttaatattttgtttgttttttttactttccttttcgaccaatcatattgatacattgcggcattcaatttcgccgtaacagttgtccgtctacctcttattgtgttatctgtatctctctctgtatatttcccatatatgtatactgtatgattcttttctacttttgtttttgtctttccttatccttggcccatttatctgactatgaaccacgtctcatctagtttcaggctttttaagcccaatatataggaactcaactttttgtctttggcccattagaaattgttttttagccttctaccaaccttttgaaggttcccagttaatattatgatgatattgaataaataaatgtgcacaaccctgaatttcttacatgagttttcggtttggttttcgtgtaatttcagtttgatttaatgcaatctcaaggtttaaataatgatttagataaaaaaaagttactgtcaacagaaattaatgtaatcccagttactaaaacttacccatttttgatcaaattctggttcaaataccgtataaactattaagttaactccggtttgaccttttctgtatgctattttttacgttgaccaaaataaaaaggtatatacaattttttttacatggcgcacaccatgactattacaaacggcatgatccagaacattcgttcatagcagctaaaactagaacattcgtctccttccatttttttgggggcttcacaatgtttacttgagcccaaagtaaagcccattaaattggtaccacgtcatcgctaacttttccatttctatgtttctataaaagtctcatattatgtcagtgatagctctcaacctaccatacttcaccacataaccacttctgtctctgcgaatctccataagactctttgagaagctttcctctgtttctccgctggtaagcttccgttatctctctctctctcgcttctcagatctgttccttaaacctttaatttctcaccgacgagtggatctgaatccacagttatg

SEQ ID NO: 10221 - DNA, 3000 bp, Unknown
  misc_feature (1)..( 3000): cDNA_ID_2994592_gDNA_ID_2213638_Annot_ID_132193 3000 nt of promoter + ATG
attatttcttgggcctgccgcagctttatatccacaatatcaattggaagatcagcctcaatgaggatatgcaactgctcattgagatgctcatagccaggcttccctttcagtttctcttcctagcaacaaacatatcaatgcaaaatatgagcatagtttggtaaaaagatggttggaaacagaaaaaaatgtaaacatgtcttactttttcaggatccttaattgatcctttccctctaatatacacacggcaacccgtagttgcttccacacgctttaatgaattccctctaggacccagaagccttccaacaaaattgaactaacaaccaaaagcagaagaatggttaattcacctgaacttcattgtcgcaaagaaaacaatacagcgaaacttacattcggataggtatcaactggaagatctaaacgcaaaatacgcttcactgggtatgaacttgggctagctggcgcaccttgccactccattgccattccatgaggaccaccaattctctacgagaaataaaaaggctacatttttattacagttctgaaatgagtaaaatggcaatgaaacatcatctcctagaagaagggcttaaagggtatctctacaagagataaaaaggttctagttgaagctctagatagattttctatgaggaattacctaaacagtcgagacttcttatcgggtatacaaagaccgaaacttctaactcttgaacatgcaacgatctataggctacagatggcaccacatattcaaacaaggagatggagagctaaactcataccttatattccttgcactaggaatattaggctgctccaagaaaagaatacatgagccatccataaatattttcatgtgcaagtgggtttcaaccacaatattctgttaagaaactttctatgttctattaagataatcagggatgaaaaggtagcttcttcaacaaagacatgaagaaaaaagctctaacgaaacacagtttgtaagcaaaatggctacctctggtggaagaccattccaaccacctaatccaccaccggaaacattagacataagatttggtgaagccattggactaggacttcgatgccgtaacctatcaaaatcggtaaatccttggttgggcatcattccggtgatccggaaaatttctgcacaataaaaagaaaacaaagaagagaatgtcaatgataccaatcaatatagctaacaaatctggaagctttgctaccaaaccacatacgccatcaaagcatagccacaaaaagccccaaccaatcttcattaactgaccacggagacgatactatcattaactgaactaatcaactaacaagactcaaaagcatcaaaagcatgaagaattaagagctaataaagtactctgagattaaatatgactatatgagcgaagatccaattatgtgattcagacaatgagtattaggacaagtcatcaaagagagaaatgctgcataatcaagacaaatatacaggaaacatcaacttcaccaaaaaaaattcagatctaagaaggaagaaatgagaagagtgggaccttgatttaagagtcggctacaaatgggtaagacttgcatgaaaggtccaagcttttgatgctctgctaacaactgagatatgtattgactgcagaaaacgagcaaaaaacaaagagataagagatttcatcaaagaagccattagagagggaggataagtcgaaagagaaacacctgtcaacatcggaggaaggggttctaatctgaggagaagcggctctagaaggtgagaagttattataattatacagaccagacatggtgggttctgttttgcagctatcagatattgaaaggaaaataagaaaaaggaagaagaagagattttggcggatagggagtgaggagaggaagggtgttgttgttgccgaggaagaaaaggaagagaagcaaacagagtcgtcacagtagcatttcgactcaaggagggttttttgtgtgtataaataagagaacaggaaaaaaaagaaaatgaaaagagaaacttttttttttaacaaaaaagagaaacttaccgaagactatattcggattttgtcaaaacatcttttgaattcttatctttaccatgattgtcattcaaccctatgttctttgctatcattttatcagttaaagtctttagtgtttagtagaatgctagggtaaatatgagacttatcatttaacctttttactcccttttaattactttaaaaaaaaaatctaacctttaagtatcttttttagcaactaaaaccctacatttcctttttgcgtttttatggccgtaacttccggttcacggtgttactttatcgtactaaatataagttttaacgtctgatatatataaatcgtgtcaaacaagaaaatatatcattaataaacagagattttaatttgtaacgtgtcaatctgatataactgtccgtagattttctttatttactaatttatttgtgtatctcgtgtcttaaatatccgtagattctcgtttacttgcttagtttgacatatttcatttcttactcggtactcgccttttaatcgatcgtgtttaatatcttctataagaaaacattacttccaagtgtatactgtcttcatcatccagcttcatacggttgtgggataaaatttgattactagggaaagcttacatgtactaacttggggtcataagtcataacactagtactaccaagtaggttatctagttattaccaccgtccgtgaccatgtatccatccaatccatgaaaaagtcaaaaacatttcatttggatgtattgggctttgagatttacgtttcattaaaaatgaagcccaaaagcccattattatccaattgactagagtggtctctgatcccaaatctttaacttggatcttaacacagagaagaagcacaatcggaagaaaggagaagacgaagatg

SEQ ID NO: 10222 - DNA, 3000 bp, Unknown
  misc_feature (1)..( 3000): cDNA_ID_2704737_gDNA_ID_2213638_Annot_ID_132194 3000 nt of promoter + ATG
tgaagtaaaatgtataaatgcggtattaattgtgtttcaaggacacacaaataattgccagtttttgtcaaaaggaaactatagttgtagaatattcgtctcttttcttctttttctgttatctgttctattagaaagctaaagaaatacatcaaagtcaggtctcaacggtaaaatgaaaacaagcttctttttcactaaagagtaaaagagattcctctcaacattggtctttcatatttttcctagctcatattctggtgtggttgatcgaatcttaatgaaccggagaaaataaaagatttgattatgtaatttatcataatcaagagcttgtttgtgaacacatgaaaaagtaaaggaaagaagaagaactctctctgcctgaggagttgtaatttttggcagaagctggtgtcgttttaaagagaaattagaagtgaatctatgtagttgtgttggttggtaagatcgatttagttacattaaataaaaaatattcctttgagcaaaaacaattaaaaaagataggtttcgtcacaaggtggaccatttcgaagaagaattaagagacgagcccacttgaaagagacatagcgaggggaccccatgtgaatctgcaagcagagacagaggctttgaccgttctcattcatcaaccatcctccattattagccagagtcataaaccatgtgattcatcatcacaaggcttcattggactctctcatgcatattcacaatctccacttccatcttatacaattccagttcctacccgcaacaaatccaacacctgaagatgatactgatgcttttgaaagtataactaggaatgagagaagtactaggatgagccatctttccagatattcatttattcactcacacagcaagagagtagttcagtgtatcatgcaacttaaaagcatacaaaatatcacgaatagagaaatattgataaaccaaatgttattgaggtctgatttctgaaagctttaatatgtccaaggaaaatcaaatgggaatgaaagtactagatcccccagcttcttcttcttctggaatgcactttatttgtcaccacaagtggtcaccttaagcccctacatcacatcaccatattactctcagagttaacatcgcaagccagaggagaagaaaagaaagtagtgagaggatttcgcatgcagagaagaaagaacatcactgtcctagagcttcacattacaaaaaataaaaacagctccaaaagattatcaataaaccaaccataaccaggacctcaatcattcctagacagggcaaaaacaaataaaacaaaccaccatccagaagcttccagtggtaaaacaaaaactaagcagaagtgcctaggataatttatcgagtacccaaaactcaggatatgattcatttctctacacagaatagcaaccaaaccaggaaccctgaagcctcaaactgacagagaagagaactaagtagtaacaaatctgcttgttgcttaagaatacttatacactagctatatccacagggcctctcttataaagctctgaaagcatatccattttcaaatttcaagaaccaaaaacacaaatgatcacacatttgaacctttaccggcacactaattagcttatgaaacaacaaaaccaatatactgatttgcatatgaaatttgactcgtgggagcaacaaaagaaggtgtctttgggggattttccaatatacaagcagtatcatggctatcgaagaggactaaactaagaaagagctcagagaaagcggaacgaataattaaggagagaatgagcacacacctgaggaacacaaaagagataaagcgaatcatgaggaaggagctgcagctttctcgacgactttcttgtcgcgtctttccatagcaacatcccattcatcgtggccgatgtgcttaggctgcccaatcacaaattcaaatcaaatcatcaaccaaatgttcaatagagtacccaaatttgtataaaccggatcaaatcgagcaaaccctaggagagagagagagcaatgaatcgaaaaggggggaaattcatacacggccatgataagctttgtggatgtagtactgagaattgcccatgatacagagcatcccaccgatgattccgagaggcaacatcgcttccaaccataccaacgacatcttcgtcttctcctttcttccgattgtgcttcttctctgtgttaagatccaagttaaagatttgggatcagagaccactctagtcaattggataataatgggcttttgggcttcatttttaatgaaacgtaaatctcaaagcccaatacatccaaatgaaatgtttttgactttttcatggattggatggatacatggtcacggacggtggtaataactagataacctacttggtagtactagtgttatgacttatgaccccaagttagtacatgtaagctttccctagtaatcaaattttatcccacaaccgtatgaagctggatgatgaagacagtatacacttggaagtaatgttttcttatagaagatattaaacacgatcgattaaaaggcgagtaccgagtaagaaatgaaatatgtcaaactaagcaagtaaacgagaatctacggatatttaagacacgagatacacaaataaattagtaaataaagaaaatctacggacagttatatcagattgacacgttacaaattaaaatctctgtttattaatgatatattttcttgtttgacacgatttatatatatcagacgttaaaacttatatttagtacgataaagtaacaccgtgaaccggaagttacggccataaaaacgcaaaaaggaaatgtagggttttagttgctaaaaaagatacttaaaggttagattttttttttaaagtaattaaaagggagtaaaaaggttaaatgataagtctcatatttaccctagcattctactaaacactaaagactttaactgataaa

SEQ ID NO: 10223 - DNA, 3000 bp, Unknown
  misc_feature (1)..( 3000): cDNA_ID_2704729_gDNA_ID_2213638_Annot_ID_132198 3000 nt of promoter + ATG
aaaactacacatcaaccttggctcatgaacatgtatatgaatgaaaagcaagagaggctacaataagaacataccaaaacaaacacagcgatgcgcattaagtgattaaataaactttagagatctctcccaaaagtatatactttaactttgtcctttgctatttgtttgttcatcttttatttggtgggttttgatatgacatcgacttcatttctcagttctcaatccattttattttaactaaaaatgggttaaagtcttgcttgaacaagtttggacaaacttcaaccaaactatgtatagtgttttattgtatttatggtttaacgtgttgttgctttaaatttgttattagatcataacccgtgctatacagtacgggcattaatattttgaataaattaaattgtatactttgttatgtttgctatgtttgtcaaaattaattgttatatttgtcaaactttagtaaaatatattcaaatataattaaatttattaaaacttaataaatttaaaagttttttttgtttggagacgcactatctacatacaaaatacccgtttctattttttgagtatttttagggcctgaaactttttatccaaactgacctaaacccaactggacgcgacccgaaccgaatatttagaattattctattaggtagtaaatcatatacccattaatcccaaacccgaacgggttctacccgaactcgaatggattactcatatgcccagccctattctctgatttaattatctaaaaaatcccaataaaacatatgttttggtgactactttttattcaaaaaaatttacatcctcttctgccaaaatcatttcataagacatcccaaaacccttggaataatgattccatgaatgaagaattcttatcccaaaacccttggaataatgatttcatgaatgaagaatcctaatttgaatataccagaggttttgaaaggttttaagtttttgataggtgtgtatctgagaaggtacatccatcgtgatggtaatctgcttatttataattttaacttgcattatacagcaggtagtcttatattttagttaaactaaaaacttttattgtaaagttgattataaatatatgatattattttatttgattttaaatgtatagtaaactgcgagttgtatatgttttgttgatattatttatattgtttagtgtttaaaatgatatacttgtattttgattgttaattttagagtttcacatgtagtatatcatcttgtattaatattgatttaaacccgtcaattataggatttttcagcttgtattaaaaattgaatcacatcatacacattaaaaaatctaatatgttattaattattatagtatataagattataaattttaaaataatatgtatgaaattgaatataaatattcaaattatgacacaatactcagtaaagttttttcttaaatctacttttgacccgttatagtatttttcatgtattgaacaatttatatttgtttttaaaaattcaaattgtggcatatgcgaaaaaactctaattatttttttataacgatgatattattttttcgcaaaaatagaatcatataaagatgagaggtgaattataataattattaaaaaattaatatgataatttaggtatcaaatctaatttgttgattataattggttacttttttggaaattaataatgtatttcgtttttgagttaaatttaattaattaaattagtatttgattttttaatttttaaagaaatgaattaatttactttttaaaattttatttctaatggcatacctatgtaattacttacaaaaaataaggttacattttaaaaattaatatgataatttagatatcaaatctaatttgttgattttaattggttagttttttggaaattaataatgtatttcgtttttgagttaaatttaattaattaaattagtatttgactatttaatttttaaagaaatgaattaatttactctttaaaatttaatttctaatggcatacctatataattatttacaaaaaataagattatatttaaaatgtatttccgaaataatatagtaggataataaaaatggagatgcagtgaagggaatgtgtacgttcccaagatacaaaaatagtggagtctttatggagttccgtgccacatcctgttttttttttctcacgtgccctgaatcatatgtgtcatgattttggtttttggacgtagttgaaaatgcatcaagcatcaagaccactagcatgtgaaacgagacggtccggtctagagctgagcactgagtccaaaaagaccgagtgtccgaccaatatgtagtttgaaattggtcctggtttaaatgagtttcgactaggaatgaacccgcttaaaaaatttgtaacacatggataaataaaaaagtttttgaaaagttgagaacaaatttttttttttacctttatacagctagtaatccgataggattatatatagagtgatgagagatttgtgatatttttacgattgttcaacttaataaaactaacatatatatatatatatatatatatatatatatatatatatatatatatatatattcacgtttccttaaaacaatagtagtttttatgggtttattaggaacagaatcaattagtttattttttacatccgatttaggaaagtaaatacactaaatagttttcaaaaaataaagatgacaaaaatataagggcagaaaatattaccgccgtaacataatgctttttgaataaagcttctcctcttgagcactcgagaatctttattctccgttactttcttatttctcaagaatgcattagcgtctttgtctgcacacaaagcaaaagcagagagatagggattggtctgtaattcccaagactctattttcagtactatcgattctcccggcgatctggtgagtgagatagagattcacg

SEQ ID NO: 10224 - DNA, 3000 bp, Unknown
  misc_feature (1)..( 3000): cDNA_ID_2714172_gDNA_ID_2213638_Annot_ID_132199 3000 nt of promoter + ATG
ctcctcttgagcactcgagaatctttattctccgttactttcttatttctcaagaatgcattagcgtctttgtctgcacacaaagcaaaagcagagagatagggattggtctgtaattcccaagactctattttcagtactatcgattctcccggcgatctggtgagtgagatagagattcacgatgggctcagacagcactttgtctctcccttcttcatctcctccttgtaacaatcgctcctctgttcctccaactttcaccactcggtctgtcttctttctctatctctcccccgagttctgtattaatctctgttaagcttatctgtattcacttgttattatgaatgtaatggtttgagttttgtttttatgaaaattacagcatattctctgatgttgcgggtgacatcattgttgttgtcgatggagaatcatttctacttcacaaggttagtgcacacttttctggtttgagtttttttttttttttctttacagtttttagatcaaacgcatcagagaataataataaacattgcagtttccgttagtagctaggagtggaaagatgaggaagatggtgagagatctcaaggactcttcttctatgattgagcttagagatttccctggtggaccttcgacgtttgaactcaccatgaaattttgctacggcattaatttcgatatcactgcctttaacgtggtctctctccgttgcgctgctggttatcttgagatgactgaggactacaaagaacagaacttgatctttcgagccgagaattacctcgaccagatcgtttttcgcagttttcatgaatctgtcctagtactttgctcctgcgagacgcaagagattgctgaaacatatgaaattcctgaccggtgcgtggaggccatcgccatgaatgcttgcagaaagcagttagtatcaggtttatcagaggagctcaaggggagagattgtctcgagatgtggactgaagaactctctgctctcgggattgattactacgtccaagttgtatctgcgatggcgaggttaagcgtgcggtcagagagtatcgtcgcttctctggtgcattacgctaaaacatcattaaagggtatcatcgatcgaaactgccaggaacagaggaaaatcgttgaagccatggttaaccttttgccgaatgacgaaaaaggatcttactctttatcaattattcctctcggtttcctctttggaatgctcaaggtcggaactataatagatatagagatctcttgcaggctcgagcttgaacgtagaatcgggcatcagttagagaccgcgtctctcgatgatctgcttataccttctgtccaaaacgaagattcaatgtacgatgtggataccgtccacaggatactcacattctttcttgagaggattgaagaggaagatgatgaatgtggttacgattcggattccactggacaacacagttcgttgctgaaagtgggacggatcatggatgcttacttggttgagatcgcaccggatccatacctgagtctacacaagtttacggctattatagagacactacccgaacactcacgtatcgttgacgatgggatctacagagccattgatatgtatctcaaggtaaacaaaaacacaattgaacaaagtctttttatgttttgaaaacatctgaaactgataatcaaatatggaaattaggctcatccattattgacagaagaagaacgcaagaagctatgcaacttcattgactgcaagaaactttcacaagaagcaagcaaccacgtggcacaaaacgatcggctgcctgtacaaatggtggttagagtgctttacacagaacagttgcgactgaagaaagctctgtcgggagattcagaagaagggtcgtgggttttgccttctggagtacaaagccgagcggtttcgccaagagacacgtatgcagcgttgaggagagaaaacagagagctgaagctggaaatatcaaggatgagagtgagagtgagcgagttagagaaagaacataatttgatgaaacatgagatgatggagaaatccggtaataatggtggaacgttcttgacgtcactgtccaaaggaattggaaggatcgcgacattcggtggagaaacccggcaaaaggtgaaccggaaatcaaggtcggtgtcggagagaaaatcaagtagaagcggtagataaaaacgtcaccgtttatgtggttgctatctaaacggagacaagtcatgtgtaacaggatgaataatgggccgggaggagtgtgaagtaggcccattaaaaaacaaagaaaggtctcgttttcagcctataaaaacaaggaaaacatgggattaaatggggtccggtccgagccgtctttgtccatatttatcttgataagaaaagaaatatataaaataaagtatttttttaagaaagatattaagacagtaaaaatgtttataagtgttggtcgttgtacacggttaagttgttttgttaactagtgtaaaatttggttttctgataagtttccggaaatagtacgtcacctataactagaaaattataaaaagatttggttaaatctcaccttctaaaatttactaatatagaaagagaagaccacgtggtgtctaactcatacacatacataaaccaacttgtttatagcatactataatattaccaagaaattaggaaactaccttcacttctccgcctcataaataaataatttacatctaaaaaaagaaaaggagtatgattgatgaaagatgaacatgcatcgtgataacattagatggttacaatatcctcaccaacttggaagtgacacaaattatacattactactagttagtactagtagatctgaatctctctctctttcttcttctctaatgccgtaaattgtaagctaactcttcccacatagtgcctcgattctcgcttttgctctctctctctttcctccgaca

SEQ ID NO: 10225 - DNA, 3000 bp, Unknown; identical to SEQ ID NO: 10224
  misc_feature (1)..( 3000): cDNA_ID_2714172_gDNA_ID_2213638_Annot_ID_181104 3000 nt of promoter + ATG

SEQ ID NO: 10226 - DNA, 3000 bp, Unknown; identical to SEQ ID NO: 10223
  misc_feature (1)..( 3000): cDNA_ID_2704729_gDNA_ID_2213638_Annot_ID_181103 3000 nt of promoter + ATG

SEQ ID NO: 10227 - DNA, 3000 bp, Unknown; identical to SEQ ID NO: 10222
  misc_feature (1)..( 3000): cDNA_ID_2704737_gDNA_ID_2213638_Annot_ID_181099 3000 nt of promoter + ATG

SEQ ID NO: 10228 - DNA, 3000 bp, Unknown; identical to SEQ ID NO: 10221
  misc_feature (1)..( 3000): cDNA_ID_2994592_gDNA_ID_2213638_Annot_ID_181098 3000 nt of promoter + ATG

SEQ ID NO: 10229 - DNA, 3000 bp, Unknown; identical to SEQ ID NO: 10220
  misc_feature (1)..( 3000): cDNA_ID_2714183_gDNA_ID_2213638_Annot_ID_181095 3000 nt of promoter + ATG

SEQ ID NO: 10230 - DNA, 3000 bp, Unknown; identical to SEQ ID NO: 10219
  misc_feature (1)..( 3000): cDNA_ID_2704713_gDNA_ID_2213638_Annot_ID_181094 3000 nt of promoter + ATG

SEQ ID NO: 10231 - DNA, 3000 bp, Unknown; identical to SEQ ID NO: 10218
  misc_feature (1)..( 3000): cDNA_ID_2714191_gDNA_ID_2213638_Annot_ID_181092 3000 nt of promoter + ATG

SEQ ID NO: 10232 - DNA, 3000 bp, Unknown
  misc_feature (1)..( 3000): cDNA_ID_3410142_gDNA_ID_2213638_Annot_ID_181090 3000 nt of promoter + ATG
tatgccatctgtgtgctccatttggacgaaggtgatcttgaacccgagcaactgatttgccgttaccataagtcaaaaagtaatttggattatttcgtgttgcttctttgtacattccaaaatatgtatcttttggaagatgatcataattcttcttgaacattgacacctgcttgcaccacacatatctcagaagtaatactaacataacaaacaaatattaataaacctactctcttacgtaaagacagtaataaactgaattatacctctgtaaaaggatccttgatatcatctctttctacgctgctttcctaaacaacaaaatccaaaagcattattcatagcaaaggccagatcataaaagaaactttagactcacaaaactagctgaaaataagcaatgcaagaagtgtgaatgagatatcactcacgtaatttggaaatataaccatatccacatttggaggaacatcaagcagcaaccgtcttagtgagtactcacgagcacctgctgggtatatcagctcatcagtgtcaagatgaagtatccaatccatgcccgcatcctgatatttagtaagaacaagaaaaatgagaatgtaacatgagacatgagtcaaaactgaaccaaataaggtctaaaagaaatacttaccctagccatgacaatagccatttccatgttgagagattgtttgacaaataactcataattgcagggcttataaaagaaagacgaaagccaggtctcattccaaatccggctgatgaaacaaaacaaaaaagaatgacagtaaaatgatcagtagtagaaaatacaacaaaacaatgctacaatttcagaatatacaacaaaacatgtgtttagtgccttgaagagctatagctttgtcgcaaatatgcaatgggataactaactaacctcttcgcttgcttctcctcaagctctttcgtcctgtatattactttaacaccctgcaagagacatgggactacatttatcgaaaactgcataccttaaatacaaatttatacctacaggactaaagagctagagatatacagccaaaacaaaataaacagtggacgcgaagagaggtagttcaactcacaggaatagactcgagcactttagaaatactcggagtagcagctttcccttcaacgaaaaggaagaatgttgagacgcctagaaccttatggtagaacatccatggtagaatctgatccaatccagctgatgtgctagtcgtgatacatatctgtaaacagtaacaatgtcaagaatcatatacaacatggagcacaaaaagtgaggtgactttacaaagacagatctgatcaaaaaatgaactttggtatttctcaaatctctataatccaataaaaaaagaacaacttgatatttcagattagacattgtagtaagatttaagaaaaaaaaaaggaatttggaagtgtagatcgatccaaagacttgaaatcaggggaattgaaagtagtaaccttaggctttaagctagtatcaacaccaaacttccaatcagcatagtaaggaaaagaaggagaagagctgcgagctagatttgagcagtcggaggaggattggtgagactttggggagacagatgaaacagtctccatgccgggaaagacctcgtgattgagatcggagccgccaggaaccgacgtagaggaacgaacagaagcagaggcaggatcggcgagaccaccgcctcgccattggaggataaaggcgagacaagcaagggaaactggaagtagagtaaggagaaggaggagcctagagacgaatgaatggttttgggaagaagatgaagatgaggaagaagcagatattagtggagctctgtgatggtgagtcgatttcatggttagctccaccactttgaaaaacaaaaaaaagtttcggaggaagaagacgaagaagaagaagaaagacgcgattctgagatctttctttttattttattttcgtgttttggtcgtctgagatctcatcggtaaaattaaactttactaactaaatctaattgattatcaattcatctcattttattatgtataaaaattgggagattttcttccattttttttcttaatctttctcaactggatttgaattgatagattggaaacatgtaccaacacaaagaacagaagcaattacacagggagaaacaaatctccacacactaagccactataagctaataacaacaataacctatacaaaacaacagagccatataacaaaaaaaaaaccaattcaaccaggggaaatgactctttcatcacagaaaactgaatggaaccaagacggatgacttgatgcaacatacaattgcaacctgcaatcatcagtgatactctatgacataatattccttcttcttttggatcagattaattaagttttgtttctaattattaagtcatgacacttcttccattcttaattattaagttttttttttcttgtatcaaatctttaattattaagttttttaaaaaaaattattaaaagtcatgacacttcttccattcttaattattaagtttttttcttggatcaaatcttaattattaagtcatttattgttgtttcacctaaggtaccttcatttaaaagcaccaattaaaatatttcacgtgtcgtctcattagaaattcggatgcttagagcccagtaaggaccgatatgggccggacctggttataaatgtaagactctaattggatcgctgttcgtcattacttacccatatatatttgttattcttcttttctcaattttctttctctttccatcacctttctcgttcacttgcttcagatctggcagcgatttcatttcttctccagtctttctctcgtctcggttctatctcctggccattggcggtcaggacttctcagccgtatatttgattccgtccccggatttactcttgctgtgatctgaggtcaaacatg

SEQ ID NO: 10233 - DNA, 3000 bp, Unknown
  misc_feature (1)..( 3000): cDNA_ID_3032937_gDNA_ID_2213638_Annot_ID_181112 3000 nt of promoter + ATG
ttgcaactaagaaacaacatggcgacacttgtaagcaccgttgctagttgctgctacatcaatgcagaagattaaggaactaattgacctttcatatttcccttttaaaatgtttttctgtttgattgggctttaaggtgaataacgggcctcgagtgtggacatttatgcccattttctttcacaaaaacgacacgctaactactcgttagaacacgaaacgccacgtcgtcctaatgtgctgatacaatttttatctcgtttttatttgcacagagagagatttcagtgacgtcacatcttttccttttggtgttcttctcgtcgccatggacgatctctctctagagaaaatcgagatttcgggtccaacattggcgtcactgattcaacgagcttcatcttctcccagtgacgtcgatggcttgatcttcggccaaatccaccgaatcgtctcttctaatctatccgacgattctccggcggatatcgcctcgagttcctcctcatctgatcaaattgtcgccaccgttacaagctttatctgctctggtaaaactgtctccttctacgatccgcttggccgagttgactcgcgtcgaatcgattccctccgagtcgactcaccggaccacctaattgggtggttctccgcccgcaggaaaaccgctaaccgtccatcaatgagagagttagccgtcacgtcgtctctctcgtctcaatttcacttaccaatcgaggatttgcaaaaccctagatcgatgaacatggcttcatccgtgttctttcttcttactatgccattgacggatcagtgcattcacacgcacgagtaccgtgcgtaccagttccgatcctcgaaacaacggctcgaacctagatccgttggtatagtcaacattggaccagcgtttcgaggccattacggttcgtttagtccgaaatcgggatttccaccgttgatctgcgagttgagtagctcagccatgagcgtggattgcgatgagagttccttgagtgcgaagaaacaatcagcgaaagatcagaaggagatcgatgcgttagcagaggggtttcaagttggagagttgaaacgtttggttggagctgaagctgcgaattacacaggcgggattgaagaaatgtatgagagaatgctggcgaagatcgagagcttggcttctgatgttgagaagagctcggctagggtatttcaacaggtacaaaaccatcttcaaaattcgatgttattgctattcaagaattaaagtggttttgttgttcatgttattgattgttgtctagcaaaatgttactgaattgtaccaatacaacatcttcaatggttcttccaggaaaagcataataggaagttgagaaaccgagtagccagaatcgggagatgaggcttcttttgaatttctttaaggttttttatcgagtctatatacttggaattcaatccaagagaacactggctagtagtggctagcgcaatcggaactatatgcgggaaacgatttgtattatagtttagcgatttcctagttaaacctttcctggctagattgatttgtcacaagagatcccttttccttgtatggctagtttttgtttgaagagaaacaatcaagaatgggattgattcatgtcaagagtttctataattgggcgtataatatatgtttatgaagtttaatactaagctaattagttgcatacatattgataccaattaccaaatggtagagcagaaataccccgacatgactagagataggaaaaatgatatcaccagaagaatgaatacctttgagaaaattgatatatgatattgaagttctgatcaacagtcattataatttgtatagacgtttaactttgtaaggactttggaattgattaagatgggaacttttattgtcgacatgaatggtatgacactgaggcagaatgttcaaggagggtaaatgttactataaataccatgtgaatgtgtatagtatagtaacattattcaattgatctcgaattttattgacttaatttttgattcaagagttgtaaaagttggatacagcccgttggaatgatttaataatacaagctacagaatttggaatcaaaccgaatacatgtttcttctgaatcaggtttttggttaaggatcggctaaaccgaacaaaattgggaccacggctcaaattacttgatggaaaccaaccaaaacggtttctcaacgatcaatttcacaccacagctcttagtactcgaagatgctccttcatatttgtgctatcttaactacttgtaacaacaaaacgtaccaaccgcacacttcattaatctctttatctagagcgtcaatgcactatgagcagcgatacaactcaatatccatcgcctaaaaattgtcattatttttccttttgtcgacgttgatattgacatatatattactacacacatgggttaaacactatccaaatatatgtagatgagaactgaaatcctttttatttgtcaaagcagttttaaaactttgaattttataatcaggcattaaatcatacactactgaattaaacagcatttcaaaccagtaagaaattaaatactatccaaattcctatcttaatctattagtctttttcttttctttaacaactcttctcattgtagttggtatcagtgtttaatttagtaggccttttttattgattaagagatgaatttggatagttaaagaagaaaaaatgtaattaaaaagaaataatattgttagatacaatgcagttgaatccggagggttggatcttaattggctgaaggtaaacattaaattcttccacaactaactaacagtaacactcgtgtcctagcaatcactcttcctcaactaccaatctcaaactctttccatctataaataacctctctattttctaaccctaaccataacacaaatacaccaaaaaaaaaaaaacagaaagtaacatg

SEQ ID NO: 10234 - DNA, 3000 bp, Unknown
  misc_feature (1)..( 3000): cDNA_ID_2704717_gDNA_ID_2213638_Annot_ID_181111 3000 nt of promoter + ATG
atttttcaataaaatttgtagaaatagtgaatatttatgatttctcaccagtaatataataattagtcaaacgtgaaaatcattttctttatgtggcttgttcaatagatcatccaaagtaagccgacccctgttcaaaccattaattgtatattccaacaaaactcaaaaagtctacacataaggagaaaagtatacgacctataccagaacattattaaattgcgtaatcaacaaaaacagcataggaaacgtgcatactagtgttcaaaactattttcaagttattcaatctttgtagatttttttatttcaaaaacttttgcaattcaactgcctatagtatatagaaactatcccgtttaaatgataagtaactttcagatgatatgatttggaaaaccgaagcttagatatatatttcactaattataatgcatatgacactaggtacatattacaaaagcaaacgaatgtatccacaactaatatccgtcgaaaagtctaattacataaaagaaatgatgatgtaaactttggttggtcaagcccaaagcagagtccaacaatgccgagaaaaagcagcaaaggttgagaggatgctccgccaaaataggaagaaaagaaagaaggaataaaaatacacttttaggaaagaactatgagtttgaatagagttaagtcaagtgaaaagataaaactaaaactcggatatatattaacctaaagtttctctgtagcattatttgtgaatacatgattagtaatcaaaatttcaatatactatcaaattgtgaaatttccattttataatcaaatactactccgagaaaaaaatgaaaataacacatgatgatgatgtaatattcgggaagtagagaagagaagtgagaaagaatggagattggttcgagtggggaccccacgtgtcctctgttgtctgaatttagagtttagtcgcacgcgtgcatggcgcgtgtgcttaacctttttctaaaatttttaacttattttaaaaatcttccaaagaacgatgtcagggggtcccacattagcgaagacgtgaccggatatgaaccgttgattagagggcaatgcgatctaaataagcggctaagatatcgagtcaacaaccaatctaattagtcattttgacccaagaaaagaaaacaaaacaaaaaacccaattagattaggattagtagatagatagatacggcctatttttattgaacaacaaaacaactaattataaataaaaaggacaaaactagttttccaagtttgactgagatgtcgcttttctcgaggccctctttactggaaatctaggctttctcctgaattttacaatttttcctaccttatcgtttttataaaaaaatattaattttaaattgaaaatttcgtatgaagtaatatattttctcaattcataaatgatccaagttgttgttattttcttagtatttgtaattatagcttatatgtatattttaaaattaaatataaaatttacgattatcaatcgttcgataaaaaatttgatcgttcataatattttgaaaaatagtttagaattaaattaaataaataaaataaaattattatagattttaaaaatatacactgataacattaatataaatcactaatcgacaaatacaatcgtataatttaaatcgttattaatatattggttagattaaaaatggtaatatgtatttttacatgataattgtgaaatttttatttacaaacaaagaaaaatctccaataataaaatgatattggaacatgttacacattaatacattttgagattttctcttgagccgtcgtcccctttattttatgagtttgtgacgaggttgtagagagaagaaaacaaaagtagagggggcgaaagaagaataaaaagcaaagtagagaaaattccaaactaaaagttagctgaaagaattgaattaagattgagagactgggagagagagtttaagtaatactaataattaatacatctttggatatctgttttgctttgaactttgaccactgcctcttttgggtcccacccttctctctcttctctctctaaaatctctcactttcctaaacagagagaccccttatgagttttctcctcctcctcctcctcttccttcctcatcccagaaatttccgatttcactttcacatctccctctctcttacaactctctatccgtagtttcagtttcgtcctagaatttcttttcttgtctgttccaggtttgaactaattacttctctcttatgtctgcttttgattttttctagatcgaattcgtgtttttgttttttcttaccttttttttttttgtgaattttcgcaggaatagattttgatctatcctaagattttgtttaaatgacaactctgatttcaccaattagctcagttcaaaagtgaaatttgaatattttgaaattgaaaatatctatctctaatgataatgcgatttacaaaaaaaaaaaaaaaaaaaaaaaatcatggatgtattttcctggatttattattgtcgttgtctcttgtctttaccgaatttaatctaaatggatgtcttcattaaacaaatcgaaagcgtttctaactttacagtttttcgttgtttcactgttatagaattagggtttatgtaactgtcctttacttgcttcaacttctcaaattaaacttcttttttgaaccacgagatctgtcaaaatgagattttatccacttctactgaaaattaagtttgaattgaacaatttctttagccattgatctaaacacatgcaaataaacggatctgggttttctaaaaatcacttttttctgtatgtagttgtttctgttgctaaaaaaattgtgttttgaatcatttttcagatgaaattgtgagttctccgagttatatgcatccgttagaatcaaagcggtaatcaaaagcagaatttagaggattgaaaaagatg

SEQ ID NO: 10235 - DNA, 3000 bp, Unknown
  misc_feature (1)..( 3000): cDNA_ID_3032939_gDNA_ID_2213638_Annot_ID_181108 3000 nt of promoter + ATG
ggaattggtactctaaaaaatcagataaaagcgtatgtaaaccggataattgaattgaaccgaattacggttcggttttgttgttggtgtgataaaggttcgattgagccgtaaaaccttccgtcctcctcgagtcctttccatcaggaccttatccacagtccacacacagcgagactctatttactcgccggcggaagaacaaaatggcgggaagagcgattttctctgtatcttgttcatctactccttccttgtgtatcccttattcaactgcttcgttttcatcgatgaatcgactggcgctccccgccgtccggatttctccccgaaccaacagatttcccagttaatatctctattcgcttctttaaattcgatgcatgcattgattttgaaatttatattcagacacgtttgatttttgcagggattcactgctctatgtctgctaacgacatcaaagcgggaaccaatatcgaagtcgatggtgctccttggcgtgttcttggtattcttcttcctcaattcctcttagtttatgttattatctatacttggaacttggaaggtttctgaatttgtagatactattactagttcatgacgatttaagcattgttttggttataatgcttccacttagctacttactagtctactgagggttttttcttgctttgttggagcagagtttcttcatgttaaaccaggaaaaggtgcggcatttgtgagaactaagatcaggaactatgtgaatggtagcacagtcgagagaacatttcgtgctggaatttctgtaaaaatcatctctttttctcttatatcttaatctgatgaatgattttttagttgcaccattttgattatgaccattctatgttacaggttgaggaagctaatatatataaagaaaccaaacaattcacatacaaagatgggtctcagtttgttttcatggatttggtatgtcacattggatccttacttctcttcttcgctagtatggtagtagtagcttaaagtttgtgtactaatgattacgttttctcttggttatcaaatctttttttttatatagaccacatacgaagaaacacgtcttaacgaatctgatatgggtgagaagacgaaatggttgaaagaaggaatggattgcattttgctctattggaaagacaaggtacactcactttcagcttctctgtaaaaatagttaatagttcacgtaattaagcggtgatgccaactttgtttctctctggatctttgcaaggttatcgatttcgatctaccgattacagttaagctaaaagtggttgacgttgatcctggccttcgcggtgatactgtgcaaggtaacaatgttgcaccaatctattgttgagagatctcttctcatgttttggtttaaacaagcttaaactgaccaagtggggtgatgaatttcgtaggtggatcaaaaccggcgacaatggaaacgggtgcaatagttgctgtaccactctttattaacgtcggtgaagagatatttgtggacacaagaactggtgcatacatgaaccgagcgtgatccgggtctactacacctagttaattgggtcgttaacaacaaggcaatgatacatcttttttgtatatgagaatgttcgaatccggggacacatgtttgtttttctgaacatcgagagacaatttttcgattaaataaatttatatatatttaagtttgattaaaatcagcaaattcatacaagaactaacataatttggtcaatcctaatgcttttcgtaactgtttaaaagcatgaaattttttatgatagaaaggttaagaatgaatgaggaacatcgagctagagagattcaatggaataagagattaatggcttctaaaatctctggatacgcaaaatactctctcagtctctcacaaattgatgtattttgtgaatctaatggctggtaaaatttcctcattgtggatttcaaatccacataatccggaaaaaaaagatatgatctaaaaaacaacaaaaagtcaggaagaatgggcttggtgaaaggcggcccactaaaataaataaagaattagtggacaaaaaaacctccgccgcatatttaacaactggtcaacgttctcccaataagatacggccacgtgtatgaacccctggatctgcgatgctgctcttaaattctcctctcgtcctcatttccatcttcgtctcctccctcagccatcccctctggtaatcaattctccctctctatctatgtttgtttgaattctctctcgcatagttaagattccttttttcgtattctagatccatagaatttatccaaaattcatgaattgtttctaagacacgaaacggtttaagttcaggtcatagtttttctgtagatctcgatttacgtgaaattttacttaccaatagatctgaattatcgaaattgcagttccttttcctcgagtgtctcgttcggcttcatgtcctgtggaatttttaatctttgtccgattctgaatccggaaattgttagggatttgggttttattcaagatttgtcatcgctgtgaaagttttccctttttttatgtgggttcgaagttttctgaaaatctcaattagtaaaaggatcactggacttgcttatattaattctacaccgtctcttcatagatttggtcaatcctgtatctcagatcttatttgttcatgtgatagcctttaaatgtgtgaacttttcatgtacttgcagagcttataaaaccttcatggcatttgcgcacttctgcagcatccactgtttccttaaaatcgggaaacaacaagagcttcttctccttgttattggattgccttttgccagcctttgttttagtcagttttctcctcattaacttctgtcggtacagaatctctctccaggctggtgaactcttgcagctttctcagtgattctgtatcgatttttcccgtgtaaattatg

SEQ ID NO: 10236 - DNA, 3000 bp, Unknown
  misc_feature (1)..( 3000): cDNA_ID_2714169_gDNA_ID_2213638_Annot_ID_181105 3000 nt of promoter + ATG
attgtctgcaacatcaggacccactatttcaggtggacgtgctgcatcaaatggtcgtactggaccttcattgtctaggccaagctctcctggacctagagttagaaacaccccgcaacagccaattgtgctagcagacttccctcttgatacaccacctaatctgagaacatctctcccggacagaccaatatcagctggcaggtccaggccagttggtggtagcagcatggctaaggcaagtccagaacccaaaggtcccatcacaagaaggaattcatctcctattgtgacgagaggaagactcactgagacccaaggaaaaggccgttttggtggtaatgggcagcatctcacagatgcaccagagccccgaaggatttcaaacgtttctgacataacttcacggagaaccgtgaagacctcgacaactgtcacggacaataacaacgggcttgggaggtcattctcaaaaagttcactcgatatggccattagacacatggtacatatgtctcttctcactaaatgcaagtagctttataccatgcaatgaatatctcaacattttttatggtgtgtgtaggacataagaaatggaaagactaatggttgcgcactatcaaccacaacgctattccctcagagcatcagaccagcctcatccaagatccagccaatccgttcagggaataatcattcggattctatcagcagcaatggcacagagaacgggaatgaagcaaacgagggtagaagactgatggggaagttgagtgacatggacatgtatgagagctcaaggtatgatgcattgttgctgaaagaggacgtcaaaaacacaaactggttacatagcatcgatgaccggtcgtcagatcacggactcatgtttgacaatggaggattcgagctacttccagagccatttgccccactataacacacacacacacacaccccacaagtaaacacctttttttctttctaaaatcacttctcttttttttttttttttttttttaaattttatcttacacaatttgtttgcttgtcgatggtggaaagatataaggctcaagtggttcttggttctttggttattgattcttgattcatggctattgagtgaggtttgtaactttgtagttataatatttgaagagatggtaacgtataagagggtacctcatgttcactcttgttggaaacgatcatgaacgaaaaaacaattagaatgtgaaaagaggaaagagagggtcacacgactcacgcgcctaacgtgaatcaatgacagagctaaagttaataatgggtgacaacgaagcacacaaccaacaacaggccagtgtagttctgataaaagaaaaaaattaattccagaaattgactttcattaatgtcatatttgagatttaagaagttttaaatttttgttatttattttctcttttatgttaccccaaaataaataaataccctcattaatgtcacataccaaactcctcctcttcagggggtccatatttaagaaagataccctcttacccgaattaaaaatatcaaataaagtaagctcaatttgcaacatataataatttgttgaatattccccactcttgttgttttccttgcccattttttgatcttgaaatacttttatcttcttattgtttaacgaatatcacaatcatccattttcatttatacattgcatattttcaaaaaagaagccatatatttatttaatcaactggtgacccattcaatagaacattacgatgcttttaaaagaataaggaaattaaatgttgggaattcagtaaatgccgtttattaaaagctcttatgtataaattcatttagaataaaaacaaagagaaattaacaaaaggacaaatatttaattgagcttagcaataaaaaaaaaatctaaaaaattcggaagagagtcaaagggggacttaaagccaaagagagcaaagcaaatcggagtacagagaagaagaagagagattggaatctgaaactgtaacatcgagatttacgtttctccgtcggcgtcacgccgaagcttccatactccagaaaccccaaaacgcttatttctcaaaaatctccactctctctcttctgaatcttcaatcacttggggttgtgtcactgaatctgcatcaatggcgattccagattcctcactcttttctgcttttgactttagctctagcttcttcttcacgaaatgccgttgttgttaaaaagtgatttctccactatcccatttcctttggcatttattctccactctctctcacttgtcttcttcttcttctacgatcagctcaccaatgtcctgaaccattctcctctgaatcaacctctaaggtctctctcactttcgatctctgttttccctcttgttttggggtttattagcttcgttgtttattcctttaaaagatttcttctttctcaatttcaattactccgtttagcttagctggagaaaccctagtttgtagattgcagatctgggttaatcaagtatctgtgcacacatttatgtctaaaattagttactttcgtaattggatttgttttttttgtgaagatttattatttgaagtcaaacagatttcagctgattgaatcaatgtgtgcatatagcttccataatttcatattttgatttgagaatcgagtaatgttgctttggactttatcatcagcattcccactttggtttgagaaattacgctattgtatctttgtcattattaaggaagcttttcgttgtgttgatgatctttttactcatgatacctgtgatgtgtaggtgtcattcttggctactttatccatagatacatttctcatattgagtttagcttttatgtggctataaatcattacatgatgtgttttgtgttctcttgcagttgctgttgaatgagaaagctttgatgtgagcgagcctgagagtgtaacaaaggactgatg

SEQ ID NO: 10237 - DNA, 3000 bp, Unknown
  misc_feature (1)..( 3000): cDNA_ID_2714169_gDNA_ID_2213638_Annot_ID_132200 3000 nt of promoter + ATG
ctcattgtctgcaacatcaggacccactatttcaggtggacgtgctgcatcaaatggtcgtactggaccttcattgtctaggccaagctctcctggacctagagttagaaacaccccgcaacagccaattgtgctagcagacttccctcttgatacaccacctaatctgagaacatctctcccggacagaccaatatcagctggcaggtccaggccagttggtggtagcagcatggctaaggcaagtccagaacccaaaggtcccatcacaagaaggaattcatctcctattgtgacgagaggaagactcactgagacccaaggaaaaggccgttttggtggtaatgggcagcatctcacagatgcaccagagccccgaaggatttcaaacgtttctgacataacttcacggagaaccgtgaagacctcgacaactgtcacggacaataacaacgggcttgggaggtcattctcaaaaagttcactcgatatggccattagacacatggtacatatgtctcttctcactaaatgcaagtagctttataccatgcaatgaatatctcaacattttttatggtgtgtgtaggacataagaaatggaaagactaatggttgcgcactatcaaccacaacgctattccctcagagcatcagaccagcctcatccaagatccagccaatccgttcagggaataatcattcggattctatcagcagcaatggcacagagaacgggaatgaagcaaacgagggtagaagactgatggggaagttgagtgacatggacatgtatgagagctcaaggtatgatgcattgttgctgaaagaggacgtcaaaaacacaaactggttacatagcatcgatgaccggtcgtcagatcacggactcatgtttgacaatggaggattcgagctacttccagagccatttgccccactataacacacacacacacacaccccacaagtaaacacctttttttctttctaaaatcacttctcttttttttttttttttttttttaaattttatcttacacaatttgtttgcttgtcgatggtggaaagatataaggctcaagtggttcttggttctttggttattgattcttgattcatggctattgagtgaggtttgtaactttgtagttataatatttgaagagatggtaacgtataagagggtacctcatgttcactcttgttggaaacgatcatgaacgaaaaaacaattagaatgtgaaaagaggaaagagagggtcacacgactcacgcgcctaacgtgaatcaatgacagagctaaagttaataatgggtgacaacgaagcacacaaccaacaacaggccagtgtagttctgataaaagaaaaaaattaattccagaaattgactttcattaatgtcatatttgagatttaagaagttttaaatttttgttatttattttctcttttatgttaccccaaaataaataaataccctcattaatgtcacataccaaactcctcctcttcagggggtccatatttaagaaagataccctcttacccgaattaaaaatatcaaataaagtaagctcaatttgcaacatataataatttgttgaatattccccactcttgttgttttccttgcccattttttgatcttgaaatacttttatcttcttattgtttaacgaatatcacaatcatccattttcatttatacattgcatattttcaaaaaagaagccatatatttatttaatcaactggtgacccattcaatagaacattacgatgcttttaaaagaataaggaaattaaatgttgggaattcagtaaatgccgtttattaaaagctcttatgtataaattcatttagaataaaaacaaagagaaattaacaaaaggacaaatatttaattgagcttagcaataaaaaaaaaatctaaaaaattcggaagagagtcaaagggggacttaaagccaaagagagcaaagcaaatcggagtacagagaagaagaagagagattggaatctgaaactgtaacatcgagatttacgtttctccgtcggcgtcacgccgaagcttccatactccagaaaccccaaaacgcttatttctcaaaaatctccactctctctcttctgaatcttcaatcacttggggttgtgtcactgaatctgcatcaatggcgattccagattcctcactcttttctgcttttgactttagctctagcttcttcttcacgaaatgccgttgttgttaaaaagtgatttctccactatcccatttcctttggcatttattctccactctctctcacttgtcttcttcttcttctacgatcagctcaccaatgtcctgaaccattctcctctgaatcaacctctaaggtctctctcactttcgatctctgttttccctcttgttttggggtttattagcttcgttgtttattcctttaaaagatttcttctttctcaatttcaattactccgtttagcttagctggagaaaccctagtttgtagattgcagatctgggttaatcaagtatctgtgcacacatttatgtctaaaattagttactttcgtaattggatttgttttttttgtgaagatttattatttgaagtcaaacagatttcagctgattgaatcaatgtgtgcatatagcttccataatttcatattttgatttgagaatcgagtaatgttgctttggactttatcatcagcattcccactttggtttgagaaattacgctattgtatctttgtcattattaaggaagcttttcgttgtgttgatgatctttttactcatgatacctgtgatgtgtaggtgtcattcttggctactttatccatagatacatttctcatattgagtttagcttttatgtggctataaatcattacatgatgtgttttgtgttctcttgcagttgctgttgaatgagaaagctttgatgtgagcgagcctgagagtgtaacaaaggactg

SEQ ID NO: 10238 - DNA, 3000 bp, Unknown
  misc_feature (1)..( 3000): cDNA_ID_2994588_gDNA_ID_2213638_Annot_ID_132201 3000 nt of promoter + ATG
atgtggctataaatcattacatgatgtgttttgtgttctcttgcagttgctgttgaatgagaaagctttgatgtgagcgagcctgagagtgtaacaaaggactgatgatgaagattattgcggcgtttctcttcctcttggtcacgacttttgtttcccgttgtttgtctgcagacatagaatcggacaagcaagcactgcttgagtttgcatctcttgttcctcacagtcgcaaactcaactggaactccactattccaatctgtgcctcttggactggtatcacctgctccaagaacaacgcccgtgtaaccgcactccgtttgcctggatctggactttatggacctttaccagagaaaacatttgagaagcttgatgccctcaggatcattagccttagatccaaccaccttcaagggaacattccatctgtcattctttcacttccttttatccgatcactatactttcatgaaaacaacttttctggtactatccctcccgtcctttctcatcgcctcgttaatcttgatctctccgccaactcgctctcgggaaacattcccacgagtctacaaaaccttacccagctcactgatctcagcctgcaaaacaattctcttagtggtccaattcctaacctccctcctcgccttaaatacttgaatttgagcttcaataaccttaacgggtcagttccatcttctgtcaagtccttcccagcatcctcatttcaaggtaatagccttctatgcggtgctcctctgactccatgcccagaaaacaccactgcaccatctccttcaccgacaacaccaacagaaggtcctggtacaaccaatataggtcgtggtaccgccaaaaaagttctctccactggtgctattgtgggcattgcagttggaggttcggttctgttgtttatcattcttgccatcataaccctttgctgtgccaagaaaagagatggcgggcaagatagcaccgcagtgccaaaagctaaacccgggaggagtgacaacaaggctgaggagtttgggagtggggtgcaagaggcggagaagaacaagctggtcttctttgaaggaagttcatataactttgatcttgaggacttgctcagagcctcggctgaagttttagggaaaggaagctatggcacaacgtataaggccatcttagaggaaggaaccacggtggtggtgaagagactgaaagaagtagcagctgggaaacgggagttcgagcagcagatggaagccgtgggaaggatcagtccacacgtgaatgtagctcctctccgtgcctattacttttcaaaagacgagaagctactcgtgtatgattactaccaagggggcaatttctccatgctgcttcatggtaatatgatgttttacatgttactcaaggttataaaaagtggctttaaagtaacactttagatgaattctatgcaggaaacaatgagggaggaagagcagcgttggactgggaaacaaggttaaggatctgtttggaagctgcgaggggaatttctcacatccattctgcatctggtgctaaactcctccatggaaacatcaaatcaccaaatgtcctcttaacccaagaacttcatgtctgtgtctctgatttcggtatagctccattgatgagccatcacaccttgatcccatcaagaagcttaggttacagagcacccgaggccatagaaacacggaaacatacccagaagtccgacgtatacagctttggtgtactgttgctagaaatgctgactgggaaagcagcagggaagactactgggcatgaagaagtggtggatctgccaaagtgggtgcaatcagtggtgagagaggagtggactggagaagtgtttgacgtagagctgatcaagcagcaacacaacgtagaggaagaaatggtgcagatgttgcagatagcaatggcatgtgtgtctaagcatccagattctaggccttcaatggaggaagtggttaacatgatggaggagattcgaccttcagggtccggtcctggttctggtaacagagcctcctcgccggagatgatcagaagctctgatagcccggtttagattggttttaaattctctttctctcattctcaaatcattatttatttttgcttttccttcttcttcttcttcataaaccgtttattttagttctctatgtctgactgcataatttattccaatcaatatctggaattgtagtgtaattgaaaccctcaccatgaatggttgtagttcttagattggttataagtgtgcgactagttttgaattttcatttgttgttgtatgattcgtttaaattaaatcacaagagtctttgggtgtttgaaaatctaactgaaatagtgatacaattatatgtgaaatttatcgtctcaaaaagataaactacatgagtaaataaataaaaataaaatcattgctctgtattttttgactgcatgagtcctaattggtgaaataaaaaaacttttggcacgagaattaataaatatatagaaaaggtgaaataggtgaggcggtacttgctgatagaatcagaagcttcgagactgacttgttttagattctctgactataaagaaaggcaaagtaacaagtttcgttttctcctttgcactccatttttattctcgattctcttctctcccgataaagaagctctcgctttgtgttgtccgtccttcttccaggtctaattccaccatttctctttggttaaaccctaatttctttctctcccgaatcgtcctctgtttttgttttgcgcgattagtttccaccgcttaataatagggtttccgatcacttacgttttgtgttgttttgttcggtctctggttcttccactgtgatctgttttgttcttaagttgattgtcttaagttatatcctctgttcaataatattctggtcttgttgggggtttccacaggttttctcgtctctgacgc

SEQ ID NO: 10239 - DNA, 3000 bp, Unknown
  misc_feature (1)..( 3000): cDNA_ID_2704725_gDNA_ID_2213638_Annot_ID_132204 3000 nt of promoter + ATG
gctttctcagtgattctgtatcgatttttcccgtgtaaattatggtttcctctcagcgtcctgtccccaacaaaatccagaaacagcaatatctatccatcagcccttcaaattctgtcttgaaagatgatgttgaacttgagttctctgatgtgtttggtccactccccgaagaggccaatgatattgcttacgacgagcctgctgttgtctacagtcgatcccactccttggttggcccgtgttcgctcgatagtcattctttgaagctgaccaagctcaccttactagagactgaggactcaattgacttggtggagtgtctcgaaggtgaatctttaaaagaaaatgatgatttctctggtaatgacgacagtgacaatgagaaagctttagagggagatctggtgaaagtctcaggtgtagtaggcatagatgattttgaggttatgaaggttgttgggaaaggtgcgtttgggaaagtctaccaggtgaggaaaaaggagacctctgagatatacgctatgaaagtcatgaggaaagatcacattatggagaagaaccatgctgaatacatgaaagctgagcgcgatattcttacaaaaattgatcacccattcattgttcaacttaaatactcttttcaggtatatataacacttctctctgttagcatcctatttattttactttactatttcttaacttagagcgttatacattcccttgcagaccaagtacaggctgtatcttgtgctcgactttataaacggaggtcatcttttcttccaactctatcaccaagggcttttcaggtttgtttaattcctttttgcgaaccatttttgaagtttcgctagaattttgtaaagcttaattggttctatattttactctttcgcagagaggacttggctcgagtgtacactgcagaaatcgtctctgcagtttcccatctccatgagaaaggcataatgcacagagatctgaaacccgaaaacatactcatggatacagatggccacgtgatgctaacagattttggtttagcaaaggaatttgaagaaaacacaagatcaaactccatgtgcggaactacggagtatatggcacctgaaattgttcgaggaaaaggacatgataaagcagctgactggtggagcgtagggattcttctgtatgagatgctcacaggaaaggtaaaagccgctatctattgttaatttgcttgaagcctcatgtcttggtatattgttgtgtgatgtcttgttttccttctgcagccaccgtttctcgggagcaaaggaaagatacagcagaaaattgtgaaggacaagatcaagcttccgcagtttctgtctaatgaagctcatgcaatactgaaaggggtaagtaaatgttggtgcagtttgattacagaatcaacagtaaacatgaaaatctttgtgcagttaagaactatgaagcattgtatttagaacaattctgactcttgactttgtaatgaatgtatagctgctgcaaaaagagccagaaaggcgacttggaagtggactgagcggagcagaggagataaaacagcacaaatggttcaagggaataaactggaagaagctggaggctagagaagtgatgccaagtttcaagccggaagtatcgggaaggcaatgcatagcaaattttgacaagtgttggactgacatgtctgttttggattctccggcgagcagtcccagttcggatcctaaggccaacccttttaccaatttcacttacgtcaggcctcctccttcattccttcaccagtccacaactactttgtagatttactatatttttatgtagttcctacttctttggttgttgtttccttctgacacatgaacattaaagaaaactttggttaccaagacgcttaatttataattgattttatgagattgttattgattgagattaagtagagcagctaacactttgaccttttgacccacgatgtaatataaaagaacgttgaaaacgtgtaaatataaaagatgataacggtgatgcctttggaccgaactagtgtccgtctgaacgtcttgtaatgtaatgggcttaaagaattccggcccactaaaacaaagaagaagttcggtttcccaatagaacacgaacacgtgtcctcaccccatgatccacgatgcttcggaagacataaaaaatgtagccacgcgccttcttaaaaccttttccttttttggtttggcacattaccctctttcctgttaaagttgtctcgtctccttctcgtctccttcctcaagcatattctctggtaattcctctctctctgtctctctttgacttttctctcgcagagtttagattctttttttttctggatataaattatttacacgacacgaaaccttctaggtccaggtcatagttttactctatatctggatttgtttgaaaattgcttgtgttatgcgccagctttttccctaatatatagactaggtcttaattacagatattagagttcgtttcctcgagggtttctttcgacctcgtgtcctggtgaaattttggaattctaaggctttggggttttatttgggaggggatgatcatctaaaggatattcggtcggtgtcgtgttttcttaatctcaattctgttgactttagctttggtaattgaaaaagaatcttttcgcttgcttattttaattccatatccgtctcttattatatttggtcaattatgtgatctgatctttgtgaaattttatgaactgcagcgcttaaagtactttgatggcattgggacacttgtgcagcatccactgtttccttaaaatagggaaacaagaagagcttcttgtcctagatattggtttgcctattcccagtttcttcctcattaactttattggtagcagagcctcatccatctggtgaacttgtgaagcttcctctgtgattcttttggcgattggttagaaatatg

SEQ ID NO: 10240 - DNA, 3000 bp, Unknown; identical to SEQ ID NO: 10234
  misc_feature (1)..( 3000): cDNA_ID_2704717_gDNA_ID_2213638_Annot_ID_132208 3000 nt of promoter + ATG

SEQ ID NO: 10241 - DNA, 3000 bp, Unknown; identical to SEQ ID NO: 10233
  misc_feature (1)..( 3000): cDNA_ID_3593504_gDNA_ID_2213638_Annot_ID_132209 3000 nt of promoter + ATG

SEQ ID NO: 10242 - DNA, 3000 bp, Unknown
  misc_feature (1)..( 3000): cDNA_ID_2715298_gDNA_ID_2213639_Annot_ID_132216 3000 nt of promoter + ATG
catttttttagttttgaccatttccaaccccatactcatgaaaatgtggaatgtttgcataagaataccgcaagctcctcctcccctcctttgaagattccgaccaccacaccaccccacccttgtactacatttcttcctccaacaaccacttctaattcctattcacttagcttcctccttcaatatctcccatgaactttctttttactggagatcctttatgtgcatgtgtagtggtttttcgcaaataatctggtgaggcttcttaatccggttccaatcatctttcagccacttatcttgaaatttccctttctttcttgtgtttgaggtctttaataatttataaacttcgagagcctttgagtaaagttccaacttcaaaaccatgagtgatttatgtagtaaatcctttatctttcgtgaatggtgctaacttaagaaggactctcaagcctttgggctttgtcaatcttcacaacaatatatttttgacttttgagaatttattttacttaacttcttgtagcattatgttatctatccctcttgactcttggtaagaaaaccgtagttaaaaaagaaaaaaatgacaaacacgttcaataaaaagcactgtttgatagggataattatcttatgaaatgggctctgaaaagaaagtatggaacttgtaagatgggcctttaaaggcttatacacgagagacaatggcgacgtcgcgaatctagtggatgatatatagataatgtaacgatagtataagtcaacgaaattgtactataaatagattacaacccccatggagtagtatcacccaagtttctgaaaacagtagagaaacacttatttaagcatacaaagaaaagaaagcaaaaacttccaaaatggcaaagaccctcaattccatctgcttcaccactcttctgctcgttctcttgttcatctcggctggtaatttcggttctactctttctaattaagttgttcatatgcaatgcataaattcatacatattattttgaacgtaactttttcttcttcgatctcaacatatatagtcaaaatttggtgtatatatattaatttgaatgaatgttggatatttctacagagatcccgacggctgaggctaattgtgatacgtatttaggcgaagtcacagtgtattacccatgtagggaaagagactgtgaagcccaatgctatgagcattacccacactcatgtaaaggagagtgtgagcatcatgaccacgtagtgcatcatgacaacgaagaagagcattgccactgctacggtcgttgaaatattttacgaaaaactcgtatccaataacaaataagattgtatctctataatgtaagtgtggtttcgttcctatgtaagggtatgtgtatgtgtatgagttagtttctgttaaaaacagtaggacgaagctaatgacggcttctctctgcttctataataagatcatgttgtatgctttttctttttaataataaaattgttttgtgttttgtctacgtaatttgtctattaaactatttagatcaaaacatacaatcctcgtcttgatggtctccgtacacaatacaatttgataattattcctccatttcttaatgttagatgttttaggaagaaattgttccacagagataaatgttttctattttctatgtaagaaattaaatttatacaaaatcaatattgaaccaatgagctttatatcaggcaggtggttgcataatattttttattaagtatgaaaactgaaaagtgtgaaacaactaagagtttaaaaacaggagtaacaatgttacacctcctgatataaagcttgtttagtgagtagtgacactacatttccaagagtaagattatctttaataatcttctttggcgatatacaatgacactatacttgtttagtgacactacatttctaagtgtgatcttaaaacaacaaaaaaaaacttctaagtttgactattcttttttttttttcctctacgtcaattaccaaaattaaaaaaataatgattgaaactacaaaatgacatacgaaaatgaaagtatcgatgcatcactcattcacttggtttatttttttaactaaagattgaggcaaacatctccgtccaaagatatgccgagcaaaaaactcctattgtgattgtttacactacactcatttaggcatctcttattttccaaatcgaaatttacaaaaaggtcttgtatattgttgtactaattgtgttaaaagtttttaaatattaatctttaggtagtcgagtttatagacgaaacaaaagaggagaaagatttgacttaagaagctctcaaaagatttccaaggataatatgttagaggtgaaatttgagacattgatgaatagtggaccttcaataaaagaatcaagtggccatgtccccgagctacgaagctaaagttatgggatcaagtgacctctatagatttaggaaaatgacctcttttcagaatttaaataaatatcagaaataaaaggttcaagtttactcgttgaattttaaattttttcccccaataaaaagaaaagttgggaccccaactttcttcatttgtctttttaatttggacccatatattcaacccgcctatctatatcttcttacgtaacaataaaagcaaccggattacattgtaagaaccagaaatcaaaccggcgtttaattgaaatcaattgaaccagaaaaggaaaaccgatatcatggaaaccggttgtcaacagaatcacaaggatcggagaagattattgaatcgcaccttaagctggacttgagcctgaaagcccatatgtaagaaaatgaaacggtagcgtttcgtaaaattggcgggaaaatgaattgttattgcgcggaagggctctaaaagttcagcagatttattaatcgtcgtcggaaaaaatcgataattccgttaccggagtggagcactcgtctttgaag

SEQ ID NO: 10243 - DNA, 3000 bp, Unknown
  misc_feature (1)..( 3000): cDNA_ID_2715292_gDNA_ID_2213639_Annot_ID_132218 3000 nt of promoter + ATG
ctttttatcgactttgggttcttgttcaatagactcaaactcttgtcttctttgtttgtatcagaaggatcaaagcaagagaaacaaaatgctcaaaacccctcaaagtcatggccctctctggtaaggcttctcaatgatttcagtgagtgacaggatccaattgtgttttatctgatcttttgtttaacagattgagggagatgagattggaaagaattcaacttacaatcccagaagtgactcgagttgttcaacatccactcccactagtgatgatggacaaggttccaaagctccaagtgttgttgcgaggctcatgggtttagagtctatacctgtaccaaatgccttggagccccggcgtaatcctgattttgatccatacttcctcagatcctcacgcaaggcaagcacatgggatgcatatgagaatttgggttatgtaaatctccgcagtgactatgatggtatttcttgggaccatttggattcaagaatgaacaaggagtgtaaccggcctatcgaccgctttcaaaccgaaacgttacctccaaggtcggctaaaccaatccctgtcacccacaataggctcttgtctcctatccggagtcctgggtttgttcagtccaggaaccctgcttctgtaatggaagaagcttcgagaatgattgaaccaagtcctcgggtagttgctaaaacacggttttcatcatctgattcctcttcatcacttccaatgaaaatcagagatttgaaagagaaactagaagcttcacagaaaggacaaagccctcaaatctcaaatggcacttgcaataataagtgcttcagaggaaagcaagatgaaaagagaactacattaccactcaagacacaagagcgaaataatttattgggagaaagcaggtttggtggttcgaagggtaaagtgaagccgccctctgtatctgcacatgcaaaggccaatactattcacaagcgagacagttcaatgctctcaaatggctacagagaccaaaagaagaaggtggaaactaagaaccgcatagtaaaaagtggtcttaaagaatcttctgctagcactaggaaaaccgttgataagccaaataaccagaaacagaaccaatttgctgaaacgtctgtttcaaatcagagaggcagaaaagtgatgaagaaagtaaacaaagttttggtggaaaacggaactacaactaagaagcctggttttacagcaacatcagcgaaaaagagcacttcttcatctttgtcccgcaaaaagaatctttcccgcagcaaaaaaccggcaaatggggtgcaagaagctggagttaacagtgataaacggatcaaaaagggtgagaaggtgataaaatgtaacatcaccgtcgatggcgggttgaagacaggggacgatgatcgaaagaaggacatggatgtgatttcgttcactttctcatccccgatcaaaggtttatcatcagattcgcaatactttttaaaaaagaatgatcaagatgcagagtcagcactttgtttcaataagatagatagtgattctctaaattttctgttggagaaaaagctcagagaactaacctctaagatggagtcatcttgcagtagtctgacccaagaagaagagtcttcgggttccattacaaaggattgggtgaatgggacaagatcattgccgtcagatgatcaggataacggtttatcagaaagcgaatctgattctgactatagtagttcattctacaaaaagaaaatattccaggttagttagtcatatggcaaattcctttctccgcacaaggatatgtctacttttagtagcttatcaatgttctataattcgctatatatgtttccgtaaggttttctgactccactgacctttgaaaatttcatattttctatgacgcaggcagaagatgatgaggaagttaacagtttcagcactgccgaaaatctccaaatctcctgcagcacgagtttctcaagttcacgcaatgattatcaccataacattgaagaaaccgaactctcagaatctgttgctttatcagaagctgaagaaggtcatgactgggagctcgagtacataacggagatcattgcctctggccaactgatgattaaagaattctccttggggatggctactgatatattacctctgagcttattcgatgaaaccgaaggcaagagagatgctcggggaaagatcgagagaaaaacactgtttgacttggtgaatcagtggttaacactcaaatgcgagcagatgttcatgggaacctgcaaaggagtgttggggaaacaagacatttttcttgaaaggagagagattttggcagaccaagtgttgaaagaggctcagggattgaagaagatgagagagatgatgatggatgagctagttgacaatgacatgagtagttgtgaagggaaatggcttgattacatgagagagacttacgaagaaggaattgagattgaagaagagattgtgtccgaattagttgatgacttaattaatgatcttatcatgtgttgttgacaccaatcctttggtcttcttctctccaacatgagagtgaaattgttttctataggataaaaacaagattaggctgaactaaattctgtcacaggctgaactaaatttttatctctgaaatcgaaaatacttaaaagtcttctgatagcacatgaacataaaagtgtcttatactaaaaataaaaaaagatggggtgttccgagaatcgaactcgggacctcgcgcacccgaagcgcgaatcataccactagaccaaacacccgatttgttaaatcgatagaggtaaacatatttatacggataacatatcaccaccgtctttatagggagagactctagttgtttgttcatcggagacggaagaaaattcgaatcatcagtgtttgtttcctcctctcttaaagcttagcccttctcaggtcattgttcttca

SEQ ID NO: 10244 - DNA, 3000 bp, Unknown
  misc_feature (1)..( 3000): cDNA_ID_2715288_gDNA_ID_2213639_Annot_ID_132219 3000 nt of promoter + ATG
cttctattgacttcattttaatacacaaaatatctctctctctctcaggttaaggagaagactatagctgcaagacggagtcagatcaagacaataatattcccggaagcaaatcggagagactttgaggagcttgcggaaaacatgaaagaagggcttgatgttcacttcgtggatgaatatgagaagatattcgatctagcattcaattatgaccattagaagaaatatgagaagtttctcacttgggatcttcctctattgttgttttcattttatcatcgattcttagttctgtaggctgatcttcttcttctaactctcattacctcaaaatgaaatgttccatcatccgtcgtgtgtaccttcagctaccctccaaatcttcgtaatttacaaaaacacaactgtcttgttactgctaaatatgtacaacattttaaattaaaattggtaaatttcctttttaagggtatcttgaagtaaggttatagcatgatcataagatttctaaaaacaatagttctctctgcagcaacagtttagggaaaggattaagcctaataagctaaaaatcccaaaacgtgtattgcaagttattgatgaagagcttacgaaactggaggtttttaagaccggtaacgactttactatcgctcgcaactaccttgagtggttgaccgtattcccctggggaaattacaggttttgctgatttggttcaaatcatatacactatgctcatgtgcttgaagaagtatcatgaaaattatttgtaaaatttgattaatgttggttgcagtggtgagaattgtgatgtcatgactgcagaaaagattcttgacgaggatcattatggcttatctaatgtgaaagaaagaataatagaacacattgctgttgaaaaacttagaggcactccacaaggttggtctctctatatactgtttcttgattctatatagaaaaatcatgtccttagaattgagttactaatggaagataatttgtcttgcgggtcctcccggggttggtaagactagcattgctcattctattgcgcgtgctcttcaccgtaatttctttcaattctctgttggagggctatctactgctggctaacattaaggtgattaactacgtaattgcgtaatcaatgttgaataaaaaaaatggaataaagaagaagatgttaatctcttgtatttggagaaaaccgtacgaaaagattgtggcattaagcctgaagaggtctaactcgcaaaaccagatatatttacctttcattttctgatgtttgactcaataatttaacataagtgacttcttatgctcagagtgctcttaaactagtacgagaagatacatctgaagtttgaactttgaagtcaaaacaaaatgttaaaattactttcttttttttttctttttttcttcttcttaaattaaatgcataaatcgaccttcattgcttcgttttactaaaggttttgtgaaatcttgaagatgtgacataaaatggagaaaaaacaaggatagaaaagggtccaatgaagattgacatctttagattacttttgttttggtatagatctttcgcttaactttatatcgaaatccatcattagcacaaaatctgataacgatcacaaaagcctcatcacgccatcttaaaatcaatcaaattccaaattctttatcttattttacaatttttaattcgttttgaacgtatatatcaaaaggatagatatcacatatcttgtgtgtggtacggtagcgaatctagagatgcatgaatcatactaacctataagatggaaagagtcacaattatttaatattccataaatggaaagccataagaaaaaggcaatacagaccgtaccctacaaagatttcaggcacacacatgctctatgcttgccacatccatatatgtatttgtacgtaccattgacaaaagagaaaatcacgtgcgaatttcagtgttatatattatctcaaaacaaaaaaatagagtttgtgtgtgtgtgtattaaaaagttgtaccaaccccatcaaagtgtgtgaaatgcctaacaagccaaaagatgtgacaggctgacgttgatggtggagtcgatctttcgctttatttttagacttatgagtggataaccaatcaaaaatgtgtaaataaactattcaatctagtgaagtagtggtcataaatctcacaaggaactaaatagtaagaccatatatacaattatgttgtggtttttgtttctatttgggctgaatgaagcaaaaacaattaaatagcaaaaccattacaagaaaaaggtattgtctcgtttgaattttactagctttctttgatgatacacattagtacattacacacaacacaacacaacacacggtattgatgtttatctgcacctaatggactaattacgtcgtatcacatttcagattttctcacgtcatccgccataagcgaatatttataaaggtgactctagaatgattatacaatcacattaatctaatttataatgattgcatggtcttttgtagtgtaaagtaaacaaaaaaagttggaaatctaggtgatgcacgcgtggtgatggcttggaacaatatactcgaattgagttctttcttaattttaatatgtaagttttaagaacaaataagaaaatgttatttcttttttaaaattatatgactcaattggccacatctattttttttttgttacgatccaataaatagtttgatattataattaaaaatgataataattgaataatatgatgatgtaaattacgtcaaccatttgattatctggactttgacgggcggtaacctaaatacaaatactaaaaaccctaaacaaaattatagttaaaaaaacgtggtatatatattctgttagcgaggcaaatctgaatacgcagtgataaagaaaagcttaagcaacaaaaagaaaatagataagtatttgatatg

SEQ ID NO: 10245 - DNA, 3000 bp, Unknown
  misc_feature (1)..( 3000): cDNA_ID_1022005_gDNA_ID_2213639_Annot_ID_181151 3000 nt of promoter + ATG
cacgaccttggatcagatttacaccaagaacggcttaaatgtgaaacctttagttgtcgagaggttaaaaagagatgagaaagatgaagaggcggtcaatgaagatgaagaaggcgtaaagagagatggtttcgagggtgttaagtgtaatgacgtcgaggaagaggcatggagattgctgagggattcaatagtgacatactgcgattctcctgtaggaacggtggctgctaaagatccaactgatacaacgccatcaaactacgatcaggtctttattagggattttgtaccttcggctttggcttttctcctgaagggagaaagcgaaattgttcgaaacttccttctccacacgttgcagttgcaggtattgatgcccattcgcgatgttatacactgaaacgaacacaaaatgttgtttaaaagcaaagagtttgcatttaaatgaaaggataactaagaattttttttactgcaagttaaacatttaagtaaaatcaaagatatgaaaattagtgttgttgtctgtgttgtggttccagagttgggagaaaacagttgattgttatagtccaggacaagggttaatgcctgcgagtttcaaagtcagaactttaccgcttgaagaggacaagttcgaagaggttctggatccagattttggcgaagcagctataggtcgtgttgctcccgttgattctggtcagtacttttctgcttcttcaatctgcattttccataaatagagtaagaaaagattgtattgttgattcattgtcatacataattgttgattctttcagcttggcaacatataattgaacagtttaattcacacatgctggtctaaatagaaaattttcaggtttatggtggataatcttgttgagggcatacgggaaaatcacaggagattactcgcttcaagagaggatagatgtgcagacagggataaagatgattgcaaacctgtgtttagcagatgggtttgatatgtttcccacactgttggtcactgatggctcttgtatgatagatcgacgtatgggtatccacggtcaccctcttgagatccaagtaactcccaaatataaggttttcttacttataatctttaaaaagaaaagtttgactaacatgccatgacggttctgttggcacaggctttgttctattccgctctacggtcttctcgtgagatgataactgtaaatgatagctccaaaaatataataaagacaattagcaacaggctcagcgcattatcatttcacatcagagaaaactattgggttgacaaaaacaaaatcaatgaaatttaccgttacaagacagaggagtactctatggacgccaccaacaagttcaatatctacccggaacaggtttctccatggctaatggattgggttcctgaaagtcctgactctggattcctgataggaaacctccagcctgctcacatggatttcaggttcttcaccttgggaaacctctggtcaatcatctcctcactaggaacaccaaaacagaaccaagctatattaaatttggttgaagagaaatgggacgatctcgttgggcatatgccgcttaagatatgttacccggctttagaatcttcagagtggcatataataaccgggagtgacccaaagaacacgtgagttttcttctcttccgctttgatactttttgctgaagtagcttacagtgatattttctacatgtatgtgttctgtaggccttggtcttaccacaatggtgggtcatggccaacacttctctggcaagtaagtatgagcttttaatcagacgacacatatatctgtcttccattaattcacatatgtatttaaatttttgttagttcacactagcatgcatcaagatgggtagaccagagttagcagagaaagcagtaaccttggcagagaagaggctccaagctgatcgatggccagagtactacgatacaagagacgggaagttcattggaaaacagtccaggctttaccagacatggacaattgctggtttcttaacttcaaaacagctattgcagaatcctgaaatagcatcatccttgttctgggaagaagatcttgagcttctagagtcttgcgtctgcgttctcaccaaatcaggccggaagaaatgttcacgagccgcagcaaagtctcagattcttatataaattggttttgtccagaaaacagacataggataacaacttcctgttgcaacaaatgtgttatacaggttaaccaaattaatagtgcaacaacatctgtatatatatactatatagtagttcttttctacaaattatgtcatatctctgacttacttccctaaccagatgaaacataactaaaaatcaaatttattattattactaacttgaaaaccaagcaagagtgagtacttagtgctgcacttaatctccctaatgggcatggctaatgataatccaacgagaaataagtttagcaggattcttaaaccatgtcatcagtttcaacagaaatctgcaattaaaacttaaataaactcctcttagagctttgttttcagcgagttggagaaagcttactctcatgagtatttcctcgaacactttgcaagcagattctgccaccattttttttcttaccaaacaactaaaaaggtatttgaaaccataatatactcgtcttcgagatcttcttgtatgcatgaaccgcttcctccgcttcagcaggaaactgaatagcattccacaaaactgaatcccatacaggaattttgacaaacactttgcgagcgtataaaaagttcttattttctcaaaatagtgggttaatgggctaggcccattcataaatctaataattgagagaagtattgatttatttcccacaggaacgacaccgtatcgcatcctcatttaagaaaaacccaaacggccaaatccaggttttggctcagacgaccagaggaagagcaccgacgatg

SEQ ID NO: 10246 - DNA, 3000 bp, Unknown
  misc_feature (1)..( 3000): cDNA_ID_2715284_gDNA_ID_2213639_Annot_ID_132220 3000 nt of promoter + ATG
tgccatttgtttcatgcttatgtcttgaagagagttatatataacagcatttgtaattcatttttttgtgcattgattgacaaatctcatttataatcatattaatttgatttgcagtgatgagaattttaatgtcctacgggcagaaaagattcttgacgaggatcattacggattatctgatgtaaaagaaagaatactagagtttattgctgtgggaggacttagaggcacttcacaaggtcgtatttttgcctttctagttcaatcttctttgctaaaactttttgtcctcatcattttataatttctgaaggtgaaaatttgtcaacagggaagatcatttgtctctctggcccaactggagtaggtaaaactagcattgggcgttcaattgcacgtgctcttgaccgcaagttcttccggttctctgttggaggactatccgatgttgctgagattaaggtatacacatgacaaaactatgattgaaatctgtagaaataataacatatcatcttatacattgtttaggggcatcgtcgaacgtatattggtgccatgcctggaaagatggtgcagtgtctaaagaatgtgggaacagaaaatcctcttgttctgatcgatgagattgataaggtagctagcttgttagtatttgaactggctttttggagtttgtagtcaaaatgaattagtttcgtttctttgttaaagcttgaaattctttgcaataagtgtctatggttccttggcagcttggagttaggggccaccatggcgacccagccagtgcaatgttggagcttttggatccagagcagaatgcaaattttctagaccactatctcgatgttcctattgacttatccaaggttttcattgccattttttcttctctttacatttttcatttgcaattttctttctttgtgatccaccaaattgaaggaaaaccggaagccattgatccgatctgagtattggtttcataataggaagtttgtgttggaacttaggtctaattaaatttcttgcaggttttatttgtatgcacagcaaacgtgacagataccattccgggtcctctgctagacagaatggaggtgatcactctctcagggtacattactgatgagaaaatgcatatcgctagagactatttggagaaaaccgcacgcagagattgtggcattaagcctgaacaggtctcactcacaactatttgctgttttctttattttattacggtttgaatgttataaaagattttgctcaagttgtttgtacctctttccaggttgatgtgagcgatgcagcttttctttccttgatagaacattactgcagagaagcaggagttagaaatctccagaagcagattgagaagatttttcgtaaggtaagtttgtttacaagtacactgaacattccaaacttcttacttggaccccgaggatctgaattgattgattttcttacagattgctcttaaacttgttcgcaaagcggcatccaccgaagtgcctagaatttctgatgatgttactactgacactgaagaaactaaatctttggccaagactgatttggaatctccagagacctctgcagaaggatccactgtgttgacagatgagttggcaactggggatccaacagaatcaacgactgagcagagcggagaggtagctgaaacggttgaaaagtatatgattgatgaatcaaacctttcagattatgtaggcaagccagtattccaggaagagaagatatatgagcagacaccagtcggggttgtaatgggtctagcttggacatccatggggggctcaacattgtacatagagacaacctttgtagaagaaggagaaggcaaaggtggtcttcatataacgggtcggcttggggatgtgatgaaagaaagcgcagagatagctcacacagtcgcgagaagaataatgctggagaaagaacccgagaacaagttgtttgcgaattccaagcttcatctacatgtacctgcaggagccacaccaaaagacggcccaagcgcaggctgcaccatgataacttcattgctatcacttgccttgaagaagcctgtaaggaaggatcttgcaatgactggagaagtcactttgaccggtagaatccttgcgattggcggcgtaagtgaaaattcacaccacaataactctgttttagcttcttagttaccaaattcttgtattaagcagtgtaatacagaaaatatctcttaatatcgctttgtcaggtgaaagagaagactatagctgcaagacggagtcaagtgaaggtgataatattccctgaggctaaccggagagattttgatgagctggcgagaaacgtgaaagaagggctcgaagttcatttcgtggatgaatatgagcagattttcgagctagcctttggctatgaccattagagaagtctttaggctgattttctatctcttcttgattgatttcaccattattattgatgtattatatatgtcctttctgtaatattatattaactagtgtaatttatatacgtatatatgcggttggatttaaggttttcgttatttcgaactttattgtaactggcttccgtgaattgaaaagtaaacattcgaatgaaacaaagaaaagaaagagagacaaaattaaaactccaaattcttccattatccaaaacaaacaagtccaaattctttattttcttcaaagtttccttatcttcttaattattgctaacaaggataataaaaaaaaattgtttatttttccagttttataattaataggataaaaataaagaaattcttagaaaatatctttgcatataaatacaagtctgtagaatgaatctcaaaaggacaagacagaaagaaagaaatctaatctcgtagttcgtaagacttgtcgactataataaggatgataaacgaaggtatttagctaatcctattctgtgattgtaatcatg

SEQ ID NO: 10247 - DNA, 3000 bp, Unknown
  misc_feature (1)..( 3000): cDNA_ID_2715280_gDNA_ID_2213639_Annot_ID_132221 3000 nt of promoter + ATG
ataagacattcccacgataaaatcgtaaaagaattaattgaaacaaattcatcggcttatacactcggctataaagccgagccgagattagtagacggctgaagctccgacagaatctttgatagagctgtcatggctcggacttgcatttccaaagccgctatgtaatctgctgtctcgtccaaaagctccggtaacgccgttctccggcaacccggcaccaacccacccaaaacccggacccgatttcccaccgccgataacttcctcctcctcccacttccaccacttcccctgatcgccgcagctaatgccgacgccggtttggtattcctacgccgcctcagactcgttccgaatcgactaaccaaaatggctcggctccaccgagttgcaccacgagcggtcgtcgcaaggactttgtcggccgtgtcccggactgttgcgctccgccgcgatcgttgaagagcgtcgtagagctttagggaatataccttctgcgccgttgtggctctccatctacgactaagatgccttaccggagcttcttcagagcttacccttgatcgacgtagagcctccatcagctttggagcgaaaactctttgtcctctttgcaatctccggcgaaaggggattgttttagtcccttctacctccggtgacgtggaaggattcgatccatttccttgttcagaagacattcacaagaaatctatagaaccacacttaaacaacgttttgtttttgtttcttgttctcttggaaaatttccaagaacagttatttatagagtcagagaacaatgttgagctctttcttattttgataataattttgagtaattggaggggatatctaattctctatatataaacatttgggagagattggagaagccacccttaaatcaattattttctatattttcttgggtttttcgaattgaataccattattttttatttatttttctttaataataatgtacgtctaaaatcacattggccaattatgattgaactggtgaatgaaaaaaattcagtttgaacttaatgcatttttagattagaaaaatgattcaggaacaaaaaatatcttttcttctttcgacgtcgaacgaaaatatctatcttcgttgcaaaattagatatttgaacagatattttactcatagactaaacttgaaactttttacatatctatttatgatggtgagcggcgtaaatttgtgttatgacgtggaatatttagtttgtagatttttagttgtgaaaagaacaaaattggcgatggaatggaggagtttgatgtaataatgtggagggcaatgattggtggcaatataaccaatagatcgaacaaatagctatcaaacaaaatttaacataaagaaacaaaaaaagctaatgagttttttttttaaagaaggaacaaaaaaaaaaggaaaagaataggaaaaagagaagatgcatgtgatggtgttttatttcacgaccttcacaccttaggcttagtggttgttgtggctatttatcatccacattttttggctcaaaatctctctattttttcgaaaaaagattttcagtatttggtgttttgtgaaacatataacatgttctttatacttttcttccttttttttagaaaataataatttgatttagttgatttttttcgaaaagcatagaattgggttttggattgcactagtcaatcagtttataagtggaaaggcaagttctatatatacatactaaataacattataagttttccttaaatatttttataccatgtcaaggattataactaatctaacatctatccgtcaaaagttacttaagggttgggaaacgcatatgtttcgtatttgtttaggctagtaagaagtaagaacatacgaaaaaaaaagacaaagtattagcaaagaaattaagaaacaaaagtatccaattagcaaagaaaaacaatgcaaatgtggggtttcaagcaataaacgtgagtcatgacagagagatttgcctcctggcgtcagacacgctttgatatcctcttcttaattttttcttccttttctgtttgtttatttattattcccaaatcaaatgattagttgttatcctcattgattattttttggttatcccaattcaggacaataatattaataatgatgacaatgatttgtttcatgaacaaaatattaggtatgtgtgcacttaaattttttctatcttttttttttttttggttatagacaaatctttctgaatattctgtcaaaaacatcgatatatgttagaaatcaaacttatgaattattaaacggagccgtacattgcatgcgaaacaaagaacaacaatatggaataattagagtactaattaagttatatacacaacatcctctcttttttttttcctttcaattttcacgtttttagtatttcattttgtcaacagttatactgattagcagaaagaaacaattcttttttattttttgacataaaaaaaatacatctgcttaatttgttgtatcatcaaaccggttcagtttcactttaaccataaacaaattcctcgaaaattccaaagaagaaagatagtaccaattggtaccgtaagggctcctgaaaatgaaaacaataaaagcccaggaccaagataaagtttattacttcggcccaaaatttagctaacgaccgattttttttcaaaccggtcctggtttggtttaagactagtaataagatataaatgcaatgaaacgacatcgttggaggcagtggatgtccttttcccaaaaatacgttttcttcctttttttttttttttgtttattaattcttgggaaggggtttatgaagggcttttgacaccaccagtcttcgtctacaacattcttcactttcgtacggtttcttgcctattaggctaagcttaaccctaatttcccaaattcgctactcaagatcttcctcccccgtcatg

SEQ ID NO: 10248 - DNA, 3000 bp, Unknown
  misc_feature (1)..( 3000): cDNA_ID_2715272_gDNA_ID_2213639_Annot_ID_132224 3000 nt of promoter + ATG
atcatctcttggagactaccactaacatcaacatagacattgatacaacaatcttgaaccctgaattgtcccagaacttctgtttatcccaagactcattgttaaggttttgcttctccgatataagatctcttatctctttgatctccatgtcccttctttcccctttctgtgctccattcataacaaaacagcaacaacaataaaactgataagaacactattgattcacaaacaagaagctacacgaatgttagagttatggacttgtatacttaccctctgcagctttcttgtctggcttcgagcttcttgtaaacagaactctagcttcaataccttcttcttcaaatcttgatcagttcttctctgtttctccagctgttattgttgtttcataaagaatgaaactttcactcagaatttagacaaatcaaacacaaacgtgcaatggcctttgttcaaatggaaaaagatggatgtacctgagattcgagttccttagtcttatgtttccattgacctgacattaaccttatctcatctttcagttttgtaatctcttcgtcttttacttcaactagcctattcatcctctcaaatttcattggagacacatcttctagaagtttctggagctcgctgtccatgccacctattcccgcttttgcaatggcctcagtaacctcacgctcgattctcctaacttcttctctaagctgcttttctgagcactctctcaagctcagacctctctgtagatcatcaagctgatgaccaagctgagtcatacggtcttcttgttctctgagagaacgtgttttgtcgtcaagttgttgctttagcattgagcattggatctttgtagattgagcagaatcagcacttgcctctgcggtttgcttggttgtatcaagctttaatctaaattcctccaactctttgataaactgtttcctcaaaaacaagatacaaattaagtaagtctaactaagagtatatatcattacaataacataaatttgttaggtaacaatgcattcgaccagaaattaggactaataaatcttaagcttatatcactaatacatcaatggatcacagctaaagttgcataatttatcctctagttgaatcgaattccaaaagactcaaagagctataagatattgtctacttgatctagataggattcaagaaccatataaataactctttgaactgatcaagtatttagaagtaaattgatatagtctaataatagattggattcataattatgaagagaccaaattgatgtgtaaggataaaccttatcagcagcagatgcagaagcttcaagctgacaattcctttcttccagtctcttctgcaatttacaaatctccatttccatattctttccccttttctctgcttcctgaacaaacaaacaaacaacagaaataaaccaaatcattcatttcaatctgattcaattattacaaaacttagaaaaccagcaaccaaataatatttgaccccaccatttaattacatgaacataaggaagagaatcactcagagaataaatgggattccttcaaaaaaaaaaaagacttacttttctagtaatggtctctttaagaaaagattgttcttgagaaaccaaacggcccctcacttgcttcagctccgtagccagagacaccacgtttcgccggaaactctctttcttctcatccaaatctctcagaagtggatccaccgtcgttttttcagaataagacatccagattcggctaattcagctcttgcatggaggcaatcacaaatctcaaaactctgaagatgaggagaagaaaaaagaaaaaaaattagtttttttttttgcgggtgcatgtgaacaatggtagttgaccattaatacagagaaaattaaatgaagagtctttcacaattcaaatctatataataataatcaaaacaatgatcgtgactttacatgagctatgacttgaagcttcaaaaagaaaggtcttctaagttttcaaaatcagatctctctgattatggcatgaatctaaatttaatatctcattttctatataagtatcttacaagaacagagaaatcaaagcgaatgcattaccaataaatgagaaataaatgaattggcttatttggccagagagagagagaaagagaaggagacaacgaaaatcagaaaagtgagtttgaacttcaaaaaatcaaactttccctccaaaatcctcggcaaacacaactaggacgtgcaaaagcatttgattttaagtaaatagtaatgcacatagttatatgtgatacattttcatgtttcaaactataatataagaagaacatgtgcatcattattgttatttggtaacaaaatgttataaacgtataatacgtattaatttagtttatttattggattttggtaagttaagcttgtgattaagggacatgtgtggatgggaaaaagagacagaaagatgcaaatgtaaagctcattttaggttcggacgctcacgtggcttttacaagtggtctccccacgttcggattttggttcggagtagataaagacaaaaaccgaagccgtgttctctcgtcttttgaccaaaacgccgtaataatccgtgaaagacgatgcttgctatccgttagatctctgccacgcgtcggacactacgttgcatataaagttacacatacgatgtataaatacttgattaaaattataaacttgtacagaaataggaattttcgaaaatgaagttttggtgtattaatagaaaccataatgcttgatgcgatcaaattagcggtaaactagttccataatccacaaacattttcttcctaatacagaatttcccatttctggtatcacaaaattttcagataaataacgaacacaagaaagccttttgtaatcttaggtcttggaccctgattatgaatgccatcacttttcttggaaattcaacgatg

SEQ ID NO: 10249 - DNA, 3000 bp, Unknown
  misc_feature (1)..( 3000): cDNA_ID_2715264_gDNA_ID_2213639_Annot_ID_132226 3000 nt of promoter + ATG
tcagcttgatgatctacagagaggtctgagcttgagagagtgctcagaaaagcagcttagagaagaagttaggagaatcgagcgtgaggttactgaggccattgcaaaagcgggaataggtggcatggacagcgagctccagaaacttctagaagatgtgtctccaatgaaatttgagaggatgaataggctagttgaagtaaaagacgaagagattacaaaactgaaagatgagataaggttaatgtcaggtcaatggaaacataagactaaggaactcgaatctcaggtacatccatctttttccatttgaacaaaggccattgcacgtttgtgtttgatttgtctaaattctgagtgaaagtttcattctttatgaaacaacaataacagctggagaaacagagaagaactgatcaagatttgaagaagaaggtattgaagctagagttctgtttacaagaagctcgaagccagacaagaaagctgcagagggtaagtatacaagtccataactctaacattcgtgtagcttcttgtttgtgaatcaatagtgttcttatcagttttattgttgttgctgttttgttatgaatggagcacagaaaggggaaagaagggacatggagatcaaagagataagagatcttatatcggagaagcaaaaccttaacaatgagtcttgggataaacagaagttctgggacaattcagggttcaagattgttgtatcaatgtctatgttgatgttagtggtagtctccaagagatgatgaattttgtaatgtataaatttagttgcagatagttgatgaggataatctaactcatgtatgtgtcgtcttcaggtctaatataacagccatgtacttaacataccattagtatatgagttactctgttgacataacagccatgtactttaaatactctgtgacgttatatgtttcgtattcaattctagtataattacataaacggcggacgtatatcaaacagctcccgtagctcagttggttagagcgttggtcttatgagccgaaggtcgcgggttcgagccccgccggaagcatttttgttttgttttccacaaggcccattttgaagctcaatttcaatttaacaaagcctaactctaacatgtaaacgttttcttctcggtagatatgtttcgcattcttataaatggtcggcgaaaattttcaaaatgtttactttttttctttccttgcatctcgacacgtggccccggttcatcctgtaatctttttggaatattccgatatcatatatgtgtatgcatgtatgtatgtatatttgatttctctaattacaaaactacccctactttgtcgtgtttcttactgtccccacttcacagctttgtccaaatattcaaaatgacccatccttctttaattattaatattcggttctttctttcgattaatttaagaactaattataaactatatatatatatataaatatttggctggaaatgtgattatatttatggctgttggttgttgaactagatactcataattttatagcagacaattgtatgacatttaggaagtaattattggacctatgtaagaagttgttcatttaacaaaagcacagattagaaaaaaactgccaaaatgtgatgtaatcaataaaaaataaagttcaatttagtccatttagctaagcaactttgacattgcgagtattgacttctttatttaaaaagttaggaagaaaatggttctgcgaatgtagctactaaaaagaatcaataattcccactaaaataaatgaaaaattctttagattagagtggcataattgctaaattatttatggttaatacataatatgtcagtccaacctataacaacttagtagataaaaaaaaagcagagaagaaaaacgtttaagtaggtataaaaatacgaataaagtgggagggggggggggcaaaagaagtttgaatggtcaaaactcgaaaaagaggaaaaaccaaacccaatgtactttcaaactccaatttactaactcccaagccaacactatctaatctatccccttttttattttattttatttttagatttaattttacgatatgactgtcaacagcgcattatagcaaacgccactcttctcatcaaaaagcagagccacatacattaacattacattagcttcctcatttttattcttattattattattcatcagaccaacaacaaaaaggagataaagagaagaggattcatcatcatcaatcaatccttcattttatggatctactcatatcttgattcttccttctatctctcccttttcttccatctctttttctctgggtttccccggtatgtttcagcaatctcttttttgggtcttcttttaaattctgggtccttcaaagttttgcatacaaaaaaattgtttctttttggtattttagtctcaaatccgatttcatgttagatttttcctctgtttagatcggcctagatttgtttattggccaatatgagatagatagatttctcaatgctctgtgtttttaacatctcttatcttttgttgtttgtgttgaaatttgctatcctctatggattgttccatgatttttttcttatttaggatgctataattttaaattttttggctgtctcctgctttttttttcgtgataattgttttaaatgtctcgttaaaatccaaacttttgcatgttgatagcttcaatatgagttctgggatcacctttattgagtttcaaatctgtgtaattgcctcagttaaactgattgtcttgtaacaaccaagtaattgtaattacatatgtatggtttatgaatcaagagctaacgcttactttgcttatggttaatgttgctgcaggattgagttttttaatctctgattgacagatttgaagagcgtgacaaaggaagaatcttttattaaaacaaattcttctgttttaatcttggg

SEQ ID NO: 10250 - DNA, 3000 bp, Unknown
  misc_feature (1)..( 3000): cDNA_ID_2715260_gDNA_ID_2213639_Annot_ID_132227 3000 nt of promoter + ATG
gaaccaaatctttttctaaaaacgttgttttattatttgttttagctaaaatggaattttttcttttacatcaatttcaaacatactcttactttcttctcatttctttccgttccccaccaatcttagcaactcttgcctaactaaggccactttttagttattttccaaaacacttctcattttaagcactaaaatattcaatgaaacaattatactctttgccccaaaaaaaaacaaaacaattatactctatgtattttttccacccaagattaatgagtagctgattttttatttattttttacgaatgtgaattatctaaaagctctctcaaatcattaacgtgcgatcaaaatttaaatttattacgtagatcagctaaattcacaaagatccgtgtcattcttgagttttcaatttatgcacgaggatttgaagatttttttttttaatctttcgaaactacaatagtagtatataatacttgaaatatacgcatgatattttatagccttgcggaatataaaagttaggcgttgtagtttgtaacaataatatattgaacgtaagcgagctagctagggaactaataatcccttacacactagaatagagatgatggctacagtaaattgcaattgattacgctaaaatcatatattatatagagtaagtataagaaattctctaatatggtggggataaatgatattatataaaaccaaaccatgaaaaagtgatagaggagagcaaacagtcaaaaagaatctgttggagaataaaaagactcaatattttaacatgacaacaagagttcttcttgcttctttgtggaatatatccaacaactacaagctatccctatatataactagtaattaatatctaatatgccatcttttcataaaaattatcctaatcttctttggtaatctttcacctataaactgcaatcccacagctaagtaatccacctccaccagagctcaatgcctagtttgaccagcaaaaacgtaatttttaacatgaattgggattattatatttgttagcagaaaaaaataaagtctcatgcatctaccaatccaaaaaggttcttataatttttagacgcgatgaaaatttatataagttcactattaaacgtatgagatagtaatttgtagattcgatttaaatataaaagttaactgtgttatgttggaagggtaaaaaattctccactcaactgttctttttcatcacgtgaaccaacgtacgtgaacgatagccaacagattgttaaagcttcaacatgttgtagaatcatttccttctttttatatatatatattctcataattattgttttgtattggttcgtcgcaatgctttaagattatatagttatattagctgtaatcaattacaatgattattagtttttattttttgtcttaaacgaaacgaatccatagcataactatacccctaaaaataaaacgaatccgtagtccatattccatattccataaacatatatcgctttctggtctgattctggcgttttttctttttgatgaaatcgtaaaccattcgttttgcgtagaatgggagatacgttatttggcttttagatggcacgatgtttcgaatgaatttggagattcggcaagctttgtccatgagagtcgggcacttcaagacgacgtgtaggtgattgctgctgacctataagctcgtgatgtcatgtctaatatcaatgttgcatctatgaaccgaagtcttcttttatcaaaagaaccgaagctaaaatttacacattgtatgttgtttttgtttaccaacaaaaaaaaaaaggtatcgtgtcgtagtcttagaaatcgcgcggtttcatcttcggaaacggaaagactataactataaaaccaatttcgtgtttttgtttttgtatattttgtttagacttcaaccaatttcgtgttcttcgtgttgtgtgtttttcacccaattttttcttctataaaagaagaaaaaaaaacaaattttgccttacgtttctaatttggggataaccaatagaactcagttacacttattattttatttattttatttaataatgagagaaaaaaataaatgcgaaagaagaaaataaaaaatccaaaggccaagcatcgtcaggctcttccctcttctttctcgtgctacttccgagagaattcgatcatacaaaacttcaaattttaggattagggttccatcgttctccgtgattttgaggtaattcgatctcccattcttaaaatcagcaaaaagaaaaaacttttggttctagggttcttgctgcccaattttgtaaattttgcccaaatcctgtgattcttccgtgggagctattcgacgtcgttatcttctatttcggatgtaattttacttttgatctttacttagtattgatgtctcggtgttaggtggcagattctatctatttcgaggttatcaatcttagggtttacgaaggttaggtgttgtggaatttggatagaatcattaaaatttgaaagctttgccccttttttctagagattacctccctttttgaattcaatcttaccctttatgtattgcaatttgatgatgattgtggtttccgtgagtagtagattcaagtttcaggaactcattgcttgttggttgagttagaatctgaaagtttcaagctttttagctctgactgtgcattcattattgagatgatatagttttaccatcgattcgattggtgaaacaaaagtttcttagtgattgtgatttgtgatatcttctatgtctatccatatgcttgttatgtagctttcactggaactgagagcttagatttgttgtgtttaggtactcttacgtacaaatttagttttattacgatttgtgagaaagcattaggaaccacttgcctgcattgagcttgaaaccaaaatcaagagatttgatggttctgcttgtttcaggacatg

SEQ ID NO: 10251 - DNA, 3000 bp, Unknown
  misc_feature (1)..( 3000): cDNA_ID_1442595_gDNA_ID_2213639_Annot_ID_132235 3000 nt of promoter + ATG
acaagaatagaaaaaaagaatgggctttttctgagctaaagaaaccaaaaaaggtgaaataaacgaagaagaagaagaagcagaggaattatttgttataaaaaaggattttctaaaaagagtttcatggctggattcacggttggagttttatttagaattttaaaaattgaatcaaaccactctcttgctcttatacgacaaagacagaagagaccatcttttgtttggttagctagatcttagttcacacttaaaaacgctcagcatcatcatcaaataaagcagacaaaaacagattgtatgaattagcacatggagaaaatgggtccattggatttgatatcttattggctctatcctgatatttccatctctagattagcaattcgattggatgatgtgtataaagctgatcaacttcatgaattgttatatataaaaaaagagataactagctattctttgtgttggtgaaagaataaaaacaaattttcattttacgtcatgacttgagcataacgaaccctaataaattatgatctctcccaactctgctttaatttccactttgggcagaactcagaagcatacgtgtgaaagaaacaatacacaactagtgcagttgggaaaatcataaccctttgtttctctcagaaaccactttgatatttacgagtgatgattgttatgtaacgtctacgacacctacacatatgctagcaatcatgtgttgaaacacgatataaaacattctcctaagttcacgatataactgttttgatttctttcgacgcaatcatgtcaattaatttacacaaactactaatttaaaggaaattttaattgctttaggttttactacttaaagtagtttcatcaatatttttttggttagaggtcatgttgatagatgtcgtataggaaattcactctacaaatgcttactataagtttaggttttaactcaaaatgtttcaacaaaataaaatcatatattttttactatcctattaaaaaagagagagggtctgcctaataaagaaatgcaacaaacataagaaaagaccaagtgtgcgttgaagaacgagaaaaaatggtcttggtctcatgcacatcaccacatgttgatcttacgccgtggtcgtccacttgcctcttgtttctgaatttttgtttagttgtccctgctttttcctattttttcctgtaagaaccctaatgtttccatatgtctcatttcttgttttgcataatttaatgggctcaatgaagttaatgggcctaagagtgctacgacccaatagcacttgaagatatgtccttcaaggacttcctaagctctgttcaggtcaacatgactaactttctgcttcacaggtttatggaaattaatcaaacatttggtgttttaatttgaacttttattttctttagcatgaactcatgagacttcttgtgtcaaagaagcgactaattataaacaggggagggacaaacaacagagattcatatttgagaaaaagaaataaacaaaaaagcatgagaacatgatgaattagtattggctaaatacaggacttaacatgaaggctatggtacgcgatatatgactcaaagaatggtgcagccgcttccactttcataggtagtaacagacacaacatcacaactgttgcagtaaggtggcttgcatacatgctttggtggttcaggtgctggtggaggctttggtttttcaggctctggaggctttggtggctcaggaggttttggtggtggtccaacgctaatgatcacaggtttctgtttaatctttttcagccttgttgctacgcagaccggatccattgtccccaccacggtaagtatactatttccttcatctaatgaaatatgattcacacctgcaccaaatctcatgttcaagatgatatgttaagacttaagagcacatatttcttgagtcttttttcgttcattaccttctatctctgtgactgcttccatgattgcgctgttgcattttccacagtttatatccaccttgatctcaactttctgctcacaaccacaacaaaaactcaaacattcggtgtcggatttgaaaaggaactagtactaggatgtttaccttgacagtcatgatggattagccaagatcgagaaaaatggattaaaggaatgaagaaggaagagaagaagttattaaaaacatgtgaagacaaacagagatgacagattggaataatgttgaagcagttgaggttgtgtttggtcagtattgttaattaaataatcaagagattacaccatctacgtgcttagatgcatgtttttgtataattgaataagaggttttgggaatttgcttagttggtattcagccaccatcttatggacttacttgggacattattgtggatggaatttgtttaatcttgaaaatttatgaatatattattgagtcccatattctatctaattttgtacgttcttgaccccaaatgtttatttatttattttaatattgtatatgttatgatcatgcaaatgcatggatagagaaattccaagccggtttaaggttttggttttatttctatcccggtttggatttagctgaaccaaacaaacctcttgagttctttcaccagtaaacaaccaaaatcatcaatcatttcgagtttggtgattattagagtttgaaggtgtttttgttatggtgagtgtcatcctataaactataggctaattaatgtgtccaacaaaacaaaactctttttaaacaccaaattttaaccaacgatcagaacacctaaacctaattatggcaaaattttaaaattaacacatctatggcccctctccataattatctcttctccattggttttccattggttaaatcttctttacgtagatatataaattgagaaacaatgttaaagtattttctcaaactcatcaataacatcttacaaacaacaacaatcaaca

SEQ ID NO: 10252 - DNA, 2528 bp, Unknown
  misc_feature (1)..( 2528): cDNA_ID_2715249_gDNA_ID_2213639_Annot_ID_132236 3000 nt of promoter + ATG
ttctttctttgttcattcgcctaattagtcgtgtaaatcaaaaataggagattcaccaatgagatgtaacctttcgtacgactcttaattaataaaactcccattaaaaaataaatataactttattgtgctatatatagcgcatcattagcgtgcaatatttctcaattccttaccacaaagctaaggataaagaaaataaatagtaaatggaagggtttcttcgctttcttgtagcgaaagccatcttattggctttagcatcttcatttgtatcttgttacgacccaagtcctcttcaggacttttgtgttgccgtcgatgacgctagtggtggtaatctctctaatttactatacatactccttaatatagttcctcaataccgtactaattatgatttatgagatactatatctttactctctaacatcaattagttaaatcaataacatcaataagatcttcatctatttatcagttttcgtgaatggaaaattctgcaaagacccaaaatacgtgaaagctgaagacttttttacttccggactaaacatcgccggaaacacaataaaccgcgttggctccaacgttacaaacgttaacgttgacaaaatccctggactcaacaccctcggagtgtctcttgtccgaattgactttgccccgggaggtcaaaacccgccacacacgcacccacgagccactgagatcctcgtggttgtcgaaggaacactcttagtcggttttgtaacatcgaaccaagacaacaacagattgttctcaaaggttctttacccgggagacgttttcgtgtttcccataggaatgatacattttcaagtgaacgttgggaggacgaacgcagttgcgtttgctggtcttggtagccaaaatcccggtacaatcacaatcgcagacgccgtttttggatcgaagccttcgattatgccggagattttagcaaaagcgtttcagctggatgtgaacgtggttaaatatctcgaggcaagattttcttccaattatgatcgtcattattaacaagttaagagaatgaagggaaatgtaccaaaatatgaataaaaatataaaataaaatgtattatagcgtggtgtgagaactaaaataaaacaattaagactgtaaaaaagaaaaagaaaaaaagagatgtgtcttttatagtataactttttaaggtaaggtgcttgaacttgattacaaaattaaaaaacacaattttgctatttattaatataattatggttgaaaagctggagtacgtgattttgattaatgattttgcaatcaaaaatctaaatagaggtatatttaaaaaacacaattttggttgtatcctctctctttctacaaaatgtttatagaactaaaaaattgttctataaatttagtatgatctttttattttattattattaacgattatataaaagacataatattttgtttgcgaaatacattcctacatggcggactgatcctgtttgtgttgtgatttgatgtttttgtgtcttgtatgctgataagtttatggcaatccactcaaacttaaggtcagatagcagagaaaacaagctaaatacccacccttagatataggtagtttttttttttttttttttgtatattttgtgatataggttgtcggagctaaaaacttcaaacccacaaaagaacattcttatcgaacaattcaaaaatagaaaaattgttcttcgttggtaagaaaacttggttggtaagaattgaaatcccgatggccgacatcatttttaattgggccggttctaggcccaaaccatatatcagcccaaactctagattttactgcataatggaaattcccaggctggaacttaaatggattatataatttaattaatgataaaacatattccttaatctcgactctgctgcgttgctttatcaactgaggaattttgaatttcatatctccaaagtaatctcttttccaaggaagatcagtacaaatcttaaaacccccgatcagagtaatccggggaactatctccgccgttgaattcagtctgagggtttctccgatttcagttcgatctgtgtccgggattctctctgtgttgctttctcattgcgtttacgattcttcttcccctttcaaggtacgctcttgttggttgcgttctaatcactctcaaattccgggttttggcttcattactgcaaattttccccttttattcacttgcttcgattcaacaattgctgaaagctaatcgatagttaaatgcttttgaatcgtgaaattcgtttcggatttagggttttttttctccgctataagcttcaatccttagtccactgggattcttgagcacctcccggagaatttaggagggaattagctcttctccagatcttgcttagctcttgtacaggtacttacctttagcatttctcttgtttagagtttgacgagtttgatcagaacttagttacgaattgtctacttttgtctcccagaatg

SEQ ID NO: 10253 - DNA, 212 bp, Unknown
  misc_feature (1)..( 212): cDNA_ID_2704744_gDNA_ID_2213639_Annot_ID_181169 3000 nt of promoter + ATG
ttctttctttgttcattcgcctaattagtcgtgtaaatcaaaaataggagattcaccaatgagatgtaacctttcgtacgactcttaattaataaaactcccattaaaaaataaatataactttattgtgctatatatagcgcatcattagcgtgcaatatttctcaattccttaccacaaagctaaggataaagaaaataaatagtaaatg

SEQ ID NO: 10254 - DNA, 3000 bp, Unknown; identical to SEQ ID NO: 10251
  misc_feature (1)..( 3000): cDNA_ID_1442595_gDNA_ID_2213639_Annot_ID_181165 3000 nt of promoter + ATG

SEQ ID NO: 10255 - DNA, 3000 bp, Unknown
  misc_feature (1)..( 3000): cDNA_ID_3038800_gDNA_ID_2213639_Annot_ID_181162 3000 nt of promoter + ATG
gatttaacttgtcgttttttgttatgtactcttcaagattactttggtcgttcctgttttattgtctaggaatgtaaataaaacaaaattaatgctagttaagctcagataaacaaagttagaactagaagatgtgtatgttctgtgtcggtagaaaaacaataaaaacaaaatatttgaatttagatatgtttgggcctttacacgtttgtgtgtgtgtgtttgttcacagtttgtttggatggaacattgcctggatatcacttgcaccgtggacatggatctggagctaatagctggctcattcaattggaggtttagtgaattatttgttgtcgatgaaacactagttaaagtcttcattgttgatgtttgatgtttttgtatcagggaggaggatggtgcaacaacatcaggacctgtgtatacaggaagactactcgacgtggttcctctaattatatggagaaacagcttcagtttacaggaatactgagtgacaaagctcaagaaaatcctggtttgtctcaatctttgtttaagttttgttcatgttagtgtaatgttaatattgaaaatcatatattctcattgtcatgtgctttacttctgcagactttttcaactggaatagagttaagcttcgttactgcgatggcgcttctttcagtggagatggccagaatcaggttgaaatcaatcattttttgagttactagagttcataagagacccattgttgtgatttggaacaacttgctagtttctaggcctttggaactctgtagtctataatcgtcaaggctgttattagccacagagaacgcttgatgtgatcttagttctgtagaattgagcagccattggttttgtgtaacatctgtgaactaatgcaaataaaattctttaccttaactttttcaggctgcacaacttcagtttagaggagagcgtatctggagagccgcaatagatgatttgaaggcgaatggaatgcgatacgccaatcaggttttgacacttaaccttctataagagtctgtatctcttccatagcataatatcaagggcaggaatggatttaactatttatattctgtcaggcacttctctccggatgctctgctggtggtttagcagcaatcttgcgctgcgatgagtttaggaacttattccctggatcaaccaaagtcaagtgcttgagtgatgcaggcttgttcttggacacgttagtttatttctcccaagtcaaagattgtattaaagctagttcattttcccttaccttagtaactactactgactcctttgtttctgtaattatagtgccgatgtttcaggcggccgcacaatcaggaacttatacaatggtgtcgtagaattgcaggttggattcctctttcttcacttgaaagtttcttactttacatttaaagagcacaagaaacttaagaaatcttcttcacaatttacagagtgtgaagaacaatcttccacgtatatgcacaaaccatcttgatccaacctcggtatcttatcttttgttctctcattctgatgctgttgcaaaccggtcattcgaagtcttgtgttttgataactcatatatctgtacagtgtttcttcccacaaaatctgatcagtcaaatgaaaactccactttttatcgtcaacgcagcatatgatacatggcaggttatgttttttctccctttgaaaagtgccacattgctactaaagaacagaaagttgatggttaggctgacaagtctctgtaatggtttttaaacagattcaaagcagtatagctccaacatcagctgatcctagtggattttggcatgactgcagactaaaccatggaaaatgtactcctgcacagttgagattcttgcaaggttgttctatagatcataaaaacttgtggacttcaccctttaaagcatcattgtatcactctaatcgtttaatcttttattcgagaacaggattcagggaacagatgcttagagtagtcaagggcttctcaatgtctagacagaatggattgttcatcaattcttgctttgctcactgccaaaccgagagacaagatacttggtttgccgatgattctcctgttatcaggaaaaaggtaaaacctcactcaaatctttcccacacaaacaaagtaacacacaaggaaagcctgtttccactttctagatcttgactttgtctatggaatgtttgtaggcggtggcaatagctgtaggagattggtatttcgatagagcggaagtgaagttagtcgattgcccatacccgtgtgacaagagctgccacaacttggtgttcagatgattgtttgactatgttctttattctctctcatatatacataccttagaaaatttctttctttcaaaaggaaagattttgtatcctttggtagtaaccaatgcctcattggtatatgattaagtgtatcgtggaaaatcataataaaaaaacaaaacaaaacaaagtttgcttaaaaagagttcaatgtaatcaatcacagagaaatgctctttcttttgttttgttttctaattttctttgcaaatgcaagtagttgatcaaatatattagaaatgtcaacattggtaccaaaagaattcaagcctaactaattcttttatgtattataagtgtccaacaaaagcagataatggataagaataataataaaatagtaaaagatagagagaaagtgaaaagagtaagaatatacagagtgtgttgacaacttgacaccctgtttttgtggggggtgtgagtgacagctatctagtgttccccactttgtgtgtgtatatgtgtgagtgttttttttacacctatcatttgctttcaatttctcccagtcaaaatactaacttcttcaacaacttctggaataataatctgaattcttgaagttgaaccctgtccattacttttctccttcttctcctgccttctgaatcttcttccatg

SEQ ID NO: 10256 - DNA, 3000 bp, Unknown; identical to SEQ ID NO: 10250
  misc_feature (1)..( 3000): cDNA_ID_2715260_gDNA_ID_2213639_Annot_ID_181155 3000 nt of promoter + ATG

SEQ ID NO: 10257 - DNA, 3000 bp, Unknown; identical to SEQ ID NO: 10249
  misc_feature (1)..( 3000): cDNA_ID_2715264_gDNA_ID_2213639_Annot_ID_181154 3000 nt of promoter + ATG

SEQ ID NO: 10258 - DNA, 3000 bp, Unknown; identical to SEQ ID NO: 10248
  misc_feature (1)..( 3000): cDNA_ID_2715272_gDNA_ID_2213639_Annot_ID_181152 3000 nt of promoter + ATG

SEQ ID NO: 10259 - DNA, 212 bp, Unknown; identical to SEQ ID NO: 10253
  misc_feature (1)..( 212): cDNA_ID_2704744_gDNA_ID_2213639_Annot_ID_132237 3000 nt of promoter + ATG

SEQ ID NO: 10260 - DNA, 2487 bp, Unknown
  misc_feature (1)..( 2487): cDNA_ID_2715382_gDNA_ID_2213640_Annot_ID_132238 3000 nt of promoter + ATG
aagctttgtcacttgacggaggtttatcactttcacgatatgatagaaatgctggttggatgcggttataagaaggggactacattattcggttatggttacgatttccgtcaaagcaataggtgatttgctaaacttctctgctatttacctgaattcctagttctcgagatcatttgcttatataatctcttgcaggatcgatctacttatactaggtctgaagaagaagctggaaactgcatataaacgttcaggggggagaaaagtcactatcatctcccattcaatgggaggacttatggtttcatgtttcatgtatctccatccggaggtattataatctccaacctttatgatcttcgacagattctagctgaagtttagagtttccccttattcaaacagaataatgagtgagactcttttttttcttgttggcaggcattttccaagtatgtaaataaatggattacaattgcaacacctttccaaggtgatacggtttatctatttgcaaaaaattgttcataagagaaatagctggtttcattggaaatgacttggatttggtaaacaggagcaccagggtgcatcaatgattcaatcttgactggagtgcaatttgtggaagggttagaaagtttcttttttgtgtcacgttggacgatgcaccaactggtaataaacctcatagtttcgggtttacttgcatcactttttttctttttgaagttacatcaaagctttagatttttatttcagggtccatgaaactcttgtttttactgatgaatctgtttttaatgtttggttttagttggtcgaatgcccatctatatatgagatgatggcaaatccagactttaagtggaaaaagcaaccagagattcgagtttggcgtaagaaatctgaaaacgacgttgatacttctgtagaactggaatcatttggcttaatcgagagtattgatctattcaacgatgcattaaaaaataacgaggtagcaaactaaacatactcagcttttgtttctcgtttccattggcttgagatgttatttggtcagtggatttataatcaaacatcttattatgtattgtagctaagctatggtgggaataaaatagctttgccctttaactttgctatcctcgactgggctgctaagacaagagaaattctcaacaaagcgcaacttcctgatggagtgtccttctataacatatatggagtgtcacttaatacaccctttgatgtttggtatgcaccactattcatcgctcctatattgcctgaggctttttttgtggattggtttatgaggagtattctcttgaatcatccaaactaagtttcttggtcgattccaaatgtctttgccacattaaaaaagctgttttgtttttcttttgcagttatggcacagagacttctccgatagacgatttgtctgaaatatgtcaaactatggtgagtgaaatatgactcttcttgaggaaaatgctttagacccttttaaatcctgaaacttgctgttctctacccagccttcgatttgttatctcttggcattccttcacttacaattatactttcatgtttgattaaaaagtctctgcaactttgtatcatgtttcagcctgagtatacatatgtagatggagatggaactgtccctgctgaatcagctgcagtaagctatactttcttgtttataccgatatgagttctcggttttcatgaagcaaatctgttactggttctcttgtgcacttgtttggaccttaacaaaacccttacgtttttacctttttattgcaggctgctcagtttaaagcagttgctagcgtaggagtttcgggtagccaccgcgggcttctccgtgatgaaagagtgtttgagctcattcaacaatggttaggagttgagcccaagaaggctaaacggaagcatttaaggactcacaaagtagttgattctggttaagtccaaagcctagtaaactaaaagatcttgtttgaataagttaaaatgaagaaatcgttattcaaagtgtggttgtaattatttctgctatttttattgtacgttgtgacatatgtatgtgcatgaaattgtagtagaaagaaaagtaatctcatcaaaaattaattgggagaagaataaaaactagtgatcataccttttttgcctttgtttctgagaacaataacaacaaatgttctacacgaaatcatcttctttgcttaaacatgcaaaatcactctcttgatttctgtttcttgagtttgtaaatcatagtaggctttgatactctcacacactttacatacaggtataccattctttcgtagttgtaacgaaagaaaataatttaatgaattaaaaaataataaaaatgtagactttcgtcaaaacgatttgcaaattacacaattctgagaggttccttcatctgcaaatgctactactgattcggtgatg

SEQ ID NO: 10261 - DNA, 3000 bp, Unknown
  misc_feature (1)..( 3000): cDNA_ID_1009053_gDNA_ID_2213640_Annot_ID_132241 3000 nt of promoter + ATG
ataggattttgttgaattagggcacatgatcttcagctatcgtctccaactgtggtttcttagatttcgaaacagagatccgatgaataaactctgccgccgagaactcttctatgtcttcaagattcagcttcggtccgatcagcctcacgtcatcattatcttcattttccggagacactctcctatgaccgcagtttttcgtgcgtttctttccggtgaggtagagcctagccatgtcggaagcgttggctgcagaagtggcacgtgtcatcggaaatgcgacgtacacatgacagcctccaagatcaagatcgtcgtcggcggcgagtgggataaatttacggcctactttcaccgacttggtgtcgacgaggaaatagcttggcatctccatcatgagctcggctgctttcgtcggcacgtggatgtcacgcactccaccgtcagggagaatcacttttgccaacggtgacgatgacgttttgtttagagcgcatgaaacgtagttgcccattgttattgtgttttttactagctatatcaagaaatcgaaagattttacgagtgaagttaaaattaattttggattttgagaagatggaagaagacaaacggaagcttaatatagaaaacgagtggaaattttatgcattataatagaaaataataatagtagtataaaatatagtgaagatggacagcgttgcagatagaggttgacattagatagttgaatccgcgtcttagcatataatatcattaagccgtgttttcagaaatctatggacattatttattttcagtttaacccgcataaaaaggtaatgattaagagatgataatgaagtcgatttcataatgttaaaactaaatttgacatttgtagtgttagtatacttggtttttctgatggtgtcgaatattacttcaaatattttgataaatttatggaaaaaaaattaacattattttcatctaaccaaaataatttggataataaaaagaatgcaaaaagtcaaaagctcaaaattattttcaattagaagaaagttatttttttaatgtgttgagtcaacgtagcttacccattttacacatcgtgaagagacggtgacagtattaataattttgttgtattaactaatataaagttccctaatatttaggggtccaaagtgtgaagggaaaggacgcacaaattattgtactacattattagtttaaccaaaatcaaatattatttatatagtattcgcttactcttccagttgttatcgcaaaatttaaatcacgtgtgggatccacggtcacttcttaagacacctgtgttttcggtttattgagttcaatgacgcgacggttccgttgtctatgggatcggactgttcttgttgcttcaaggcctaaccttttctttcagctaatgtatttcaaatttgattcctaaattcaaatttgaatgtaaacgggatacttgtgcttcttctactctaaagccatcatagctttttcataaatgaggacaaatttacccaaaacacctcctgttacaaattcgtataagtttgatactataattttttgtaaacaactcgtaagtcgtatataaaccatttaaacttcgcttgaaaaatcagagtaagctagtccaatttaaacgatatttaagcactagaatcataacggaaagatctttttatattgttagtgtaactaaaagatcttcttctagcgaaaattattatttcctttttatttcttgtatatttacaaaactctgaaacccgttagaggcttcaccaagattcaagcatcaaagccactatatatatatcactcacacttgttaattaattatcagtatttgtttcttcatcatgatgaaaccattttctctagtactcgttcttgtcctctcatcatctttagcaagtgcaaccgcatcctccttattctcgcctccacttccattttcgctctcttccatcttcggtgggattatcggtaacagtgataatagcgagttagctaggatgtgttttccagacctaggagacggagaagcctgcgtggcggaaatcttcggttcattctttagtcctcaaattacgataggaccagaatgttgcaaggccattgttgagatcgacgaagactgtgctcaagccatttttaaaccactcagcaattctttctttagtagttctgtcaagcagtattgcacttacatcaatagttgattgaattttctttaggtttactttagtgcttgttttgtttaatgtcttttatttgtttcttgttttctatgttttatcaacactcaacagtaacttcattttaataagtttaaacaaaattttgaattggaataatatttcaccgaaggtgttggtacgtgttccatcaatcaatgaataaaaaaaaataagccaataaaggaagaaaagttgaagaatcaaattcgcctttgctgaaagttgacaaagaatattacttttcttggagagcaagtgagataaagagaattcactaatactctacgtgtgcaaatacatatcttgaatcttctatggctttcatcagtacacaatttaagatttcgactaaaagaaaaccaaaatgtattcgctcacatcactttaaaatcatgttttcaatatcaagtatattaaataattcttttcaaactatatgaggttactgaaatgttatgcacacaaaagaaataaaaagacaaaactattcaaaagaaatgactagtcattaatactctcagtaacaaagaattttaagaaaagaagcgagagagagagacctagtagtttcaagaatctccccatagaagaaaaagacaatcattaaatatctcgaattctgtgtgcgccaataatattctccaaagtctaaaccatcaaaccggttattatatacatataaattagactaccgtaatcaatttctacttagagatcatcgagagggcaagagagaaaa

SEQ ID NO: 10262 - DNA, 3000 bp, Unknown
  misc_feature (1)..( 3000): cDNA_ID_2715371_gDNA_ID_2213640_Annot_ID_132242 3000 nt of promoter + ATG
gttgttgttgtaggatcttgctgggtagtgtgagcaatcatgtggtgacaaatgcaacatgtcctgtcacagttgttaaggctaattaaagtgtctcttgttctttaattggacccagttaataacattagtagttacgtgtgtcactcatgcattgttttgacatttatacgtttgttgccttctacaaatttgtgtgaaactgattggtactgtttcattaataaatttcagttaaatgatatttactctctttttgtttgtgatttgtgaacgttacgtaaaaatcacaaaaaaaaataattagtttttctaattcattcatgaaaaatcttcgtggactaaacaaaaaagatgtgaaaaaacaatccccatgtttgatccagattaattcgatccgttaatcaaaagatggtcttaatgagcataattcggggataaagtcgaatatagaaatagttgttgaaaagagaaatgtttggattgaatcttgtcagcttgatgtgtggttgatcacatgaccaatctatgtatggaatatggatgtcgtgtgtgctgattcattcagatatgacaagtggtggatgggataattcacgatatgggccagattatgagtttgttttaacttgaatggcaggccgaatcataatggattcatgatcattatgtttgatcatagcctagttggacttgtatccctagatcatgatcaaagtgggcttataaacatggccgagatgggtagttctaaatcaatttgttggatcagaagaaatcaagaaagagacagtcgttggagcttttctgatctgcttttggatgatcacccattagattgaaaattaaatttttcattctccgctcgatggctgatttgtaaacttgttccttcatgatagaaatttatgggctaaatacagaaagtgaacgttagaatttggttttgggtagaagaacaactatcatatgattaaagattaatcagatgatctaaagatagttttggtgagtacagttcggaaatatagccgttgatgcatgatgtgtgactttcaaaaatagaaatagccgttggatttaaatttaaggtcaatgaacaactgtcagatatgcttaaaattaatctaatgatccaagaatggttttggtcaatacttcgagtatatatagttgctggtacgtgatatgtgaccttgcttcaaatataaaacgagccgttgaattttaaatttgggtggatgaacaacgtactgtcaggtatgatgattaagattaattcaatgatccaaaatccaaatattgtttcggtagacggtggtacttaattagtgagactttcaaatattaaaaagagatgttgaatttaaattttagtttgctcaaaagaaaaagtttctagtaaaaacaaaacaaattatgtttaattaaggtatgtaatatggttatgcataagactagtgttgatgagatgattcacgatgtcgtatggattggattatgagtattcttaaactcgaatgggttgccaaatcataatggcctcattaatttattgtactaaactgaattataatatatgttcttgagcgaaaaaaatccataatttataatttcctatctagctatattggattgatccggctgttgacaatctggtcctgatttgaatcggtttctcgaatcatgcaccgtaatcgtagtctagccatttaggattgtatcactaacagtagtgtcactttaaaatgttggagatttagactatgaatagtaatataaaccgcacccaaaaccgcactgcaacaggtaacagtatcaaaatctctctctatatatatgtattttcgttactatttgaaccgcaccgcacttctcccacaccgcaaaacgcagtcatcattcggacccttaagacaaaaataataataacaatttatatagaattttaccaaaattgatgtcaaaaagagaattttttattattattttaaaacctaaaaactaatacaatatagagacgtaagaaaaatgccatcttttttctttcctcatgctacacacctttagatcaatgtttcctatagattttacaatttttctttccacattactaatttgagtatttgcaatctgttgaataagttgtcattgttcttaaaaaggtacttttcaataaattgtcatttctatctatataatcagtgatatctttccattctcttattttataaataagttagcataagaaaatatataggactaaaaccatttaattaatatttaaaacactaattatgaatttgtttaattttttactaaaaatttatctgattagcacaagctttttgtaataaagtttacaaacctttttgtttgtacaatagacatttagctagatatcaaaatttaacatataaacaatagaaaacatttatgacaaaaaacaatttagaaaacatatcaaaaagcctaattgacacttgacattgttgaaactattgatttaacacattgtattttcatattatatataaatttatattcacctttcaaaaatacatttaataattataaactaaataaaaaatgtttgtttgacttgttttatttcagccttaaaaataaatcgaccaataatatttagaaagaaaatcttatctcaataatttaagttttgcttagatttaatttatttgttcacctcaatgcattttatacaaaacaaatattttatatttaatacatatgtgaattaaatattaccttttaacaaataatgtaattaatatcttttaacaaataattttacccactcaaatagtaatatctatatttccccccttcttccctttttatgaattaatgtatattttaaaaaaatatccttaagaccaccctttttcccctataaatactgattaacttgtgccttaacaaaaacaaaaaattattcgcaaacacaaaaaaaattgttagtgaagaacaaaatggataata

SEQ ID NO: 10263 - DNA, 3000 bp, Unknown
  misc_feature (1)..( 3000): cDNA_ID_2715367_gDNA_ID_2213640_Annot_ID_132243 3000 nt of promoter + ATG
tttttgtatcacttgagttgagtggtatgattgtatcattttgaatttacgagtcaaaaattgaatttacaaacaaattttttctgtttaactaaaaaaaataaaactaaacactagtcaatgttttcttcgatttctataaaatggattaggaaaaaattgcgagtcaaaatttggttgacaaataaacggaagtattttttccccaaaataagtgaatgtactggcacaagaaacataaaaaaaatcttttctcgtatatatctaaattatttctcgatattcaagatttctaattttaaattttagaaacaaaattttcgttctatttctttttgtagttgcttattttttttttaatcaaaagtatgacttatttacaaaatgttcacaaaaatgttgctttttttttgtcaaaacacaaaaatgttgcttatttaagattatttggtcttatcctgattttggtttttggagtttgaaaaaaatataaaaataaatgaattaaggtcacaggtcatatataatttaactcatctactatgatgctagtctaatcagctaaaaatatgttaagctggtcggataatttttattttatctctaggttctaaccctatgacatgcaacattattttactacagtaaattgtttgatattggttgtatcacgtatagtttttacaataatgtgacgtttgatcaagttatatattatattttggcagtcataacgacaggagaagcaagaaggagtgtaatgaaattaggtgagagaatggtgaagaatttcaacgaaatgctgaccatgtccggaaaaattgactttccgcagcagtcgaaaaatggagtgagagtctcgattcggatgaacattgaggccggtcaaccacccggtatagttgtcagtgcttcgtcttctctcgcaatccctctcactcctttgcaagtcttcgctttccttcaaaacctcgacactcgtcaacaggttctttcttgatctgcatgatcatcaaaatttctcaacttaaatcacgtattaacaacaaaaacgtttacgtgtaacagtgggacattctttcctatggaaccgtagtcaatgagatcgctcgcattgtcaccgggtcaagtgaaaccaactgcgttaccattctccgggtacatgtatatctctctctcttcaacggtcttttaactattaatcgtttgttggcaaattatataactctaataacctataatcgtcgtacatgtgtatatatacattagccaacgcacgaagagaataatgacaagatggtggttcaagactcatgcaaggatgatatgttgatgctgcaagactgctacatggacgccttgggaggcatgatcgtgtacgctcctatggacatggctacaatgcatttcgctgtctccggcgaagtagacccttcccatatcccaatccttccatctggtttcgtcatctcaagcgacggcaggcgatccacggtggaggacggtggaaccttactcacggtggcctttcagatccttgtctctggaaaggccaataggtcgagagaggtgaatgagaagtcggtggacacagtgagtgctttgatcagctccactattcaaaggatcaaaggtttgctcaattgtcctgaatgttgagtgagggaatatgctgtggaagattctcttttgtttttgttttgttttgagatatttctgtcgggggattttatgacctcgattggttatgatggttttatggacatgctttaagtcttaagatatttccgatcggtaagattacagaccgattgatgaaagtaataaaacaacccatcctatcatgggtttttcttattggttttggttggtttattctattggttataataatttactcacagtttgaagataaatgcttgataataatgacgaaatcgtaaatgtgattgaacatttgataaagaagaatattcataaaaatacactaattatttagttatatatttcacgaaaaattcataagtttatgaatgtttcagaaaataaataaactaatttagctttcagaaagtaagatcagctaacttttttgcaaatacaaaaacagacaatctgtatattcttgaaactcaacattcttaaaattcttaataaactcttacaatattccaaaaaaaatcttaaatttttcaaatttcagattcataaatattttatttttatttttatatattaactttgataatttggaataagatataagaataacatacataaagtatgtattttgaaactactttttttagtaaaactagaaaatgttatacacacaataataaatatgttcatgagtgtctttttttttggtgtaatgctatgagcttttacatgtgaacatatagcgtttctgaaatcaaacttttacctccttttttttttaaaaccacttttacctccttataaattgatctttatatgtattctcttagaaattagtttgcagtttgtatgcatggtcttataaaaaatactattatttaatcaattttataaataacattatttataaatctcttaatagtttaaagttaatttggttctgtttatgtaatatgttgggctattaagctgtgtaccatttatttctaacacaatcaatagagaaatattttatataaaaaaatcaaattctattattattatttatttaaaagaactgaaaaaaggaaacaatatattgacggtaataagaagaagccggacggacatggaaaggtgacacgtgtatattgacaattggctcagataagacgacagagatatatatatttgcggtaacaccacgcatcgtcacttcatcaccactactcccttggcctataaatatttctctgcttttaatttccaatttgctctgattcattcacaaataacaatcctctcttcgtttttgtttttcttttggatccaaagctctcttaaatctgtaaatcaaca

SEQ ID NO: 10264 - DNA, 3000 bp, Unknown
  misc_feature (1)..( 3000): cDNA_ID_2715363_gDNA_ID_2213640_Annot_ID_132244 3000 nt of promoter + ATG
ggagtatagtaaatgccaaatttgttaaagaacaatagaatgtgaactgtagacttttgtttgtgtcgtctttctgtttgcttcaacttgtatcatctgcttaaaagagttgttgcattcgtgttttgatccttgtggtaggtcaatgagttcaaatcaattgagaagttcaagatattcaacacaaacaacctgtaagtagatcacgtccctaatgatagtaaaacaaaataaacttatttgatacacactaactgtgtaagtttacagatgggttaacttgaaggccatcaaaaagcttgtggaagctgatgcacttaaaatggagatcattccaaacccaaaggtgcctgcgtggctaatgcacagttttttatttctgcaattttttcattcattattatctaaccaaagaaaaactgcaaattctattcaggaagttgatggagtcaaagttcttcaactggaaactgcagccggtgctgcgataagggtatacatgcctgtcctagtggcacgttttgaaatatagaatgcaaactctaatcttttcttaactcctttttcgtgtgattctgtctcaaaacagttctttgacaacgctatcggtgttaatgtacctcgctcacggttcttgccagtgaaggcaagttcagacttgctgctcgtccaggtaaactctatacaccacgtttaacaacgcaacagagtaacaaatatcttttgaaacatttgattaatgatttaagttttctttcttccacagtctgatctctacaccttagttgatggctttgtcactcgaaacaaagctagaactaacccctcgaacccgtcaattgaattgggacccgagttcaagaaggtaaatgaagaaaatgatttcctgacaagtcccatttgtcatttctatcttgactcttgagcctcacttagtgtgtctgtctaacaggtggctactttcttgagccggtttaagtccattcctagtatagtcgagctcgacagccttaaggtgtctggtgatgtctggtttggctcttccattgttctcaaggtatatatgtaaattgttcattagttcacaaggtggtgttgatatttatatatgctcagaatggtttcttttggatttaaagggcaaggtgactgtggcggcaaaatccggtgtgaagcttgaaattccggacagggccgtggtcgagaacaaggtaatgtaacgaatcatggttatgttcaaactccggatgttttctttttcgccacaattatggttgaccgtttgattatgtgttgaaaaactaataaatttatcactcaaacttgaaatttggttttaggcggttatgatcttggttcaggattttcagagtaatcaccaaaatgaaaattaggattgaatttgaggttttatcttttcggctaaaccgaattggcattctacatctttagtttaaacctaaattattttgaattaaaacttaccattgtgttttttttacagaacatcaatggtccagaagacctctgaataaaacaaattcaagtcttcttccctctctcatggaagacacatcttgatactcctttaattggtgtgaaaagatcacaagtggcacagcaaagcaagtttatgaagaaagaataaataatgtttctttttctttttgcagcttagcaaagtcttttcctctttggactttattttaattttgctctttgaattttcccaaaacatcacatttatatgttcgattatatttgggttctatccacaatcatttttctttttgataatccactctttctttccacatgctctttgcttggaaactgatggagtactagtttattacatttatgtcgtctactaatttagattatgtcactgatattcatacagtgtgacatgtttattttcggttttcgtccgtttgatttgtagaattaagttggggactaattcgtatactaatgaagggaactaacacaactactacttatgaaggaaaatgcaagaatgaatactaataaataagacgaatacaactttaattagagttctcattggctaatttgtagaataatcgcaaattcaagttacttgtgtagaattactacatcaccaagattcttattcaaattaattgtcgcgctcccgtgtaaaattattctacaagattcttatgacttctagtatgtaataatttttgcttacgagttttggaaacaaatagatttaattacaaaggtatcattcaaatgaaatagaaaaccacatagtagcctaccaaaaaaaaaaaaaaaacatagtaagatgttcacatgcatacactacacatacgtgtattgaatcttattggtaatctaacatcgtagattcttaattgcactttttaattattgtttttaaaattttcctacttttgtttaaacatgtcacgatctaaagcatgagatagctgtcggttacttgaaaaagtggaataaaaatattatgtgtcattgagataatgagatgttacgtacgcgtccaatttattatgatctaatacatcttatcagataagctcttctttattttccatctttattcaaatcttgacaccaaaaggaaagaatattttttattcaaatctataactcatagattgcatctccttcttactttgtttgattagattgtattagcctctgtcttgtcttttggttagtataagtattgataaattcctttgaccagcaagatatcatcactaaaagattttacattaccaagccatctccaatatcatcaggtcggttttctctcgatatcaattggttacgcatgcatctatcatatcttaaagtttattcttctttcattattcttaacccaaattttaatttttatggaacttactaaaacgttgacgatgatccctactgctagtttgttttgaggcatgcattgaaagtactctttgcggtgttccctcatatattacaggtcaagtg

SEQ ID NO: 10265 - DNA, 3000 bp, Unknown
  misc_feature (1)..( 3000): cDNA_ID_2715342_gDNA_ID_2213640_Annot_ID_132250 3000 nt of promoter + ATG
tgattctgtgccacacccactgtgatttctcttatgcattctatgaattagagcttgtggatacagatttggtaatcagggaacccttttgtttagttgtgttcaatgtctggttattgatttccgggtgaaatccaaattgtctcataggtgcatttccctttttatacaaatatactgatgcatctgaaatctgaactagtagtatgtgcttttgatatgctttgttagacacaagaaccgatcatgaaccatagattgacccataccaagcaatcggcatttgtttactaaatgatcgattagcgtagaatagagtaatcaatcgtccttgaggttctagataattgagtttaagcgtggggtacatcctaagttgctttagatagattagggaaagaatactgatgatcatgtatttgcttctccatgaaccttgttgtgaaacacttcttttcttttcttttctttggctttcacatattctgagttctcgtagttggcttttaaaatgtttgaacttcggccactcttactttcgaaatgtatggacttgaagtagagattgagattgatgtccagtatcttagtgggaggagatacatagccatacttagctgagcagtgatcaaaggtgattttgatttacaaattataatatctggttgtttttggaacatgaacaatatgttagcatctatgtattaagttaacgaaataggaatattcctagcccacaaatctggctttgcaatctacccttagggtatatgattgggtggccctgattagaggaatattattagagtaaagaacaggttattctaactctgtgtcttaccagttgaagcagtagaaaattagttcatttaatttacgcaggaataaggaaagagaagaagcaaagtagaggaaaacattctacttgctctttggtgaagaaaacgtatagattcctccgtatttccatttttctccccaattagttacacatcttgatatgttttttcaaagcgatcatgtgctaaggggccttagaaacggtccataaatacataaaataaagttcatttatcaatcatggcccaaaagtctttgaatctgttcaacgtagttcgacacgtatcgttagattcgttacacagagattctcgatggcctcgttgttcgtgccatctgtttccacccaccacgtaaacaagtatttaaactccgtccatttcttcactctttccacgtgtcgtcatcttgttccatcattcccaaaatatcttatctctgacataaaaaaataccctacttattatataaagaccgcaaaaccagaacccatgttcatgggcgtgacatgttatttgacaaacagagctcattagataatgttttaaattcgaatatccattgcgtaaacattgtaaataaactttaataacgggccgactatataaacacattcattaaaataattatagtcgtataaatgccactgttctctcaactcttaatcaattagaagccgcttagaagaaaaaatgcactatcaagaacagatggagtctcttatgttgggtgaagaacgcagacgcggaaactacaccagagacgtagacgcggacgcagatgaaggtgttaactctccctcttcttttccaaactcccctgatgattcggaccgtcgcagttcttcttcttcttcaaggtaatgagaatcagaaagttccgcttttaacccctggctttagtaattgtcagaacaaaccccaatcattagggtgtattcttaaacaatcttatagtttaggggtataattaatttctgagatctttttcgttgtaaagaaactttttaatcttcctaccacgaatttatgtttgggaaattttgataacaggagaggattgtcgaaacattacaaaggtaaatcacaatcgttcacaacgttggcagaagcgctaactgtggaagatctcgcgaagcctgagaatccattcaacgcaaagctgaagcagcgacgagagagccctcactgtcgtagattatcaggatgcggcggcgcatcggagcgaaatttaagtgtccacgacgtttttctcgctgggaacgatagaccgccgcgactttccggtaacagaccgcctccgagagcccagacgctctcggcggctcatatttcggctttgctcactcgaacctaaaccggaagagaaccgggtttcgtttgggacgatgtttttcaaatcttttgttttctaatcttgtacaagttgttgttactttaaagtgttttgactcttttgataattttgtaagtttcagtttaatttagagagcacttaacagtatatatacaagtaactgaccaattgaaaatgttctgtatttttagatgtgatgaactaagaaaattaaaataatgttctgtatttttagatgtgatgaactaagaaaattaaaattgatgaattaagaaaatgaaaaatctaaattcttagagattgatgggctggactagaggagtcgcagttatctatattgggcctacaatgggctttcttaatttacagcctcttttttttgcggcaaatttacatgtctcttagctttcatatttacaaattttacccacttatactaactagtacaaattccatcatgtattttctttgtcattaaaatacaccttactttttgttttatccaattcatggcagaaattatatgtagaatgctaaagtctagaaatgttttggggtgtattccgaaataattaatagttaggtggttcttttgaaatttcttaatgattattgtataatgctgtcaagatgacgtggagacccatgggatgacgaagttttcactggcacgatccattcttcatcgattcaaactcttggattgatttcagagatcaaaagataacactttctcagatcttaaatttgtttgaattcctgctcttaaaggtttttgattgtgcaattttttcggtaacaatg

SEQ ID NO: 10266 - DNA, 3000 bp, Unknown
  misc_feature (1)..( 3000): cDNA_ID_2686506_gDNA_ID_2213640_Annot_ID_132251 3000 nt of promoter + ATG
tataatcaaggtcctactataggctaatccatttcatgggaattaattattgtttccacagaaaaatgagtattttctctctttatttgttgcttacttaggttaagaaacatcaaataatttggaagaaggaaagtagaaagagaaatagtgtttgataccgtgaagggaagagagcagaggcggtggcgcgtgtggaagcgcgtgtgttaactaggtgtttccttaagctggtgatcaactgaaagctcttcgatctggtggttgccataaaactgtgtttcttcgtcggagattacaagagagagagatacaggaaaatttgtttctactcaagattttgcttcttttagtcagtaatgtatgatgagtttaactccgtttaatgtgtgcttatatatatgcatttattatgtatgctttgaaagagattggattaggagacaaaacactatctgatccacgtgtctcacctaccaaacgttgccgtttcgcttttgacgccgttacttgacaaatcgacactgtgtgaatctaaagccgactttaaagaaacggactacttaatatatctatacttttcttttgggccgagttttagcaaattcagcccatttaagcccattttccctcttaatcgacgtgcgacacgcgttgaccgccacgtgtatcacgttccttacatcttctcttttcttccccagcaaaaaatgagtctgcaaaatagaaaattcaagctgcgattgcgaggaagagaagagacttcagatctagcttgatccggtgataatggcgctcgagtgggtggttttaggttacgcggcggcggctgaagcgattatggtggtgctattgacgatgccaggactcgacggactccgcaagggattagtcgccgtcacgcgtaatctcctcaaaccgtttctctccatagttcctttctgtctcttcctcttaatggacatctactggaaatacgaaactatgccttcgtgcgatggcgattcctgcacaccgtcagagcatcttcgtcaccagaagtccatgatgaaatcccagcgaaacgcgcttctcattgcggctgcacttgtgttctactggatcctttactcagtcaccaatttggttgtcaagatcgagcatcttaaccagaggatcgagaggctcaggaacaaggattgatcgtctcgtctcaggttcaattagtgtaatgccttttttggttatctttcccatttggctaggttttctctttttcaacgtttctgatatgtgtcttttatcttgtggagattgaaggattttatcctacttttctatgtttggattcttatttgtaaccagattgtgattgtttcttgttgaattttgattgactctataatcttctcttcaggataggcattatgcattaatgacacacacatgattgatggttttattgaattgattctgtgccacacccactgtgatttctcttatgcattctatgaattagagcttgtggatacagatttggtaatcagggaacccttttgtttagttgtgttcaatgtctggttattgatttccgggtgaaatccaaattgtctcataggtgcatttccctttttatacaaatatactgatgcatctgaaatctgaactagtagtatgtgcttttgatatgctttgttagacacaagaaccgatcatgaaccatagattgacccataccaagcaatcggcatttgtttactaaatgatcgattagcgtagaatagagtaatcaatcgtccttgaggttctagataattgagtttaagcgtggggtacatcctaagttgctttagatagattagggaaagaatactgatgatcatgtatttgcttctccatgaaccttgttgtgaaacacttcttttcttttcttttctttggctttcacatattctgagttctcgtagttggcttttaaaatgtttgaacttcggccactcttactttcgaaatgtatggacttgaagtagagattgagattgatgtccagtatcttagtgggaggagatacatagccatacttagctgagcagtgatcaaaggtgattttgatttacaaattataatatctggttgtttttggaacatgaacaatatgttagcatctatgtattaagttaacgaaataggaatattcctagcccacaaatctggctttgcaatctacccttagggtatatgattgggtggccctgattagaggaatattattagagtaaagaacaggttattctaactctgtgtcttaccagttgaagcagtagaaaattagttcatttaatttacgcaggaataaggaaagagaagaagcaaagtagaggaaaacattctacttgctctttggtgaagaaaacgtatagattcctccgtatttccatttttctccccaattagttacacatcttgatatgttttttcaaagcgatcatgtgctaaggggccttagaaacggtccataaatacataaaataaagttcatttatcaatcatggcccaaaagtctttgaatctgttcaacgtagttcgacacgtatcgttagattcgttacacagagattctcgatggcctcgttgttcgtgccatctgtttccacccaccacgtaaacaagtatttaaactccgtccatttcttcactctttccacgtgtcgtcatcttgttccatcattcccaaaatatcttatctctgacataaaaaaataccctacttattatataaagaccgcaaaaccagaacccatgttcatgggcgtgacatgttatttgacaaacagagctcattagataatgttttaaattcgaatatccattgcgtaaacattgtaaataaactttaataacgggccgactatataaacacattcattaaaataattatagtcgtataaatgccactgttctctcaactcttaatcaattagaagccgcttagaagaaaaaatgcactatcaagaacagatg

SEQ ID NO: 10267 - DNA, 3000 bp, Unknown
  misc_feature (1)..( 3000): cDNA_ID_3035749_gDNA_ID_2213640_Annot_ID_181210 3000 nt of promoter + ATG
tcttcagagtttcatggattttgtggatagagtattgtctcttcagggcaattcttccattcgtaagttctctctcaagtgtgaaactggtgttcctccagctcgtgtgaatcgttggttgtgtgaggtgctgcagcgtgatgtttcagacattgatctcaccattgatttgggatatggttattatctgcctgaagagttgttcgtgagtgagacactagtcaatctgaaattaaaaagtgcatttaatattgattggtggcctggagctgaaggcacttccttaccaatgcttaaaagtctttgtgtttacggtgtgagggttttttgtgatgatgagcttcaggagcttcttccttgtttccctgtgcttgaagaattacaaatgtctaatatgcagtggcttgattctgatgaaaccgtgtcaagtgcaaccctcacaacgctccatattactggcatccgctctgaaaatcctaagagcatttcttttgatactccaaatctgctttcctttgtctacactgattttgttgcggaggactatccattagttaatatgaaaaacttgtctctggctcgactcgcccttagagcaaatgacgatcaaatcaagcgagtaagagggccaagtaatgatttgttagagtatgatgtcgttcgccactttggcaatgtggtgaagctcatgaatggcatacaaaatgttcaggaacttcacttgtgtcctgatactctcgaggtcagattttctgttttattctttctgctctgctgagtgctgatattaattgtaatatgtctggttgcggtattgtcttacttgtttgttttcagttgctttctgtatgctgtgagtcgatgccagtgttcaacaacgttaaaaagttacttatttacagtgacgaggatcgaggatggcaagcagtgccagttcttctacggaattgtccacgtttagaaactctaatatttgaggtgggaatacaaaccatgaaactacttggacaaagcatgcagttcatacttaaccctgctgtcttgtttctgctttcagggtatcgtgcaccatgtgacagataaatgcggggatgcttgtgactgcattttccgaaaggacaaaggccgttcgctcaaatcttgtccagtgaaagtggtagagattaatgggtttggagtaacaatgaaagagaagtacctgatagagcatttcttggattacttttcgtgtttaaaggagatgaagatctatattaattgtgaagaggatggtgttacacaacaggttatgaagaaccgtgaagtgtctaaacttgtcttggatgagatggaagagtacaacgagttctatagttgcaatgtgaagctattcttgtgtaagaagaagtcgattccacaatgaaagtctctgaagaacaacgcctccttggaattcgacttgagtttagtgttctttaatcggcttgaaaaccgtctcaaaccagaccagttgcaaaacctgtatctgtttcctctttgtcttgatcttaccaacttttgtgtgggggattgttttaaagtgatttgtaatctgttttctttcggttgacttgttaattatctaatgatgttacttgaagtggcaaagatttgcaacattgatcagtggccataaaaactgacgattgtagcctaggatgattgattttgagtccagcacatctctatatagaaaaccatcgaattaaaccggtgatattgaaagaaccggataaataagaccaacgtcttcagttattgaactggtttggatgtcgacagcaggaacaataataatctttaattaaaccagaattatttggtggtaatttacttgctttccataacacatgcgtgattgacgttttttgacggacggtgtatagaaaacacacgttaaaataatcaacctaatattgcggaccaaaagaaattcatgctatcgataaaatctccaaaatacccctaacttccgcgtttccttactgactttccccaaagtaccctccgcttctcctttcccaaattttcattttttatacatcgaatcgaacgcgttatttataataataaaataaaatggagccttttaattcgctaccttgtccgaaaacctcaacacaaaaaggatttcaaaaggttaaaaagaaaaagaaatctccgccggtttcttctctcgccggcgttttgacagtcgtcgtcactgttaccgtctcaaaagcttactatttcagttataaaaaaaacaatcaaagagctaagagatcttcttctttcatcctcgtctttcttcttcgattttcttattattattttaataatttcctagagatctccacaataaaaaaattgggggttatcgttgccatcataacgtgtattagtaaagcagtagtagtgctgatgtatttgctcacgactaagtcccattcctcgtctcttctttttcttctccttaattagtttgggcaacacgatcacagttgattccttcacaatcgatttgttaaattaagaaatcattttcttctctctctctctctctctgtctaaaatatctatcggttgaagaagatctgaagcttaactttgctctgttacagactctcaggtactgtaccatccttgatctcttgtttcgtttgtgtgagagattgtcttatactcggaatgtggaaggatccagtagattttgaatttagattttccctcttaagcctctcctcttttggtggggttatgattttatcaattatcattacttttttgatgtcttttatggtttatttatgattagatttgttcttcttgaagctttagatctattgatgttctgtttgttcacctcttgatgatttggagttaaagatcttgtgtgatttgtaacaatgagtagaagatttgaccaatattactgttttgctttgtttcagggatctgccggctacaaagtccggtggatagtgttattattagacaatg

SEQ ID NO: 10268 - DNA, 3000 bp, Unknown
  misc_feature (1)..( 3000): cDNA_ID_1570947_gDNA_ID_2213640_Annot_ID_181209 3000 nt of promoter + ATG
ggtaaagaaacttcttctctttaaatagattccttacatagaactaaactataactttggaagaacaatgtttaacgagagattccccacatagctcgcatacatcttgctagttccttcttatcttctggttttccgggagagattattgaacttttgaggtcttaactcacttggtattgtttgcaggagctgttaggagctggaatactgttctgtgcatttggagtgatatgtgtcgtgtctctcttcttcatatactacattgtgccagagacaaagggtctcactcttgaagaaattgaagccaaatgtctctaaaaggttactcatcttagctccactttctgtgctgcttcattgcttgaggatctaaatcgcaaacgcaccagccgcatgtgtagtcactagtcagccatttatcgcggaattttcactgtttggatatcttttaaagaatggttgtatctagcggcaaaatttggtgcgttggaaaagttttaaaattcgaaagtttgcttaatttgtattttaaaacacgcattcaaaattttgtgattgtatgaaaataatgtgagattcaaaattttatgaaacaatattgtaacgtcgtcagtgattattattacacgaaacatattatgacgtcataacaagaaacataaataaggtcataaggaaatcaaatcattgtacgattcacaaaagcctataaatacaatcacgtcctcaacgtaggaagaacacaaagatcatcttttgtggtaaaggaacctaaaccggagagaaaaatggcaacctcaggcaatgcgacggtggccaataagcaggtcatactgcgagattacgtcaccggtttccccaaggaatcagacctcatcttcaccgattccaccatcgatttaaagattccggagggatccaagacggttctggtgaagaatctctacttgtcttgcgatccttacatgcgcattcgcatggggaagcccgatcccggcactgctgcgctcgctccacattacattcctggcgaggtacaaaaacgacgtccatagttcacgcatgttctagattgttacggatcaacacgattttgttacgtttcgagcttgtttgttacccacgttttgtgcaaaacaatatcactattaaaacagagatgaatttggaaacgttgttttcaaatttagaaacattgcaatgtttcttttgaatactgtgtgatctaagaaattgtacctttatgattagaagtgattttctcttacttacagtctctggtgctaaaggttttgatgttttgtttgcagccaatttatgggttttcagtgtcaaaagtgatagattctgggcatccagattacaaaaagggagacttactttggggattagttggatggggggagtacagtcttatcactccagatttttcacattacaagatccaacacaccgatgttcccttatcctactacactggacttctcggtatgttatctctgcttctcttttgttcatgtatgtaattcacttgatagtgagaaagctggctatatacaatgcttgatgtacctctctctatgattattggcatgatagaatggtcttagaagctcctaatcatgtagaatagttgttttggttgctaacatatctaataacttggtcaaaactctacaagtttcagtagtttactggtagtcttagaagcatcgctctgtttctgacaggtatgcccggtatgactgcctatgctggattttatgaaatatgttctcctaagaaaggagaaaccgtattcgtgtcagctgcgtctggtgcagttggtcagctcgtgggacaatttgcaaagattatgggctgctatgttgttggaagtgcaggcagtaatgaaaaggtaaccagaattttcttggactctagctattgatccatttccttatcaagagattcacttgtccccttttttctttctccgttgagttttgttataggttgatcttctcaagaacaaattcgggtttgatgatgcattcaattacaaagcagagccagaccttaatgctgccctgaagaggtcagtatactttgagaatgtaggagacaaaatgtgatatagagatctgattcaaaactatgatatctttcttctcacaaggtgtttcccggaaggaatcgacatatactttgagaatgtaggaggcaaaatgctagacgcagtgctcctaaacatgaaactacacggccgtatcgcagtatgtggtatgatctcacagtacaaccttgaggaccaagaaggtgtacacaacctagcaaacgtgatctacaagcggattcggattaaagggttcgtggtctctgattacttcgacaaacacttgaagttcctggattttgtgcttccgtatataagagaagggaagataacgtatgttgaggatgtagttgaaggacttgagaacggaccttcagctttgcttggactattccatggtaagaacgtcggcaaacaactcatagcggttgctcgtgaatgaatcagacgtctttagttggagaatgagttacaagaatttgtttagttgtgtcggaagtttattcttacaacttgaaaataaagcctcttttcataggcgtaactacaattgcatttttggttgtttattttgattctttcattggtctattctacaattttgtacctatagtaaataatataaactcacaatttttatacggatattctgagggatgtttttttttttgaaaaacaagttcaaaatatttcattattttcgatcagaatcaaaaatattttcaaaaatgttcgtttttttttgcattttccaagaaattaaaaaatcgaagaatatgtgcttcaaataagtgggcttatatgtactaaagcccaaataaatgcgttgtttggtacagcttcacgaacaatctctctctcgatagattcttcttacctctgaatttctcgttgttggaaca

SEQ ID NO: 10269 - DNA, 3000 bp, Unknown
  misc_feature (1)..( 3000): cDNA_ID_2715316_gDNA_ID_2213640_Annot_ID_181208 3000 nt of promoter + ATG
ctccttcatctgaaagaaattgaattgttggactaaattttcaaggaaggagaaaggagctgattttggctgcattcttgtatcttgttggagccattgtgactgtagtagcacctgtcttttccatactgataattggacgagttacgtatggcatggggattggactggtaagataaatcacacatctttattgtttgcctgctaaaatgtgcatcatgcatttgactaagtagttaatcatagtcaacctttccacgaatagctacttggtagaaatatgcttcacgctattactgaacatgtgttatccaatgcatccatatactaccagtctatcactcatagaccaacctggcagtgtttgcattcttctgtattcatatattggcttactccttcgatttattgattggtggaattcgggacagagtttacccctatatcgagacagtctgagatatataattcatcctattcttattctcctgtctcactctattttacgaagttgagagccattgtttataaatattgtttactgttcaaatcaagatgtttgttctactgtgagtgaatccatgcagctagggagtacaattttaagcattctttttaactggaaagttgatatgtttccttgcatttagaccatgcacgcggctccaatgtacattgcagagactgctccaagtcaaatacgtggacggatgatatcactaaaggaattctccactgtccttgggatggttgtaagttctcgaagctctgaggattttggaaatttattgccccgtttgaagttacagttttgattccctccattttgaaacctttctgtctaccaagttaaactgacacataattttgtgaaggggggttatggaatcggtagcctttggattacggttatttctggttggcgttacatgtacgcaacaattctcccttttccagttattatgggaactggaatgtgttggctaccagcatctccgaggtggcttttactgcgcgctctccagggacaaggaaatggggagaatcttcaacaggctgcgattagatctctttgtcgccttagagggtctgtcatagctgactcagcagctgaacaagtaaacgaaatattggctgaactttcccttgtgggtgaagacaaagaagctacatttggtgaattatttcgaggcaaatgcttgaaagctctcactatagcaggagggttagtcttgttccaacaggttggtgcagtcaattcatcaaacattccttaagaaaatgaacaataactaaatatatttttattttcgaatgacagataactgggcaaccaagtgtactatattatgcaccatcaatactacaggtttttcttttcatctctacttaagttgaattttttgcactaggaggaaactcgtgatagaaaatcttaacttctttttaccaaaaaattacgtgttagactgccggcttttctgctgcagctgatgcaactcggatctcaattctgctcggcctattgaaggtattcatattcttccatctggtttgacatgtcagatccttttagcaaaaaattatgaaaggattgatacgcgttgtagtacaactggaaatataaatgatatattcctttcgaagacttgatgtgatccttttactgttgcagttggttatgacaggagtttctgtgatagttatcgacagagttggaaggagacctttacttctttgtggtgttagcggaatggtattttatgtcttctattattaattgtttgttccaataagtttcgattacatgaatcggaagctaaacgatccaaaaatatactcgtgtgtaacaggtgatctcattgttcctcctgggatcctactacatgttttataaaaatgtaccagctgttgctgtagctgcattgctactgtatgtaggctgttaccaggttaaattttcttacagatttttctgatcaaagttccattccgtacaatgtcatctgcggctttgtattttcagtaaattttttgatatgatcttaagaggctttccatcaatcttgcagctgtcctttggccctattggttggctgatgatttcagagatatttcccttaaaattaagaggtagaggaatcagtctagcagtgcttgtgaattttggcgcaaacgcacttgtgacattcgctttctcaccgctaaaggtaaagaaacttcttctctttaaatagattccttacatagaactaaactataactttggaagaacaatgtttaacgagagattccccacatagctcgcatacatcttgctagttccttcttatcttctggttttccgggagagattattgaacttttgaggtcttaactcacttggtattgtttgcaggagctgttaggagctggaatactgttctgtgcatttggagtgatatgtgtcgtgtctctcttcttcatatactacattgtgccagagacaaagggtctcactcttgaagaaattgaagccaaatgtctctaaaaggttactcatcttagctccactttctgtgctgcttcattgcttgaggatctaaatcgcaaacgcaccagccgcatgtgtagtcactagtcagccatttatcgcggaattttcactgtttggatatcttttaaagaatggttgtatctagcggcaaaatttggtgcgttggaaaagttttaaaattcgaaagtttgcttaatttgtattttaaaacacgcattcaaaattttgtgattgtatgaaaataatgtgagattcaaaattttatgaaacaatattgtaacgtcgtcagtgattattattacacgaaacatattatgacgtcataacaagaaacataaataaggtcataaggaaatcaaatcattgtacgattcacaaaagcctataaatacaatcacgtcctcaacgtaggaagaacacaaagatcatcttttgtggtaaaggaacctaaaccggagagaaaa

SEQ ID NO: 10270 - DNA, 3000 bp, Unknown
  misc_feature (1)..( 3000): cDNA_ID_3035753_gDNA_ID_2213640_Annot_ID_181207 3000 nt of promoter + ATG
gatggctttgacggtggcgaagagtgcgttggaggcgattagagagaaaggtctcggcggtttcatgaggatgatccgagaagaaggcttcatgttagttctctgtctctcttttccaatctctcttcctctgcttaatttcttcaggattataccctcgatttcattagttagatcccaaataatctagaaatttacaagaattttcggtgtttgttgaagtttgtttgcaatgaatggttatcattcttcggtttttttcactcaaatgttaaattttcttgatgtgaaatgaaaatcaaacactttgtttttggtgaacatcaattttgaacggtgatggtgatgcttgaaattggcataatgtttctggttgcttataagtctaagatcttattgtttgtattccgaggtaatcactagtttatggaatttctctaattgcttctttcaattttttttcttcattgcaggagatgcctaccagatgggaacctcttgtaagtaatttatctttgataattagtgcttagtgtttcacttctttgtggattacgaatatgattcaagtggttgttcaagagttctttacagaccaagttcattttcatattcttatatgtgtatgttgttgtgtgagcgaacataattttgtcagattcattatactgtgaacagagctcgccaattcttgaacagcttactattctttgacttggactgctgatagatgttatgttagttgattttggagttcagtaaagaaacagtgacagtaaatgatggttggtattccagagatagtgtagttacatgtttgaaggaattgacaatattatgccataaggctattcaagttgatgaggaataagagctcaaagattggtgaggcctgttaatggtgatgaaattggcctacaaagtagtcttgaaacttgaaagatcttaagagtcaaaatttatgtgcctctttcaccaagtctataagctggatttgtcgttctcataggctctagatagttggtgcatttggctgaatatagagaaccttttcctcagatcatttctttatgcgtaatatacatataacatatacttagtgttgcttctatgttgtgtattgagatgttggaagcatgtatatatgggtcacatagtatatacacagtatgcttgaatattgtgtcttattaatagtttccccattctttatattgtagcttgctgttgagtcgtattttctgatcaatactgttttatttctatatttgatgaaggcaaactaaaatacataacataggagcgacacttgttggtgttgacaagttcggtaacaaatactaccagaagctaggcgatactcaatacggtatgtagttcctttaacttcatgttttacctatataaaatcatgctttaacctaaaaaaattgatgccactgtaggattcatgatatttgttactaaatattcagggaataacccttttaatattgacttcaaatgtttgtttattctgagtggtacagtcatggaaattgtagccactcactcagcatttgttatttgttagctcactgcatgtatcttaatagaatgtttagtcaagaggcttttacattgaaacaagcaatcactttgtgaacaggtaggcacagatgggtagagtatgcttcaaaggatcgttacaacgcatctcaagtaccagctgaatggcacgggtggcttcatttcatcactgatcacactggcgatgaggtaaaaccaagagccatttcaaattcgctgtctcgttcaatcaatagataatatattgccttgtaacttgataataaataccaatgtctctgtttcaagctcttgagtttgaaaccaaaaaggtatgggcttgagcataaagagaacttctctggagaaggtgatgcatacatctaccattcgaagggacataccttgaacccgggacaaaagaactggactcggtaccaatcatgggtacccaccaagactcagtaagaagatgatattttggttttacgctctgcgagactttctctcgagtgatttgttgttttgtttctgtgtcattttaataaaagctgtcttggatctaaagctggacaattgggtttcggatctggaattgtaattgttactgtgtaataatttgctgattattaagtttcttgtttcttcacctctggctaggaaagtagaaaagttctaataagtagaagtatttaaaaatatattaatcaaataacttcatcgagaaaaatatctttcaagattttttttttcttcgaaaatcttcaaagaaaattgaatacagagtttatgatctaaaaacaaaaaacaaaaaaaaaatcttccaacaaaatcttaatactattaatacatctaaatgagagatttttcccaaaacggattatgataaccagataaatcgaacgcagtgccagcaacaaaacgtttttaatggtaattaaaaatttaaacgagatcagcaccacgttttttaattatccttcttctgtcgtttttatggtcaactttgttataaaaaaaaattataatctttctaaacaaaaaaaaacgaaactggaattttgattaacagaaacatccaatatcaacatttaattggttttacaatttaaaaacaaaaagggtttcacagtttgactctctctatttatgctaacacactattaagactaatttcctatttttttaattgaaaatcagaatcttaatttgaaattaagctccgactatttaaagcttgtccactgttccgttaacatctataatcaccctggcatacatacttgtcgtctcccttcctcacgtttctctcctctgcaaattcgaagctccgttgagctcgaatcagagaagtagctatttcgtacaaccccagaacgatatatttttttctgggtttccttgaacataccacactcacggtcacgggatccataccaagcttccgtagcc

SEQ ID NO: 10271 - DNA, 3000 bp, Unknown
  misc_feature (1)..( 3000): cDNA_ID_2686506_gDNA_ID_2213640_Annot_ID_181197 3000 nt of promoter + ATG
tgttcatatcagtttcattataatcaaggtcctactataggctaatccatttcatgggaattaattattgtttccacagaaaaatgagtattttctctctttatttgttgcttacttaggttaagaaacatcaaataatttggaagaaggaaagtagaaagagaaatagtgtttgataccgtgaagggaagagagcagaggcggtggcgcgtgtggaagcgcgtgtgttaactaggtgtttccttaagctggtgatcaactgaaagctcttcgatctggtggttgccataaaactgtgtttcttcgtcggagattacaagagagagagatacaggaaaatttgtttctactcaagattttgcttcttttagtcagtaatgtatgatgagtttaactccgtttaatgtgtgcttatatatatgcatttattatgtatgctttgaaagagattggattaggagacaaaacactatctgatccacgtgtctcacctaccaaacgttgccgtttcgcttttgacgccgttacttgacaaatcgacactgtgtgaatctaaagccgactttaaagaaacggactacttaatatatctatacttttcttttgggccgagttttagcaaattcagcccatttaagcccattttccctcttaatcgacgtgcgacacgcgttgaccgccacgtgtatcacgttccttacatcttctcttttcttccccagcaaaaaatgagtctgcaaaatagaaaattcaagctgcgattgcgaggaagagaagagacttcagatctagcttgatccggtgataatggcgctcgagtgggtggttttaggttacgcggcggcggctgaagcgattatggtggtgctattgacgatgccaggactcgacggactccgcaagggattagtcgccgtcacgcgtaatctcctcaaaccgtttctctccatagttcctttctgtctcttcctcttaatggacatctactggaaatacgaaactatgccttcgtgcgatggcgattcctgcacaccgtcagagcatcttcgtcaccagaagtccatgatgaaatcccagcgaaacgcgcttctcattgcggctgcacttgtgttctactggatcctttactcagtcaccaatttggttgtcaagatcgagcatcttaaccagaggatcgagaggctcaggaacaaggattgatcgtctcgtctcaggttcaattagtgtaatgccttttttggttatctttcccatttggctaggttttctctttttcaacgtttctgatatgtgtcttttatcttgtggagattgaaggattttatcctacttttctatgtttggattcttatttgtaaccagattgtgattgtttcttgttgaattttgattgactctataatcttctcttcaggataggcattatgcattaatgacacacacatgattgatggttttattgaattgattctgtgccacacccactgtgatttctcttatgcattctatgaattagagcttgtggatacagatttggtaatcagggaacccttttgtttagttgtgttcaatgtctggttattgatttccgggtgaaatccaaattgtctcataggtgcatttccctttttatacaaatatactgatgcatctgaaatctgaactagtagtatgtgcttttgatatgctttgttagacacaagaaccgatcatgaaccatagattgacccataccaagcaatcggcatttgtttactaaatgatcgattagcgtagaatagagtaatcaatcgtccttgaggttctagataattgagtttaagcgtggggtacatcctaagttgctttagatagattagggaaagaatactgatgatcatgtatttgcttctccatgaaccttgttgtgaaacacttcttttcttttcttttctttggctttcacatattctgagttctcgtagttggcttttaaaatgtttgaacttcggccactcttactttcgaaatgtatggacttgaagtagagattgagattgatgtccagtatcttagtgggaggagatacatagccatacttagctgagcagtgatcaaaggtgattttgatttacaaattataatatctggttgtttttggaacatgaacaatatgttagcatctatgtattaagttaacgaaataggaatattcctagcccacaaatctggctttgcaatctacccttagggtatatgattgggtggccctgattagaggaatattattagagtaaagaacaggttattctaactctgtgtcttaccagttgaagcagtagaaaattagttcatttaatttacgcaggaataaggaaagagaagaagcaaagtagaggaaaacattctacttgctctttggtgaagaaaacgtatagattcctccgtatttccatttttctccccaattagttacacatcttgatatgttttttcaaagcgatcatgtgctaaggggccttagaaacggtccataaatacataaaataaagttcatttatcaatcatggcccaaaagtctttgaatctgttcaacgtagttcgacacgtatcgttagattcgttacacagagattctcgatggcctcgttgttcgtgccatctgtttccacccaccacgtaaacaagtatttaaactccgtccatttcttcactctttccacgtgtcgtcatcttgttccatcattcccaaaatatcttatctctgacataaaaaaataccctacttattatataaagaccgcaaaaccagaacccatgttcatgggcgtgacatgttatttgacaaacagagctcattagataatgttttaaattcgaatatccattgcgtaaacattgtaaataaactttaataacgggccgactatataaacacattcattaaaataattatagtcgtataaatgccactgttctctcaactcttaatcaattagaagccgcttagaagaaaaaatg

SEQ ID NO: 10272 - DNA, 3000 bp, Unknown; identical to SEQ ID NO: 10265
  misc_feature (1)..( 3000): cDNA_ID_3035771_gDNA_ID_2213640_Annot_ID_181196 3000 nt of promoter + ATG

SEQ ID NO: 10273 - DNA, 3000 bp, Unknown; identical to SEQ ID NO: 10263
  misc_feature (1)..( 3000): cDNA_ID_3035783_gDNA_ID_2213640_Annot_ID_181189 3000 nt of promoter + ATG

SEQ ID NO: 10274 - DNA, 3000 bp, Unknown
  misc_feature (1)..( 3000): cDNA_ID_3035787_gDNA_ID_2213640_Annot_ID_181188 3000 nt of promoter + ATG
ggggttttttgttgttgttgtaggatcttgctgggtagtgtgagcaatcatgtggtgacaaatgcaacatgtcctgtcacagttgttaaggctaattaaagtgtctcttgttctttaattggacccagttaataacattagtagttacgtgtgtcactcatgcattgttttgacatttatacgtttgttgccttctacaaatttgtgtgaaactgattggtactgtttcattaataaatttcagttaaatgatatttactctctttttgtttgtgatttgtgaacgttacgtaaaaatcacaaaaaaaaataattagtttttctaattcattcatgaaaaatcttcgtggactaaacaaaaaagatgtgaaaaaacaatccccatgtttgatccagattaattcgatccgttaatcaaaagatggtcttaatgagcataattcggggataaagtcgaatatagaaatagttgttgaaaagagaaatgtttggattgaatcttgtcagcttgatgtgtggttgatcacatgaccaatctatgtatggaatatggatgtcgtgtgtgctgattcattcagatatgacaagtggtggatgggataattcacgatatgggccagattatgagtttgttttaacttgaatggcaggccgaatcataatggattcatgatcattatgtttgatcatagcctagttggacttgtatccctagatcatgatcaaagtgggcttataaacatggccgagatgggtagttctaaatcaatttgttggatcagaagaaatcaagaaagagacagtcgttggagcttttctgatctgcttttggatgatcacccattagattgaaaattaaatttttcattctccgctcgatggctgatttgtaaacttgttccttcatgatagaaatttatgggctaaatacagaaagtgaacgttagaatttggttttgggtagaagaacaactatcatatgattaaagattaatcagatgatctaaagatagttttggtgagtacagttcggaaatatagccgttgatgcatgatgtgtgactttcaaaaatagaaatagccgttggatttaaatttaaggtcaatgaacaactgtcagatatgcttaaaattaatctaatgatccaagaatggttttggtcaatacttcgagtatatatagttgctggtacgtgatatgtgaccttgcttcaaatataaaacgagccgttgaattttaaatttgggtggatgaacaacgtactgtcaggtatgatgattaagattaattcaatgatccaaaatccaaatattgtttcggtagacggtggtacttaattagtgagactttcaaatattaaaaagagatgttgaatttaaattttagtttgctcaaaagaaaaagtttctagtaaaaacaaaacaaattatgtttaattaaggtatgtaatatggttatgcataagactagtgttgatgagatgattcacgatgtcgtatggattggattatgagtattcttaaactcgaatgggttgccaaatcataatggcctcattaatttattgtactaaactgaattataatatatgttcttgagcgaaaaaaatccataatttataatttcctatctagctatattggattgatccggctgttgacaatctggtcctgatttgaatcggtttctcgaatcatgcaccgtaatcgtagtctagccatttaggattgtatcactaacagtagtgtcactttaaaatgttggagatttagactatgaatagtaatataaaccgcacccaaaaccgcactgcaacaggtaacagtatcaaaatctctctctatatatatgtattttcgttactatttgaaccgcaccgcacttctcccacaccgcaaaacgcagtcatcattcggacccttaagacaaaaataataataacaatttatatagaattttaccaaaattgatgtcaaaaagagaattttttattattattttaaaacctaaaaactaatacaatatagagacgtaagaaaaatgccatcttttttctttcctcatgctacacacctttagatcaatgtttcctatagattttacaatttttctttccacattactaatttgagtatttgcaatctgttgaataagttgtcattgttcttaaaaaggtacttttcaataaattgtcatttctatctatataatcagtgatatctttccattctcttattttataaataagttagcataagaaaatatataggactaaaaccatttaattaatatttaaaacactaattatgaatttgtttaattttttactaaaaatttatctgattagcacaagctttttgtaataaagtttacaaacctttttgtttgtacaatagacatttagctagatatcaaaatttaacatataaacaatagaaaacatttatgacaaaaaacaatttagaaaacatatcaaaaagcctaattgacacttgacattgttgaaactattgatttaacacattgtattttcatattatatataaatttatattcacctttcaaaaatacatttaataattataaactaaataaaaaatgtttgtttgacttgttttatttcagccttaaaaataaatcgaccaataatatttagaaagaaaatcttatctcaataatttaagttttgcttagatttaatttatttgttcacctcaatgcattttatacaaaacaaatattttatatttaatacatatgtgaattaaatattaccttttaacaaataatgtaattaatatcttttaacaaataattttacccactcaaatagtaatatctatatttccccccttcttccctttttatgaattaatgtatattttaaaaaaatatccttaagaccaccctttttcccctataaatactgattaacttgtgccttaacaaaaacaaaaaattattcgcaaacacaaaaaaaattgttagtgaagaacaaa

SEQ ID NO: 10275 - DNA, 469 bp, Unknown
  misc_feature (1)..( 469): cDNA_ID_2714915_gDNA_ID_2213640_Annot_ID_181211 3000 nt of promoter + ATG
cttccttcatacgaggaggtcacagtaaatggtgaaaggaagtcgttggtaactttcttaacttggtttacatgatggttagagcaagtcgtttagagtgggttttactttttcagttgcataatattttcatgttgggattgaaataaaagtataatcacatgtatacaaaaaccaaacagtataacacgtcaaatcacattagaataattaattaaattttatcgataaaaatcaccaaaataccaataaattccgcactccgtctcttccagtctcagtcagtcgctattctctcatcgacgtttcattgccctaatttgaagattggcctctgtagcaaggtatgatgttgctctcagtctcaaaataaacaatctctctgcttcaatttcgagtggaactgtttggtttgggaaattgatttctttgctttgcgttgtgtatttttttctcttcagagaagatg

SEQ ID NO: 10276 - DNA, 3000 bp, Unknown; identical to SEQ ID NO: 10261
  misc_feature (1)..( 3000): cDNA_ID_1033038_gDNA_ID_2213640_Annot_ID_181187 3000 nt of promoter + ATG

SEQ ID NO: 10277 - DNA, 3000 bp, Unknown
  misc_feature (1)..( 3000): cDNA_ID_2715324_gDNA_ID_2213640_Annot_ID_132257 3000 nt of promoter + ATG
ctcttgactaaacattctattaagatacatgcagtgagctaacaaataacaaatgctgagtgagtggctacaatttccatgactgtaccactcagaataaacaaacatttgaagtcaatattaaaagggttattccctgaatatttagtaacaaatatcatgaatcctacagtggcatcaatttttttaggttaaagcatgattttatataggtaaaacatgaagttaaaggaactacataccgtattgagtatcgcctagcttctggtagtatttgttaccgaacttgtcaacaccaacaagtgtcgctcctatgttatgtattttagtttgccttcatcaaatatagaaataaaacagtattgatcagaaaatacgactcaacagcaagctacaatataaagaatggggaaactattaataagacacaatattcaagcatactgtgtatatactatgtgacccatatatacatgcttccaacatctcaatacacaacatagaagcaacactaagtatatgttatatgtatattacgcataaagaaatgatctgaggaaaaggttctctatattcagccaaatgcaccaactatctagagcctatgagaacgacaaatccagcttatagacttggtgaaagaggcacataaattttgactcttaagatctttcaagtttcaagactactttgtaggccaatttcatcaccattaacaggcctcaccaatctttgagctcttattcctcatcaacttgaatagccttatggcataatattgtcaattccttcaaacatgtaactacactatctctggaataccaaccatcatttactgtcactgtttctttactgaactccaaaatcaactaacataacatctatcagcagtccaagtcaaagaatagtaagctgttcaagaattggcgagctctgttcacagtataatgaatctgacaaaattatgttcgctcacacaacaacatacacatataagaatatgaaaatgaacttggtctgtaaagaactcttgaacaaccacttgaatcatattcgtaatccacaaagaagtgaaacactaagcactaattatcaaagataaattacttacaagaggttcccatctggtaggcatctcctgcaatgaagaaaaaaaattgaaagaagcaattagagaaattccataaactagtgattacctcggaatacaaacaataagatcttagacttataagcaaccagaaacattatgccaatttcaagcatcaccatcaccgttcaaaattgatgttcaccaaaaacaaagtgtttgattttcatttcacatcaagaaaatttaacatttgagtgaaaaaaaccgaagaatgataaccattcattgcaaacaaacttcaacaaacaccgaaaattcttgtaaatttctagattatttgggatctaactaatgaaatcgagggtataatcctgaagaaattaagcagaggaagagagattggaaaagagagacagagaactaacatgaagccttcttctcggatcatcctcatgaaaccgccgagacctttctctctaatcgcctccaacgcactcttcgccaccgtcaaagccatcgtcttccgctatcgctctctctctctcggaatcgggatttgatttcgttgtcgaaataacaagggacatgatgacgattgctaaacgcatcgttttgtatttgttgggctacgctttgtgtttacctgggccacttgctcgctatggccttccccatgatgatgtggcagagaagcatatgaatatacattttctactatgatttggtatatcaagaaatacaagatttaaatctgcttttcccactttcctcaaagcattagatcatacattcatagggttgtaattttgatttctcagtgaataagaagagatgatgtgtatttattcataaggagttgttcaaaaataaaaaaaggaaattcattttgtatatgttatcaaaaaaaaggaaatcactacgcattataaaacccaaaaaaaaaaaaaaaaaggccttttaagttttaacactacgcattccaatttgctatgcattagcttcatagctaaatctgtttttcccactttcctcaaagcatttgatgatcataacattaacagttcacttctcttcctctcttagtaaatcccattagccattttacaagctaagagtacacaacgtattataatcatatcttcacgaatggtaaactcgatttcaatataatgatagatctcctattgttaaggtttttccaagcttactccttagcttagatttcatgggatcaaatgaatactactacttagtaaagttccgtgttcaaaaaaagaaagaaagtaaagttaatatttggggaaaatgctattaattaattaatgcaaacataataatatgacataaatacataaatccaaaaaaaaaaaaaacactcaattttattttatataataatatcatacaaaatctaataatgaacatcattaaataaaaataataaagttctacaacttagtgattgaatatagcttatttaaaaataaaacttaataatgtttttttttgtaaaacctcaaaaagtgttggaaatttgattaatctatatgattgcatttcattttataataatctttccttaaagtaaatctttgaataaaataaacaatcctagtaaatatttgagtagcgtagactgtagagtatacaaattcaaaccctgaggcggtcaacgaaaaaaaaagaagagaaaacaaaattagaagtcaggcctttttctcagcgtcgcctgcgtcaatcttaagctgtctttcaaaaacctctctcaatatttaaactgcctctcctccgtaccgctctacccaaaaaaaaactctctccctctctctcgaactttgtctccctccattgatttcactctcgtatcgagtctcttcttctagaatttgcgcatcctctccgccatg

SEQ ID NO: 10278 - DNA, 3000 bp, Unknown
  misc_feature (1)..( 3000): cDNA_ID_3035753_gDNA_ID_2213640_Annot_ID_132259 3000 nt of promoter + ATG
tgaacccgggacaaaagaactggactcggtaccaatcatgggtacccaccaagactcagtaagaagatgatattttggttttacgctctgcgagactttctctcgagtgatttgttgttttgtttctgtgtcattttaataaaagctgtcttggatctaaagctggacaattgggtttcggatctggaattgtaattgttactgtgtaataatttgctgattattaagtttcttgtttcttcacctctggctaggaaagtagaaaagttctaataagtagaagtatttaaaaatatattaatcaaataacttcatcgagaaaaatatctttcaagattttttttttcttcgaaaatcttcaaagaaaattgaatacagagtttatgatctaaaaacaaaaaacaaaaaaaaaatcttccaacaaaatcttaatactattaatacatctaaatgagagatttttcccaaaacggattatgataaccagataaatcgaacgcagtgccagcaacaaaacgtttttaatggtaattaaaaatttaaacgagatcagcaccacgttttttaattatccttcttctgtcgtttttatggtcaactttgttataaaaaaaaattataatctttctaaacaaaaaaaaacgaaactggaattttgattaacagaaacatccaatatcaacatttaattggttttacaatttaaaaacaaaaagggtttcacagtttgactctctctatttatgctaacacactattaagactaatttcctatttttttaattgaaaatcagaatcttaatttgaaattaagctccgactatttaaagcttgtccactgttccgttaacatctataatcaccctggcatacatacttgtcgtctcccttcctcacgtttctctcctctgcaaattcgaagctccgttgagctcgaatcagagaagtagctatttcgtacaaccccagaacgatatatttttttctgggtttccttgaacataccacactcacggtcacgggatccataccaagcttccgtagccatggggtttgatcccgagaaccaatcgatctcttccgttggacaggtttcgcttttctcattatcgtcttcttttccccattcttctttcggtttaggtttccgatagcaaattgtactgatttttgttggttcttctcccggtcggctttgaagacttttgattgcaatgtatatcttagggtttggcttgattttagatatcctttttatgaagtgattgtggattttgatgtctctgtaatgtgtggagcttgtgaaaattgggatttcaattttaagaccttagcttctgggttttggaataacgattctatcctaaatctctctaatttggtatcaagtcactttctgatgcaaaattcctgaaactatatattatgtaggttgttggtgattcttcttcaggtgggattactgctgaaaaggaacctttgttaaaggaaaaccacagcccagagaactactctgttcttgcagccattcctccgtgagtctctctcgttctctcttgtttattagtcatcaatttgtggtcccagattgttttgtttatttgctatttattgtttgttactactatttctgctgaaagcaagtgggaatcttttggatatgcacatgatactgatttttctaaaagcatgctaagaacgtaagaacgtaacaagtcatttattgcaggtttctctttccagctcttggagcattgctttttggttatgaaattggtgcaacatcttgtgctatcatgtctcttaaggtaatggtttaaccttgtctaaaactgtgcttctatactcaagtttgatttttttagctttctcatatctttagcagttaaatgacgctacttcatagttcatgcctgcatttgcactgccattacgtttccttggatttctcctgcatagttgttatgcatgtacatctgttcgattgtctaagcctattaaattctgaatgactaatctgcttttgcctcagtcgcctactctaagtggaatttcatggtacgacttgtcttcagtggatgttggtataattgtgagtctacctttcttggatcttctacatgttggttattgcactattttttgttcttattttctccctaaattgggaagctgtgatctttcttgtggaaggacaaagaaatttgcttacgacaattttcatacttttgtgcagaccagtggctcactgtatggtgccttaattggctccattgttgcatttagtgttgccgacattataggttggtttttctcaactgtcttcatctgagtatgtagcagcagtctccttcatctgaaagaaattgaattgttggactaaattttcaaggaaggagaaaggagctgattttggctgcattcttgtatcttgttggagccattgtgactgtagtagcacctgtcttttccatactgataattggacgagttacgtatggcatggggattggactggtaagataaatcacacatctttattgtttgcctgctaaaatgtgcatcatgcatttgactaagtagttaatcatagtcaacctttccacgaatagctacttggtagaaatatgcttcacgctattactgaacatgtgttatccaatgcatccatatactaccagtctatcactcatagaccaacctggcagtgtttgcattcttctgtattcatatattggcttactccttcgatttattgattggtggaattcgggacagagtttacccctatatcgagacagtctgagatatataattcatcctattcttattctcctgtctcactctattttacgaagttgagagccattgtttataaatattgtttactgttcaaatcaagatgtttgttctactgtgagtgaatccatgcagctagggagtacaattttaagcattctttttaactggaaagttgatatgtttccttgcatttagacc

SEQ ID NO: 10279 - DNA, 3000 bp, Unknown; identical to SEQ ID NO: 10269
  misc_feature (1)..( 3000): cDNA_ID_2715316_gDNA_ID_2213640_Annot_ID_132260 3000 nt of promoter + ATG

SEQ ID NO: 10280 - DNA, 3000 bp, Unknown; identical to SEQ ID NO: 10268
  misc_feature (1)..( 3000): cDNA_ID_1570947_gDNA_ID_2213640_Annot_ID_132261 3000 nt of promoter + ATG

SEQ ID NO: 10281 - DNA, 3000 bp, Unknown
  misc_feature (1)..( 3000): cDNA_ID_3035749_gDNA_ID_2213640_Annot_ID_132262 3000 nt of promoter + ATG
gctatgtatcagatgatggaggagcgcttttgacattcgaagccatggctgaagcagcgagttttgcaaacatgtgggttcctttctgtcgtaaacacaatatcgagccgaggaatccggattcatactttagtcttaaaagagatccttacaagaacaaagtgaaggctgattttgttaaggatcgaagacgggtgaagcgtgagtatgatgagtttaaggttaggatcaacagcttgcctgactcgatcaggcgccgttctgatgcttatcacgcaagggaagagattaaggccatgaagctgcaaagacaaaacagagatgaagagatagtagagccagtcaagattcctaaagctacatggatggctgatggtactcattggcctggaacttggataaattctggtcctgaccattcccgtagtgaccatgctggtatcattcaggtacaatttgttaagttcagttgtttatacttatttggttaagggcattttatttcattcataactgaactggagccggagtttggttcagttgtgaattatcttataacaaattttcggttcgatttagtttgacaaattttggttactttaggtttacttattttgcttgcaatatggtttggttcagtttctatgccaactctaagatcattgtttttcaaaattttgataaatgcaggtgatgttgaagccgccaagtgatgagccattacatggagtgtctgaagggttcttagatcttacagatgttgacattcgtcttccgcttcttgtctatgtttcgcgtgagaagcgaccgggttatgatcataacaagaaagcaggagccatgaatgccctggtccgagcttctgcaattatgtccaacggtccattcatactcaatcttgattgtgatcattacatatacaactctcaagctttaagagaaggaatgtgtttcatgatggatcgaggtggtgaccggctttgctatgttcagttcccacaacggtttgaaggtattgacccatcagatcgttatgcgaatcacaacacagtcttctttgatgtgaacatgagagctcttgatgggttgatgggtcctgtttatgtcggaacgggttgtctctttagaagaatcgcgttgtacggattcgatccacctcgggctaaagaacaccatcccggattctgcagttgctgcttctctcgcaagaagaagaaaagccgtgtgccagaagaaaaccgatctttgagaatgggtggtgactcagatgatgatgaagagatgaatctttctttggttccgaagaaattcggaaactccactttccttatcgattcaatcccggttgccgagttccaaggtcgtcctcttgcggatcacccagctgtgcaaaacggacgaccacccggagctctcaccattcctcgcgagcttcttgatgcatcaactgtggcagaagccatagccgtcatctcttgttggtacgaggataaaaccgagtggggatctcggatcggttggatttatggatctgtcacggaagatgtggtcacaggttatagaatgcataaccgaggctggaaatcggtttactgtgtgaccaaaagggatgctttccgtggcacagctccaatcaacttgacggataggcttcaccaggttctccgatgggctactggctcggtagagatcttcttctcaagaaacaatgccttctttgctagcccgagaatgaaaatcctccagagaatcgcttacctaaacgttggaatctacccgttcacatcattcttcctcatagtctactgcttcctcccagctctctccctattctcaggccagttcatagtccaaacactcaatgtcacattccttgtctacctcttaatcatctccattacgctctgcttactcgctctcctcgagatcaaatggtcaggaatctcactcgaggaatggtggcgaaacgagcagttctggctcattggaggaacaagcgctcacttagccgcggttatccaagggctgctcaaagttgttgccggaatcgaaatctcattcacattgacatctaaatccggaggagaggatgtagacgacgaatttgcggatctctacattgtgaaatggacatccctcatgatcccaccaatcacaatcatgatggtgaacctaatcgccatcgcggtcgggtttagcaggacgatatacagtgtgattccgcagtggagtaagttgattggaggagtgttcttcagtttctgggtactggctcatctttatccattcgctaaagggcttatgggaagaagaggaaggactccgaccattgtatatgtctggtctggacttgttgccatcaccatatctctgctttgggttgccattaatccacctgctggttccactcaaatcggaggatctttcactttcccatgattcataggtttggtttctcaaaaattctctttctttagtcctttctaaagatggagacagagattggccaagaaacacacaagtatagttgagccaaaatatagagcaagtcaaagaacttctctcattgtcttttattttttgtttttttatttggttgggaaaggacattttttatttgtctttttaaattttgtaatcttttatctgttgatggaattatttatgctactactgttaattatttattcagttcaaattcaagtgccaaagttttgttaagttttaatttatttgctttcataaaccttttaaggaaaaggaaacaaaacgggtcgggttatcgggtcaagttatccagaaaccgatccaacacttgtcccgccgaaaccctacctaaaccttgagaaccttctcgtcgactttgagatttctaatggcaacagatattccgacttcgaatttcttcttctccaagccaatttcttctacataaatcacattttcttacagtattctcgaatctcgaagaaccctaagtctcgtttcccaggaataatg

SEQ ID NO: 10282 - DNA, 3000 bp, Unknown; identical to SEQ ID NO: 10267
  misc_feature (1)..( 3000): cDNA_ID_2715304_gDNA_ID_2213640_Annot_ID_132263 3000 nt of promoter + ATG

SEQ ID NO: 10283 - DNA, 469 bp, Unknown; identical to SEQ ID NO: 10275
  misc_feature (1)..( 469): cDNA_ID_2714915_gDNA_ID_2213640_Annot_ID_132264 3000 nt of promoter + ATG

SEQ ID NO: 10284 - DNA, 3000 bp, Unknown
  misc_feature (1)..( 3000): cDNA_ID_2715429_gDNA_ID_2213641_Annot_ID_132269 3000 nt of promoter + ATG
ttacaagtgtatttatctaataaatctggttcgttttctgattgtttcaagggtttcgatgtggagtttgtggaagtggtgcgaggtatattttcagcaggatcaaggtcaaagtcgttcatcacattcatggctagggagaaacctgatggacctcctgttgagtatcaagctaaggtttggtgtacggttgttcgaaaccagaactatcccatcctctgtagacgggctctcacaacaaagcctccaagccaaaactagtaaaggtatggtttttgacccagactttcttttgctgttgatactttatatagcctgaattgttgtgcgtatttggatatattaagttttagatttagaaagataggcagattaataaccatctcagcgaattgtcttggctcatcatttctgtcactacaattatctaacttggaggatagctgaagtgcattgtcttattactatttgtttccatgctagtgagtatagggattaagggtgagaagtatcttctgactgtttagatctatttgaaactgtaaactgtctgtgcatgacttcagaataagatatctctgtaggtagacaaggagatattttcctcttctaaagtgattctagaaggccatttttattagagtcttaagttgctgacttgtttttatcactgttctctttcgtctgggactggaaattagactagcagctgatcgagaagatggaattcgctggctgatgcagaggctggagttcgcaccaggtcatctaatatgaagttgtttgtattcgacttagtcgtactaaatcacttctattgtgttgtgccaatatttatgttttaggtacttatctctatgttagctaaataactggtctaagagacttcaaattaaatgtttgtgttttataactttggaagcatggcatgtgtctcctttgatgcagtatcctcgcttttgggatttctttcttttattatgttttcatattatgtatgacacatgagtaaaaatcaaacatatccatccatatactaatatcaattacaaggatctaacaaaatgtaaaatcatggtagatagaaaacaataactttaacatattcaagtgatcaatgtagcaacctttctttcttcgatcacgctctgtacgaagtcaagggcgaatggaacaatttaattggccactctggcaatgatgtagcaatttcactgcgtggtgtttgaacacttgcaacattgtgtttactctcactttcattttgctaatacatttgctcagctaaaaataaataatttttgaatttttcttgcgttatatatattgttatttttatgttaaattaagatcaaaataaataaatttagagagcaatttttatttaatttaaagataaacacttatggtcgcacaaatatttgtgatattggtttaaatcgataagaaccgtttttgttaatcaaaaccgggccaaccctaaaaagctaaacgccggttagactaaaagagccaaccgccggataaaccaaaaaaacaacggcgtttgttttttcttctccttcttcttcaccctgcgtcgtgctctctcgaattcccaggtcagctacttggattcgtactctcaaaaaaatattgctttcgcattcctcttgtggtttcgtttctaaacgcgagtttctcccttttctaaggtctgtgttgatcccacccaaagtagagagaattaaacctaactgttcccgttttattgtagaattactgtacatatagatttaagtcgtgatctagttgtcgagaggctctgtgcagttgcgtagttcgcttaccctcagaaacgggctttgctgagtgatgtcaattagtagctagttgtgagctctatatgcgaaagttgtgtatttgtctctgattgctctatttctgatttgataaatctcagattttagcaaccagtctgaatcaattttatgaagacctaagagacctagcaattcaagaagaccaccaatcaatcctggaggcatggtacgatctgagccttgtgttctgttcgctcagacctttgttcatcctcaattggacgaatatgttgacgaggtaaccttaatttttagttaatgatacacttcaaatactgccctgttcttttggctagggagtgcctatgttggattagggttctgttttactagagtctcttaaacctggttaggaaatgcttgggtgaattactgactacttttacgggattgtcggaacaacaagtattatatgtggtggttttgtcattcaatggcagaagttacttgtttggtttcacgcttctgcggatttattttatgtttcctttaattcttataggtgatatttgctgagccagtaatcatcacagcttgcgaatttttggagcagaatgcttcctcatcttctcaagctgtttctcttgtcgggtatgttctttttttgactgtgtgttcttatatttctttctatattttaaccattgaggatcttgaagtagtaatatccaccattagaagtcttgttgaaatgcatggtcccatactctgtagctgtgatctctattgactcttaatgttaagccttttttttggatgtaaaagttcacgattggctattttcttgtcactggaaggtgaatgataagaaacctaaatttgtgtagaaaatctgaataacccaaacttgaaactgtaacaaaaaactgaactttgcagacatgatatttcgatccagtggtttcgatgaaatgtccagagtccagactctaaagttcagcttctttatcattaataaactttagtcactttcagagaaatctagattttgagtcaattcgtcttctagaaacaaaaatagtgaagcaatattgttagctgaaccacttgtagttagattttcagctaaaatgccagctttatattctttgtgagtgacttaatgtctgacaacatttcttgagcgtgggtgatgtct

SEQ ID NO: 10285 - DNA, 3000 bp, Unknown
  misc_feature (1)..( 3000): cDNA_ID_2715425_gDNA_ID_2213641_Annot_ID_132270 3000 nt of promoter + ATG
agtcaattgtagtggtggtgttggaatgggataggtaaaggtttcctagcaacttgagatgcgagaagatattaaagtcaacttggccttggatgttgaaatgggaaaggtcaagtgtcctaaggttgactaatctggaaatagatgtagggattggacctctcaagttgttaccgccaagttgtaacactagtaaattagacggtgaagatatattcccaaactcaagagtgccgctgagttggttattgtccaaaaaaataagagttatagaaggaatggtgaagagagaggaagggatagttccaacgaaattgtttccacttgccgaaaaggactccaagatggagagtgaagtgatgttaggaggaagcgtgcctgtgaactgattgtgagagagtgatatctctgacaactttgtaagattgattacttcaagtgggaggttaccactaagcttattattatcaagacgtaaaatagacaattggttcaaactgccaaaagaagaagggatttcaccaacaaaattgttagtagataggtcgagaaaggtgagatacgacagatttccaagtgaagatgggatttcaccaccaaaattgttatcatagaggtggagagaggtgaggtgaaaaaggtttccaagggaagaaggaatccaaccactgaagttatttccagaaaggtcgagagtggtgagatgagaaaggtttccaatagaagatgagatttgaccactcaaatgattatatgaaaggtctagagtggttagaaaatggaaattttgaagcatagaaagattactgttggaatgaaaccagccatggaggcagctgcacataaggtctatctcgattacttccccggtcttagcatcgcaagtaataccatcccaatgacaacagtcgctgccattctcccatgactttgtcttcagaggacttggacaaccaaaacaaggcttcttaatcttaaactcgttcttgaactcgagaagtgcatctctttgttcgaaatgacataagtgtatattaggaacagcaaaaacacctcgaaaattagaaaagaacaagaagagaaaataaaaagtaataggaatgagactcattgacttctatgaggttttgcttctcctttaaaatgaaagagcaaaaatgggaattgtgatggttatatggtttcatgccaatctctttatatacataataatagactctgaactcgacaaagattaaaatcaactcagcttgtatttttaccaagtcttcttgacgttgaacagagagtagtaaaaagtctttgtccattaagcactacctcccataatttatggtccatgaaatgtcttcgtcttcttgtatgtttgcgttctttgccgacgtctttcatgactgggcctaacttaagtattttcacttttaattaacgaaagcccaattcggaatgcacctaacgatcatgattgctacttctttcttcggttccctgattttaagctttcttatttgcaaaacaaagtaaagattattacatttaaatagcataaaatcgggcctagttgatcttttactttgccgtcaattcatcaagaaacgttttcctcatgttttttcttcggcagaagttatatatgccgatgaaatgaatcctaattaaatttcgttaaagtaaattgtcggccttaggcccaaagctcttcttgtgtacccattgagccaaccctcatcaacaacagatggtcgaataataacatgggctttgatgatttctaatagaaaacagcaatggaaattttggataaagcaaaaatgcaagtcaaaacctacaaaatttagtatcgtccaaatattattctaggtaaggaatctcttaatccatgctccaaatcgctggtttgaaaacataaaataaactttcactagaaaatgcattaagataactgaaaatgtgaaaaggtaacccagaaaattttacctggttttgtagtatgtaattcttttggtcttctttattagtttttttaataaatatttatggccgttacattttcatctgaaacattcaaatcaacatctgctaaaaatagtaacttcataatcgttttatttcccactgattcatcattaaataaaaatatccagggatcagattataaccgtccgatgcaaaacattacggtacgcttgaccacagagcatagctgtctcacgtgctcacgcaatcataccaaatattaaaagtcaaaaaagcccaatagcagctgcaactaccaccagaagcggtcgagggtaatatagtcattacacaaaaagttctcacctccccaacgcgtagcctcttaactaaaaccaaatcaaaatacctttccccaattttggctcattaccaaaaaaaaaaaaaatagttgtaaatagagagaaaaataaggcggggaaaaggatcacgattcacaaaattagtggaaaaatcataagtgtttcgtcttcttcatcggaggttcgttttttttttctaattgttcttctctctcgttcttctgtgtatgtattataggagctgtaatttaattttgtattattattttttcgtgttttgactttttatttttctctcttttcattaaatttatgtgtttccaggggtgatttctgcatttggatagattttgatttctattataggatcggaatttaaacactagcatttaagtagtaattttgggtaactgtagaatttctatggtcggaatcaaatcgataccttttctgattttcaattacgtttcttgatttcttgtttgtttttgggttgatttgcagatctcgtgctctgaattcgagaattgaggtttgagatttctgggtgatttggtctaggctatataagtttttagaacaagacggagctgaaggaatcattgtgtttttggttgatgagtttagatttagattagtgccttagtggtttgtttctatatcttattttgaggagcatatg

SEQ ID NO: 10286 - DNA, 3000 bp, Unknown
  misc_feature (1)..( 3000): cDNA_ID_2685632_gDNA_ID_2213641_Annot_ID_132273 3000 nt of promoter + ATG
aactttcatgtttatagtataatgggcctccttggcccaatattctcgaaacattggactattggagtttctcgtcatcctcaaagcaagttattgggaggtgactcaaaatcacgttcttgaaaaattttccgagttaaaaagttaaacctttatttaattctccaatttgattttcgtttatatttctggctttcgtcctaatgaatatacactagatctcacttgtttttcttcatgtacgtaatcatttttgggggtggcacgactaatcattgcttgagttgatcttgatccaaatcttaggaagataatgcgcaattaattgaattttcaaccaaaaaatggacaaaaagactatcgccttgtaatgattgcaattatgatgcttctagtcttctagatactgtatcaagtatcaactggataataaactatttatcattttcttacaactaacaaccaattaaaagccactcaacatactaacatttccatagtccactccaatgattattgattattatgattaagatcagatgatgttctctatggattaaaaaaaaaaaactagcaataaaataacaagaaaaatggtcatgttgggactgggtgggagtggaacgagaggccacggcacacaaagtcacaaagaaagtgtcattatccggtgcaccgtcccacatgcgattgctggtaaccacgcgtcaatcagacgaatggcatgatccttttttagattgtgctcgctaacatggaccctacaaggaccgaactaatcaatgtggttctcacgtgcctcttttgccaattttaacttttctaacgaaaaaaatattactctgaaacctccacattcaattgtgatatgaccggcgtctggccctcaaaccgaaaggctctcctctgaatcctttgttgctctgtcccacgtgccagaaatatcatcttaaatatggtggtctttcgcaaccctgaatggcatttgtggtaattagttctaaattacgtgagacaatgcaaagattttgttttgcaccatcgttgccgaccacatcaaacaggtcatcgctctgggtccactcaccgctagtccgctatacacttgtgggaaaaggcttcttgtagtacagtttcgtcacggcgtcttattaattgcaaatctgtgacgttacggttttcgattcgggttactattttaatggaaatcttttgataatagctagagcctagagtatgtaaccctaaggttagatggtaataccgaatctacctaaatttttgttattttcggtttttcatgagatatatagactgcgtaatttaaaatctcaaaatttggtttcactttatttttatttttttttagtttcgaggtaggtatacaagcatggaccttttgacattatttaaaattttcataatttagaatcttcatgttaaacgtgtatggctacgatcttcggaactttattcggtttgtatgctcaaaggccaacgccatttattttctaattgattttttcccgttacggaaacaatctttttgcattattgaacttaattaccaaagtttatgaaaagaaacaataaagtctaaattggcctattttgatatactgatcacttacgcgaaaacatctacattgttatctactagactagtcattaactcgaagatagaatttcatttcttgaccaaaaaaaaactcaaaagatagttataatcacagattcattattgacttttgcttttaacactgtagccatttatgtactatttatacaaatacctaacttttcaaatttgtgatatttttcaccctacattttagcctataggttggatcattttgtcatattgcatcactgtttactagtaccaaacttaaatatcacacgagcagtaaatttgctatcaattttttcgttttcacaaacatatatctagtttccctaaccaataattaagttaaattgcattaggaatttaggatttataataaatagatatataacccactaacgacaaaagactatgtcttgctacgtctctgcctttattatcatgccacaagaaaataagaggggaacagagggagaaccccataaataaataaatttagagaaatatctaagtttggttcttccctgtgtctacccaccgtgatcatcataaaatggattgtgatttctgatttgtgagtctatctttctctactccattagcttcctctcccttggatggttacgtcactttctccgagcttacgtcatctatatccggtcttcacttctttttccttccattcctcagcagcattgcgtaatctatctggtgtgtgtgtatcacgtcacttcctcctagtccctctctctgtacgttcttgttgtgaaattgatttactttttgaaaacatttttggtgcaattcaacaatatttgtttcacagttcttattttatttttgtagattaaaaagcttaaatttcaaaaacaagaaaatcttgttttcacaaaaattaggcaaagggtttccaatttccagattgtttaacttgattttcaatttccaatttccgaatcttgcaacttgatttctataatgataagttatctccaaatatgttttcttaaaagagaaaactcgatttgacttcaagttgagatcatatccattattattctctatattacgtacaagttattatatattttataactctagaggaatgttagagcttgtgttaatggaattccaagtcagatatgaatattctcttataatcattattgtccttataactgttttaaatacctcaaatttatattttatcccctgtttttttcccgggaaaacgaatctcaaaaaacgaatttcctactttgacattattttatctccctcttgctctttgatataatgcaactatctgaaactctatgaatttatcatttacagagttcaagatcatatgatattttcactttctggacaaa

SEQ ID NO: 10287 - DNA, 3000 bp, Unknown
  misc_feature (1)..( 3000): cDNA_ID_2715413_gDNA_ID_2213641_Annot_ID_132274 3000 nt of promoter + ATG
ctggtaaagtgagaaatccgttaatccctagagaaactgtaatcgtcgcggtgattcggagaaattcttctgcttccgcggaaaatgtcactaacccagatcgtgaatccaatcatatatccatctcgcacaattccacggcgtttcacggcgatctcgccttttaaaaccctaagtccccaattttcccgccacccacctcacgcactgtctcgtagactcttccttccttctgtttcctctatatgggatgccataaccggcggcggagattcgaaccctcgtgaggccatcgcagcggttcgacgcggaatgcagctcttcagacaggtaaattggaaaattccgacaaacagaacttttctaacataagggactctttttttaattttggatccttgaatctgaccatcctattcgagatgctttttgttaaagggtgatgttgctggatcggtggcagagttcgatagagcaatcattttggatcccaggcaaaaggcatgtacgttttatctcataacacgatctctctataaagctttgaaatttcagtcgaatctttattgtttttgcttcatgggaacactaacatttgcttcatgacagatctttggcaacgcgggctttctctttactatgtagataggtacaagctcctactcactgactcttgttaggatttgagtttcttcttagaagactgtgaatccactgtcgaaaattttaaaaagtgcttgtttctattgtggactttggtctcatattaagtgatgaaatatccaacaggtttgaagaaggtgcagagcagttccggatagatgttgctcagaatcctaatgacacagaggagtccatttggtgctttatctgcgaggcgaggctccatggtgttgatgttgcacgaacacagtttctcgaggtttgtttttccttatgttaaagcttaccattccatgatcagtaataaagccggatatgagattttagaaagaattctttgtaggttggtagagattctcggcctgtgatgcgagaagcttataatctattcaagaatggtggtgatcctgaaaaggttttgagacatgtttcttgataattgatatcattgatttatttccatcaaacgatcttaatactctgattttgaaatacagttagtaaatgacttctctagcggtcaagcaagcgaatacttctatgcttctctgtacgcagggctctactatgaagctgaggtaagctcttgatcttgaatttatccaagacaatctccattgacatctattggcctattgctattcaaaaacaaacaatccttgagtaatcttgtttaagttacttgtctgattcttgttgtagggtaaatcagaaaacgcaaagtttcatttaaccgcggcttgtggatctccatatgggcagaggtttgaacccctatagcatattggtagcagttataaagtgattcgatggtctagtgtttttgatacttttcatcccaaatttgtttcaggtctgatgattatatggcttcacttgctaaagtccattgcctttgtagaaactggagctccggtattctttgaaccggttcatggttttgtggagccaacatattagttattaaggcccaatttttgaaatatcagcccaattaaaaattggacctgggtttgcgatttccaacctttatttatgggcatgaataaagaaagtaccattcacaaacattataacaaataggcaacattgtgccattttggagtaccattcacaaacattttaaccaaattattgtagaaattttcgtaccaagtatcttaatctggataataatttcactgaacgttctgtttaatatacattagttttatactggttgatcgtttgatactaatatctatgaacttaaatataatttaattgtatttgcgaattgctttagatgaacaacaacttttacgagatccaaaaattgttattccgtttttttgatggaaaggtagtatatatgttgtgtagacagattagtttagtaactatgttgaataagctatattttaattgtccggactgtactttatatctgtaaaataaatagttgaaagaaaatcatattgactagtattttttgttatggtttacttaagggatgaagaaaagtggagatggagactcaaatcatttttttttctcatcacacatgttgtaagaattaaataagtgtgtttgggaatattctgatctggcaaagcaccaaaaaattgggatattcttgtcgtctgatgcttgcatggcatatacttcgtacatcagcaactcctgcatcagcaaaatacaaaattatccctccatagtccatactaacagaaccggaaattaccggcgaatgttcggtacatgacatttctaaagtttattcaattttttttcttagtttattcaatcttaacatctattaaataatttaaaatgaaattcatgccaacgcgaaaatgattttcttatttattgaaacatcgtttttaatccatttttctgaaaaccgatacgaaaaagagaaaaaagttatttttagcaaggaaaagtttaagggtaaaatcgtcatttggctacttagtctgggacagttaaaaaattaaacaatccagagctcttgtccaatttggagacgatgtaaccaagttgcatatacacggcagggtagacgggagttaatacataccctcgatcttaaacgtacacgtgacaataatcgtacgtgtcatcatctcgaaacgcaacccggtcattcgttaaacctaacgtgacggaaccactccctttgccgttgaatgtactatttgacagactgatttaaaccttatattctaaataaaatctaaaatcaatagacacctatataacgtcgatttattgatcagtggaatctcgagtatttcggacatgcaatcgtgaacggcgagtttcgacgacggtttggggagttaatcgatg

SEQ ID NO: 10288 - DNA, 3000 bp, Unknown
  misc_feature (1)..( 3000): cDNA_ID_2715405_gDNA_ID_2213641_Annot_ID_132276 3000 nt of promoter + ATG
atagcacaaagcgatatgttatatatgttaagaaaggtgtgtataaagaaaatattgatttgaagaagaagaagacgaacattatgcttgttggtgacggaataggacagacgattattaccggtgaccggaatttcatgcagggtcttacgacattccgaactgcaaccgttggttagtattgatattttagttaattaaatcagtagttaattaattgattgattaaccttttttgtacttttcttcctttttggtttttgtcaaatttttatatatattagtgtgtctgaaaattagaaaagcatatatgctttctgcaatccgcaggctttcaagctttaagttatagtttttttcttctcataattcattcttttcttgtgctacaatatctaatccattacttaattgattgatcaatcttttcattaccttttaatattgttttggtcaaattttgtttactattgtctctgcaaatcatggaatattatatgcttttgctttctggaatctacaaactttcaagatttttacttttcttataaattatccctttcttatgttacaaataactactttttcaatatgtttttgttacttatgtatctaattaacatgattgaccattaattttggtttgatcagctgtttccggaagaggattcattgcaaaggacataacattcagaaacacggctggtccgcaaaaccgtcaagctgtcgcattgagggttgattctgaccaatccgccttctatcgatgtagcgtggaaggttatcaagacactctttacgcccattccctccgtcagttctatagagattgtgaaatttatggtacgattgatttcatattcggaaacggcgccgcggttttacaaaactgtaaaatctacactcgggtcccgctaccgctccagaaggtaacgataaccgcgcaaggaagaaaaagtccaaatcaaaatacagggttcgtaatccagaacagttacgtgctggctacacaacctacttatcttggccggccatggaaactttactcaagaacggtttacatgaacacttacatgagccagttggtccaacccagaggatggcttgagtggtttggtaattttgctttggacactttgtggtatggagaatacaataatattgggccaggttggcgatcatcaggtcgggttaaatggcctggttatcatatcatggacaaacggactgcattatcgttcaccgttggatcgttcattgacggtaggagatggcttccggcaacaggtgtcacattcaccgctggtctagctaactaattcaaaaaattttattttaccagaattattttagaattatgttattaatttaatcggttgtcatctatataatattcttgtttgagtagaaaacaaaaatcatgaatgtatagtgtatgtcagtatgtgtgtttaaatttataactttataaaaataaatggaaattatagactgcctgattatgcatctctgtaaatcatttaattttattcgtatctgatttaatttcattgattaatttcgcagtgatcgaaaaatatctccaaaaattccctgtcattttatccgtagatcttgtttgaaattttgagctgatttgaatcggacggatgaagaattataatatatgggctattggtctgccactaacttaaacgacttatttaattacgagtatccacgtacatcaatgtatttgtcattttcacacaaattaattcaaaccttacgtccggttaccaaaaaaaatatatatcaatttgaaacgaaaaaccaaagatcatgtataaatacacatacaattatacaaacatctcgaagtaaacttgtaaacatcaaccctgattaggacttagaggtcattcattacactttcctttttttgtccactctttctcatttttttatttttttattttgaatggatgggtgattttgctttgaagacattgtattatgcggagttcaaaaataccggacctggttcagaattatcatgtgattaatgaaactgaacctgtttggttcactgtctcgaactttatagttggagatagcttgttgccgaatatgggaactttttgtgtgtttatgtctctacctctgtgatctatatgaatgtggttgtgatcaaaattagaaagaatggtacatattgcataaaaataaatatatctcttctaaattgactagttaggtcatactatttgtcaagattcgtcaagaattaaatttactattcagtgcggtgaaaacggacaatattttcagtgtatacaaatgatttattttattttattttaagaccagagattgtttttaatcataatctaccaaaaaatcattataaattcgcacattgatgtatctagaattttaatatcgagaaaagggttttgataataagcaatgggaaaatcactatctttcaaaatcacaactgtaccgaatggtatgttaattagtagttaaaaaaacaaacacacaattaagacactgattaatccggtggagaaaagaacaaacaaacaaacaaacaaacatttattgaatccctaaaataagattaattattttccctaattagaaactcataaggaaacagagaagaccataaaaccacaagcctattttttgtcttttcaacagtttctcactagccggatttcccgccaagccttagaaaacagagcaaccaaaataacgaactcttaatttgtcataaccgttataaataagccatctagacaattatgaaaattgcacactcccaaggaggctacgtaaccttcgacggaggagtccataaaactcacattctcatttttttctcaaaagaacaacgaacagctcttatatttttttacaataattcttcagagctgtttaagttcaacaacaatttgattaagagaaaaccacataaatattaattagtgtaacgaaaaacacaaaacaaat

SEQ ID NO: 10289 - DNA, 3000 bp, Unknown
  misc_feature (1)..( 3000): cDNA_ID_2685795_gDNA_ID_2213641_Annot_ID_132278 3000 nt of promoter + ATG
acgctcaataatgcaccggcattgtcaaactctcctccatagtttggagctgagaatattgtgactaacctccgttttgcgaaaaactcatacccatcttccactacctgcaaacacgtccctcacaagtcaatatcttggaaggttctcataaaagtcttttcctttatgcccatattcacaagatacaacaaatgtcaaacatttctacagagttggaccatttggttctagttttgatcactatggaagtctatttacctgatggcctctgcaaatgagatcgagatcattcttatccaaaaagtcagcgactacatcggctccaaacgtgcaggagatacctcgatcgctatcagtccacccttcattcttctgatcaggatcagaccaaagtaaatcacaaagaagaccattgtctggaatctctgtaggcctttgaatctcccgaatctgccccaagttttccaattccggtgacaatccaccatgcatacataggatcttctcgtcaatgagagcagctaccggcaaacagttgaagcaatcggtgaatatcttccaaagccgtacattaaacctccgtttgcattcgtcatagaacccgtaaatcctgttgatcttagcatcttcatggtttcctctcaagagaaatatcttggatgggtaccggattttgtaagccaagagtaaacatattgtttcaagactttgcttgcctctatcaacgtaatcgccgaggaagagatagttcgctgaaggaggatagcctccgtattcgaatagcctcagaagatcttggtactgtccatggatatcacctgaattagagatcaaaacggaaaccattagtacctcataaaacaaagcatcagcagatttagaaacaatttgcagaaactttaacataaatccatcaaaatcaaaactttttagatcacccagatgctaaaatcttcaaacacacgtttcgacattaagaaaaaaagaggaaccctaatcaacacaaatttgcccccaattacaaatctcatctttttaaccccaatcgtgcaatacgactcaaacccaaatcatcaaaaccaaaaagccacaatattttttcatcatcaccacaaagagagggagagaaagagaaagagaccgcagatgcgaatgggggcatgaagctcgagaagattaggctgagaaaggaagatttgtctggcgttaacgcaaagttgacggatctcgacctccgaaagctgaacctgtttacctcctttaccttccaacaatctccttataatatcatccaatacacccatctccatcatcccttccatactcgtcatcattcttcctctgatcccaacctttttcaccagaatccaaaagggtttgcgccaaatcaggcgagaaacaatgggtctcgattaaataaagaaataatcagaaaatcacaaacttttaatgtttttgttcctttagattttcccgagaaaatgcgggaaacacaaaggggggaagaaagaaaagagaggtcaaacaaagggggaaggcaaaaccagaagcaatctctctctatatatctctctattagtcttaaaaactcagaggaggaaagtggatcaattggaaaagattagaattaataacaaatccggatttaaggagattattaattggagaaacagatggcgcagataatagctccttctcttctctctcttttgctgccagaaatttttggaatttatatttcaactctgttttaaatggctattcattacattaagagaatgatgtcggtccaaaaaaacataattaagattagaaatggaacaagttgagttttaactatatacgattattatatcaattaacaattatatttagcaatttctaactttgtttggtattgtaacaatggctactctacatgatgtaaaaatggatccaatgaactacaaaagaaaaaatgattggataaagaaagcaaaaccagtgcaattgatttggtattgtccaacagaactaaaaacatgattaaaaggggaagttgtcaaatctcaaaatagaaaaacgaagacgaagtaattagtgaaaccttctaaggcaagaattatggggtagtggacggacggtgatggaagaagaagatccagcctaaaaagaatgagacgtggatgattctcattggaactggtcaaagctccttacatacactaatttcctttgtagttaaataaattattcaagtaattgttgtcgggcgagaaaccgcgtcttttgaaaagttcgttttatggttatatttgtatacgtgtgagggtaatacttagaattcgtaaatgggttcccatcatgttccactacaccatcctaattatataaacagacagtgattagtaacattaattgatactttttctttctttttgggcgagtaaattttaacttatttgaaagttgattcataacactttctgtgacaagaaatcaacaataataggttaaaattgcgtaaacaagtatacttacctatgtattagtagtttacatacatgataacaagtatgaagtatactacacctaatatgtggttcattcttttttctaagcaaaataaaatatttcttttcttctagacggcatgcatcaatgattaaactatttcttgtatcaatataactaatcttttatagttacgtatataaaaggtttgtaagaaaatacatcagaaatgcttttttttcatgttggtcagaaaaagaaaaggaaaggctttctatggtgacaaataaaaattatataaatgggccaatatattacagaatttaagtccaaacttattgtggtcttatattcaaggcccatctcgtgaaggaagaaaataactaagcccatttcgtggaggaagtaagagaaccctaaaattgagttggtataaaaaccctagcatcagtattttcatgtagaaggtcggcggttccatcaccacaacgccggacgacaatg

SEQ ID NO: 10290 - DNA, 3000 bp, Unknown
  misc_feature (1)..( 3000): cDNA_ID_2715397_gDNA_ID_2213641_Annot_ID_132279 3000 nt of promoter + ATG
acaaaaatccgattacaaaagcaaccaagaagcaacagtactccagaatcaagtccaatggcggcaacaactttcttaaaccttgaatccacgactcttcctctttcctctggccttctcgaacttccttcccttggcccgaacatatggcttggagtgactgtgtggcacaccaggagcaggtccgaaatgcttcactgcttcacgtgaattcttaggtcctctaagaagaacctataacacaagaacacacaactatcaaattaaatatagtatccttaacaacttgaaaatggagaatagcagattggataagagaaataccgtgttctggcccaatggagctctgagagcgagctggtcaaaggttaagcattcacctccagctttctcaatgcgagcccttgctctctctgtgaacctcaaggcagtcactttcatggctggaatctcgtgtaccctcaaatcatcagttatagttccaaccaagacggcaatcttatcttcctataatatcagaacaagaggcaaaattcaaaatccaaagcatagacaatgtagagaattttgaatcaattatcgaacaccgccatgttacagactaagttcacattagcagattcataaactggacactgtatctaggaaatgtaacagattcaacatgacctaaaactaatttaaccataaagatacagtagagagagagggtttcaacgaattagtaccttgccagtcatgaactccacaagcctagatagagaaagaggagctttgttgactttgctcatgaaaagcctcttcaatatcacaccattgaacttgctattagttctccttaccagaaaccggtaaagctgcaaaatttcacaaacaaaattcagaacaattcactaaaataaaattaaaaaacctcttcaattggataatataaggcaaaggacaaagattgatgtttaaaattctgaccttgacagtaagcttgaggtagacatcatcagactttggagctgtccttttggtcttcttactcttacctccggcgatcagatcaataccctgcaataacacaaccaatcaatctcacaaacaagcatgaaagcaagatccaatctcaaaaaaactaagagagatagatcgttcacactctaacccgagactcaaatgtcagaaaaacaaacctaatacactatacaacatttaaaatgacaggaaacacccacaatctcttaacaacaagatttctgaacctttgatatcaaactaacaacagaaaatacttgtagaggaaagacagagagaaatgaagattgaacgacagaggaggagagaagtaccattgtcgtccggcgttgtggtgatggaaccgccgaccttctacatgaaaatactgatgctagggtttttataccaactcaattttagggttctcttacttcctccacgaaatgggcttagttattttcttccttcacgagatgggccttgaatataagaccacaataagtttggacttaaattctgtaatatattggcccatttatataatttttatttgtcaccatagaaagcctttccttttctttttctgaccaacatgaaaaaaaagcatttctgatgtattttcttacaaaccttttatatacgtaactataaaagattagttatattgatacaagaaatagtttaatcattgatgcatgccgtctagaagaaaagaaatattttattttgcttagaaaaaagaatgaaccacatattaggtgtagtatacttcatacttgttatcatgtatgtaaactactaatacataggtaagtatacttgtttacgcaattttaacctattattgttgatttcttgtcacagaaagtgttatgaatcaactttcaaataagttaaaatttactcgcccaaaaagaaagaaaaagtatcaattaatgttactaatcactgtctgtttatataattaggatggtgtagtggaacatgatgggaacccatttacgaattctaagtattaccctcacacgtatacaaatataaccataaaacgaacttttcaaaagacgcggtttctcgcccgacaacaattacttgaataatttatttaactacaaaggaaattagtgtatgtaaggagctttgaccagttccaatgagaatcatccacgtctcattctttttaggctggatcttcttcttccatcaccgtccgtccactaccccataattcttgccttagaaggtttcactaattacttcgtcttcgtttttctattttgagatttgacaacttccccttttaatcatgtttttagttctgttggacaataccaaatcaattgcactggttttgctttctttatccaatcattttttcttttgtagttcattggatccatttttacatcatgtagagtagccattgttacaataccaaacaaagttagaaattgctaaatataattgttaattgatataataatcgtatatagttaaaactcaacttgttccatttctaatcttaattatgtttttttggaccgacatcattctcttaatgtaatgaatagccatttaaaacagagttgaaatataaattccaaaaatttctggcagcaaaagagagagaagagaaggagctattatctgcgccatctgtttctccaattaataatctccttaaatccggatttgttattaattctaatcttttccaattgatccactttcctcctctgagtttttaagactaatagagagatatatagagagagattgcttctggttttgccttccccctttgtttgacctctcttttctttcttcccccctttgtgtttcccgcattttctcgggaaaatctaaaggaacaaaaacattaaaagtttgtgattttctgattatttctttatttaatcgagacccattgtttctcgcctgatttggcgcaaacccttttggattctggtgaaaaaggttgggatcagaggaaga

SEQ ID NO: 10291 - DNA, 3000 bp, Unknown
  misc_feature (1)..( 3000): cDNA_ID_2715393_gDNA_ID_2213641_Annot_ID_132280 3000 nt of promoter + ATG
tctctttgtggtgatgatgaaaaaatattgtggctttttggttttgatgatttgggtttgagtcgtattgcacgattggggttaaaaagatgagatttgtaattgggggcaaatttgtgttgattagggttcctctttttttcttaatgtcgaaacgtgtgtttgaagattttagcatctgggtgatctaaaaagttttgattttgatggatttatgttaaagtttctgcaaattgtttctaaatctgctgatgctttgttttatgaggtactaatggtttccgttttgatctctaattcaggtgatatccatggacagtaccaagatcttctgaggctattcgaatacggaggctatcctccttcagcgaactatctcttcctcggcgattacgttgatagaggcaagcaaagtcttgaaacaatatgtttactcttggcttacaaaatccggtacccatccaagatatttctcttgagaggaaaccatgaagatgctaagatcaacaggatttacgggttctatgacgaatgcaaacggaggtttaatgtacggctttggaagatattcaccgattgcttcaactgtttgccggtagctgctctcattgacgagaagatcctatgtatgcatggtggattgtcaccggaattggaaaacttggggcagattcgggagattcaaaggcctacagagattccagacaatggtcttctttgtgatttactttggtctgatcctgatcagaagaatgaagggtggactgatagcgatcgaggtatctcctgcacgtttggagccgatgtagtcgctgactttttggataagaatgatctcgatctcatttgcagaggccatcaggtaaatagacttccatagtgatcaaaactagaaccaaatggtccaactctgtagaaatgtttgacatttgttgtatcttgtgaatatgggcataaaggaaaagacttttatgagaaccttccaagatattgacttgtgagggacgtgtttgcaggtagtggaagatgggtatgagtttttcgcaaaacggaggttagtcacaatattctcagctccaaactatggaggagagtttgacaatgccggtgcattattgagcgtggatcaatctctcgtttgctcctttgagattctgaaaccggctccagcttctagcactaatcctctcaagaaggtttgtttccaccaagaactttcaaaagaccaagtagtccttcttttgataataatattggttagctcggatataccaaaatctgaatccaacaagaccaagccttttggacttgatgagtcatgacaagttttgttcttttggaaacttcacgtcataatgtaacacatgtttctctctatattttctctttttgatcaggtaccgaaaatggggaagtcttgaaacttaatacagcttattcccttgagagatttggtttcacaagctcaagctagcgctctgtgcatttcttcagatgtaggcaaactgcaatggagaagagaacctcaaaaggctactttacttagtcatcaaagaagaagcatcagtagaaaaaacaaaagagagagagagagagagaaaacaaaaggtgttgtccaaatattctgtgtatagttgcagaaacatctcttttctgcttctctagattttcatctccttttggtctgttttcttttatttggttattcttttaacaccttagtttaacttagagtgcctctcctcttttgcttttttctttctttcctgtatcatcaaattaccacatttcttaatcttttccatatttgaattgacttccatggtttggctcttacttttgtgaatcatctgcacagtaaaaacaatttccttttgatttagcagtacatgtctctctgtgttttttctcttccagcagtaatacatatactttttacagagcttacttttacacaatggcacgacttgttctctctgtttcggaattggttcttcttgaaactgattctccctctctcgtcgagttttcatagtagcacattttattctcaggcttttggtttaatttcataggaagatggttcaatccggtttactattaaaccgaaaaatctaaaaactagatttttcggtttatgaaatccacaaaccaaataatatagctgcataccaacccaaaatctcggcaaatcaatgttttccgtaaataaccttttctttatcgatgttgtcaggaacattaagggtaacttagtaatataacaattgcagacgttttagcgagcagaggatccccaaagccagacaaatcctcttccgtcgccgccgccgccgccgcaagtctcgtcggttagtttctgaatctctcgtttctaaatctctgatctttcgttggattcctgtgtttgaatctcagcttctctacctgggtttatgtctcagctcttgaacttgcttgatttctgcatttcttgttattttcgtttgtctttgtctctcgatccgtgtgttaccattactgtatatgatcgcataattcatctgtgttttgctttgggtttattgatctaacttaatctctatttccttggattgatatgtaatggtggaatttctaaagatatataggaaggaagttggagagtttctagcaatgtttatgtttgattccaatgttgtggttctcaatggagaaaaacattatagaatctctgagaaattttatattgaatagccaattgctacaggattcttggttcggatctttcagtttcagaatctatatgtgttttagagttgttttttctttgagctgaataggtttagagagccaatctttcacttgattttcgaagcctatatctagttcattggttcgtagctaaagagtgtttctgaatccttgctgtaccatctgtgttaatagggtttgaagtctatgtttgattctatctttattctagagagcttagatgttactttttaggataagccttaa

SEQ ID NO: 10292 - DNA, 3000 bp, Unknown; identical to SEQ ID NO: 10290
  misc_feature (1)..( 3000): cDNA_ID_2715397_gDNA_ID_2213641_Annot_ID_181252 3000 nt of promoter + ATG

SEQ ID NO: 10293 - DNA, 3000 bp, Unknown; identical to SEQ ID NO: 10289
  misc_feature (1)..( 3000): cDNA_ID_2685795_gDNA_ID_2213641_Annot_ID_181251 3000 nt of promoter + ATG

SEQ ID NO: 10294 - DNA, 3000 bp, Unknown; identical to SEQ ID NO: 10288
  misc_feature (1)..( 3000): cDNA_ID_2715405_gDNA_ID_2213641_Annot_ID_181249 3000 nt of promoter + ATG

SEQ ID NO: 10295 - DNA, 3000 bp, Unknown
  misc_feature (1)..( 3000): cDNA_ID_3035840_gDNA_ID_2213641_Annot_ID_181247 3000 nt of promoter + ATG
ctgcgaaattaatcaatgaaattaaatcagatacgaataaaattaaatgatttacagagatgcataatcaggcagtctataatttccatttatttttataaagttataaatttaaacacacatactgacatacactatacattcatgatttttgttttctactcaaacaagaatattatatagatgacaaccgattaaattaataacataattctaaaataattctggtaaaataaaattttttgaattagttagctagaccagcggtgaatgtgacacctgttgccggaagccatctcctaccgtcaatgaacgatccaacggtgaacgataatgcagtccgtttgtccatgatatgataaccaggccatttaacccgacctgatgatcgccaacctggcccaatattattgtattctccataccacaaagtgtccaaagcaaaattaccaaaccactcaagccatcctctgggttggaccaactggctcatgtaagtgttcatgtaaaccgttcttgagtaaagtttccatggccggccaagataagtaggttgtgtagccagcacgtaactgttctggattacgaaccctgtattttgatttggactttttcttccttgcgcggttatcgttaccttctggagcggtagcgggacccgagtgtagattttacagttttgtaaaaccgcggcgccgtttccgaatatgaaatcaatcgtaccataaatttcacaatctctatagaactgacggagggaatgggcgtaaagagtgtcttgataaccttccacgctacatcgatagaaggcggattggtcagaatcaaccctcaatgcgacagcttgacggttttgcggaccagccgtgtttctgaatgttatgtcctttgcaatgaatcctcttccggaaacagctgatcaaaccaaaattaatggtcaatcatgttaattagatacataagtaacaaaaacatattgaaaaagtagttatttgtaacataagaaagggataatttataagaaaagtaaaaatcttgaaagtttgtagattccagaaagcaaaagcatataatattccatgatttgcagagacaatagtaaacaaaatttgaccaaaacaatattaaaaggtaatgaaaagattgatcaatcaattaagtaatggattagatattgtagcacaagaaaagaatgaattatgagaagaaaaaaactataacttaaagcttgaaagcctgcggattgcagaaagcatatatgcttttctaattttcagacacactaatatatataaaaatttgacaaaaaccaaaaaggaagaaaagtacaaaaaaggttaatcaatcaattaattaactactgatttaattaactaaaatatcaatactaaccaacggttgcagttcggaatgtcgtaagaccctgcatgaaattccggtcaccggtaataatcgtctgtcctattccgtcaccaacaagcataatgttcgtcttcttcttcttcaaatcaatattttctttatacacacctttcttaacatatataacatatcgctttgtgctatgattaggagcctcgttgatggcctcattaattgtccgatacttcccttttccatctatcgccacaaccgtgtttggatgcatgacactggggtcatgacgcatcatgaggctctcgtcggtctccgtgagccactcaggacttgcgatgacgctctcgttcctagatgccttgaaaggcaaggcattgagctgcgtgtacatgtctaagacattgctcacaagctgagtgacttgtcttaagctacctttgatcaattcctcgtacttcctctctgttccttcaaacccttctagacacgtgtcttggttactcatggccgcgctaagccaggttttaagattgcctcctgctgcagcagcatcgtgagagccatcgtctagatctattcctcctcctccatggagtttgttcatctccagcatcgaccatgctagctctgttaccgagaagcctacaagctctttgcaatcctctatggcaacttgctcacgcgaacggatagataacatcattaccgttgggattctttccattgctaacttggctttgtcatgtgcttcctttaccgcagcacgtaaaaccgaatgcgggtttaacccgtgacccgattccttgacgtgtgtccagatgttagagacgcacaactcgtgagcatcgataaattggcatgctttcgcgacaagagaccgaaagttatcttctttgtatggttttaaaattgtggtttcatacgaggaagtgtgaacggacataagcataactaagagaagagcggtggtaatccccattttcctgataagtttggtttttttgtttaggttagcaaaagaaaaagaaaagatgaaagagtgaaagccatatatagaaaaaaaaactagggaagtttaggtattgattgttggtgaagaaatgttctttgcctctttgagaactgtaggaacaaattcaaactttaattttttaccttcttttgttactcttttctcaagccaaagttattctttcttcattgttcaaatctctcattcaatgctctctaaactagattctgcttctagttctagcgacttttacacaccctcctagcctccaaatagctttcaccggtacagttacagtattatctaatcttacccggttcagattgaaaccgacgcaatctcaagtaaaccgatagaatgacgggagaacaaccggttgagcttttggagtttacatcggtttattactttcttgttattttcttaacccattggttcatcaaagtgattaaataaaccgggattatccggattttaccgctacgttccttccctcccatttgtcatcttatcttctgcgattactggtaaagtgagaaatccgttaatccctagagaaactgtaatcgtcgcggtgattcggagaaattcttctgcttccgcggaaaatg

SEQ ID NO: 10296 - DNA, 3000 bp, Unknown; identical to SEQ ID NO: 10287
  misc_feature (1)..( 3000): cDNA_ID_3035846_gDNA_ID_2213641_Annot_ID_181245 3000 nt of promoter + ATG

SEQ ID NO: 10297 - DNA, 3000 bp, Unknown; identical to SEQ ID NO: 10286
  misc_feature (1)..( 3000): cDNA_ID_2685632_gDNA_ID_2213641_Annot_ID_181244 3000 nt of promoter + ATG

SEQ ID NO: 10298 - DNA, 3000 bp, Unknown; identical to SEQ ID NO: 10285
  misc_feature (1)..( 3000): cDNA_ID_2715425_gDNA_ID_2213641_Annot_ID_181240 3000 nt of promoter + ATG

SEQ ID NO: 10299 - DNA, 3000 bp, Unknown
  misc_feature (1)..( 3000): cDNA_ID_3035856_gDNA_ID_2213641_Annot_ID_181239 3000 nt of promoter + ATG
ttcaaattctggattgtaaaaatgttatttgttctgtaggtaattgtgaatctaagaatgcgtttgtgatctgatttggaataattttcactatgtatgtattaggtgatgtaaagagtccaagacttgtgccaaagcctcatggagctactttctcaatgcaatcaccttgcttggaacttggattttctcagccaccggtaaaaacttttccgcattgaaaaacatataatgaataagcctatcatgagtttcctttaatttgtttctgagtatttagtgtttgttggctgtttactttggtcatttagatctatacaaagtatccctatggagaacaacaatactatggagttgtttcagcctatggatctcagagcagggtaatgcttcctctaaacatggaaacggaagatagtaccatctatgtgaactcaaagcaataccatggaatcataaggagacgccaatcccgcgcaaaggctgctgctgttcttgatcagaagaaattgagtagtagatgccgcaaggtaacatatagaaactagtttgatacttttgtgcaaatgagattttattactgaattagtgtgtttgcttttgttatgtatgttgcagccatatatgcatcattcgcgccatctccatgcattgcggcgtcctagaggatccggtgggagattcttgaacactaaaagtcagaacttggaaaatagcggaaccaatgcaaagaaaggtgatggaagtatgcagattcagtctcagcctaagcctcagcaaagtaactctcagaattctgaagttgttcatccggaaaacgggaccatgaacttatcgaacggattaaatgtgtcgggatcagaagttactagcatgaactacttcctaagttctcccgttcattctcttggtggcatggtaatgcctagcaagtggatagcagcagcagcagcaatggataatggctgctgcaatttcaaaacctgatcctttaccgtttcacagtcaaacggagagagataaagaactcttgccttggtataaaggattttcctttttgccaatccgctttggctgtgaacaggcaaatcatctttggctcattctctattaaggtaacttcgccgtgaggtgaaaaaagctttgatatatttatcttcagtgtaaaagtagttaaaactggtgaagaacaatgatgtgtttggtcactaaacccacttgttccaactagtagtgtgtgttttaagaaaactctgttatctgattttgtagctctctctggctttgtgtgtttctcaaacaactgtaacaacttttaagttatgtggtttatgtaacatatttaagacctgtgtttttgtatatttggtcgaatttatgttattatttgcttattatccaggacttatacagcaaagacagagtaaaaaaaattctgttccaaatctaatggttgatcaatctagctatcgatccgagatcgaaaaaaaatcgagcaacgttcaaccactcaactaagacattccatttgtcaacatgtgaaacgatatattatatatatcctaaacaaccatggttagcttttaaccgcagttaatgttacatgtattaaacgtctaaattataaatagatggcggttttttcccaagtaaatctgtagtgaaaaataaatgcggaaatggctacaaaaaacgtaaaatatttagagtaaaaaaaaataaaaacgtaaaatatttagcactctataatataataagattatacttgaaactgcatttacttttgtttaagaataaatattaaataaatttaacattggattaggtatataatctattgtagtggccaaaatctataatatctttaagttttagatagctatatgtgatatccatgatatgattaataatatattagcaaatatgaaagaaaatattcatattctattactatgtttttactgtaaaatgatcatgatttttttttgatatttatagcttggataaataatataatattataaaataattcgcttagagtattagtaatactgttttatatatttttcgtagggtgaaaacaatttttctgtaatatatatttgtgaagttttgtattattgtagatgaagaagatattgacactctatatacaggattatatgtttttgaatttgtttttatattatagatgtagtattatggttatgattgcgtttttaatttttgtgttatatgtttgtataatactaatgacaaaatctgtatatagtctagtaaaatttgggcaattatttaaatgggtaaaaagtcactatgataacgacacatcagcatgacaattttgttaataacacttgaggataaagtttattttatagaatgattatcaatttatataggggatatcaatcgattctgataattcatcttggttggactttggtcaattttggttttgtgttggtagtattgtctgaaaatattatgaaattccagctgggttgaattatcaaatgaaaacaaaaatctaaaaccgagtgctagacttattgttttgtaaatagttgattggtgaatttcgtataaataccagtactaaactcattggtccttgttcgactagttcttgttgaactggttgttgaccttgactagcagcccgattcttagcccgttttgattcattggccagatttggtagcttgggtttttggtgtcttccacctatcggtcttcgtggttcatcgtcatcattcattgtaaaattcctgaaatatagaacataaaaactaataaatcaaattaaaacaatccatatgaccttaattaattagtaatcaatattgtgattcccgtaactaatgtttagtaatcaagttaagagaatctagacctgtaccatgacttgatatactcctgtaactagaatatatggtgagagagacagaaaatacataaataagcatgttagatatatatattgattgtactatcatt

SEQ ID NO: 10300 - DNA, 3000 bp, Unknown; identical to SEQ ID NO: 10291
  misc_feature (1)..( 3000): cDNA_ID_2715393_gDNA_ID_2213641_Annot_ID_181253 3000 nt of promoter + ATG

SEQ ID NO: 10301 - DNA, 3000 bp, Unknown
  misc_feature (1)..( 3000): cDNA_ID_3035864_gDNA_ID_2213641_Annot_ID_181234 3000 nt of promoter + ATG
gcaggatcactacagcagtgtggatcacaaagctaaggtcaagaaaccataaagagagcgtgaaaggttttcagatgcatttattaatgccaaaataaaaccttcaggtgccctggttacaatgatcatatgacaaaaaaaatattcttggggtttgtcctcacccaagaatcaaaccttgtttccagagtttttacagtattaaatattccagtgctaaacaggccttgatcaccataatttggactaaatccgactaatatctcttaaatatgctggacaaccatatattgagagtgaaagagaaggtggggatctaacaaaactcagtttggttcaaaacttacctgatcaaatggaggctgaggctttcctctgcaaagattagataaagtccaagcggcgtttacaagcatagaaagtttggctccatggtttaactgcaacagcagagaaggtagagctgcatgtccaaggactatatcacggcatctcggagagtctccagaaatatttcctaatgcccaaacaacctgattgtccaagaatacagaagatttgcaactgaactatgggaggggaacaatatactcgacaatacatatttaacctacaactatatttagtctaaaaattgtatcttctgttcagaaataatttttttttaaaatgatttccctctattgatcttagtcatcgtctttatctttgaactttatcaattgcagaggcaacaacaggctcttagcagtcagacaaatttgagaacaacaatagcatgcatgatgatcaatcaccacttcaatatacctgctcacggaccacatcatatggcgagttgagaagtctcactagtattgcaacagctccatgatcaatcaccacttcagtattctcagatgttccagatgcaatatttgttaaagcccaagccgcttcaaactataaaatttgttccacgaaccgaaacacattgaccttatgaagctaggggtaaaaccagattgcagattgaatgtacaggtgtatcgaagctaacctgaagctggggggagtcatcccatgttaggaactccacaaagcgtggaaccaaaccggcctgtataacttcttcaacacgtacgttaaacatttctaccaaaagaacataaaatagcattagagagagtgaatacatcgttatagctttagtttcatgtcaaactacattacagtctaacatcagaaactttgaaagtttgctgtggctcatctagcaatgtcaatagcttgattatgccttagcaaccaaggtatcaaatctgttagtaaataagttaatgggatgtctctcaccaccacaaagtaacgttctgatctgtgtagtagcctcaatcaacagatccctctcgtcagaccaaatacagcttatcaactgtaaccaatcgaacataccaactactcaaaatagaaaaaatgatccaaaatagaaaatgtaatctcccattccgagaaatgcaatcaccattatcatattccagaacatgcaaaagaaaaatcttcagttcaaaaataatatggaaagtcttaaccaagctatgtagctccttctgataattctagcactgtataaccaagtttcagaacatgcaaattcttcataaaccaaaatcaatcatgaaaggttagtagctcactctgagaatttaaaatgtcaggaggcaagtaaaaactctagcgatcatatatcgaaaattcaagcgtcaagtcaaatttcacaacgaacatgtcaagaaatacgaatctcaagacaaattacgaacaccaaatttcaaacacggaaaaccacaagaaacgccaaaatggatcgaaattggataggtcatttcaaaattcctaacactgaaagcatgcatctacgaatcagaaatcacatgtctccagaattgaactgtcagattcatcaatctccaggtttcgcgacgaaaatacaaaatgtgtacatatgccaaacggaccttctggtcaagagaatcggcggaaggagaatgaggaagagcctcgcgacgcttcttaagcaagctctcttctctcttagctttgcggatctcaaccatgtcgtcctctcttcgccgccgtccaccaactccgtcaaccaccgccttgtacccgctcctccgtactgacattgtctctcctcccttcatcttttgatctcctcacctccctaccaaatgatttcgacggttttatgcgaccaaaatcaaattcccacgaaacaggcccacactgaaaaaaaaaaaaaaaatttaattgttagggttaaatcgatatttaaaaacattagggagtcaaattcaaatttgtaagacaagttagggagaacaaagattaaaaaaaatgcgagcgcaagttgattcgttcccgcctaattctgtaacagatattatttcactattatttcgtgtcgaataaattgggccaatagcttttattattttgaaaaagttcacattataaaatattttaaatattgtatatatacacattcctgtgattatggtgagtttgatgatttcgtaatacataaaacagaagaaaagtattaaccataacaaattgcctttgctaaattgtgtgaattatgtaattttaagacaatcatagtgtgcacagtccttgatcatgcattatctgagcatagtccgtaacagagaagattccctgagctagaaaagcaaaatagaccatatctatctataagtcaagataaagtgttgtattttgtatagacatatcttagttgaaaagttattcttcgtaaaagttatttttctttctatttttggtcattttgttgtaacgaagtttttattttgactttccaccgcatattacctcttccgaaatacaagctctttaaacatcatagagattacgtttttttggaatataaaagcataataaaatgaaaacaaaagagttaggagagaaaaagggggaaaaaaaaaaaacgagatg

SEQ ID NO: 10302 - DNA, 3000 bp, Unknown; identical to SEQ ID NO: 9285
  misc_feature (1)..( 3000): cDNA_ID_1715608_gDNA_ID_2213642_Annot_ID_132285 3000 nt of promoter + ATG

SEQ ID NO: 10303 - DNA, 3000 bp, Unknown; identical to SEQ ID NO: 9286
  misc_feature (1)..( 3000): cDNA_ID_3035959_gDNA_ID_2213642_Annot_ID_132286 3000 nt of promoter + ATG

SEQ ID NO: 10304 - DNA, 3000 bp, Unknown
  misc_feature (1)..( 3000): cDNA_ID_1015752_gDNA_ID_2213642_Annot_ID_132292 3000 nt of promoter + ATG
gcttgctttgcggattttgccatagaaggatttgctaaagtgtagaaacacattgccccttcctttgccgcttgcttaataatctcgataagcctctcctcatcctcaacctgatcaatccccaacccaaaaccaaagtaatgacaattctcaaaacctaacactttcggtttaaaagtcaagttttttcttgctcagatgatcactaattgcaactagcattcactaagatataatcagtttccatgtaatgatccaattttatctatcctatgagcaattctactagcaacattcacagagaattctaagaaaggacatattttttcctgaaagtaagaagatttgattttcatttacccaggagaagagatgggtattcacagaagagccacgattcaacgaaaaatcttcgaattgtcccaaagcggcgttaacggaatgctctgccgtccacccagttccgtcggaaaccaaatatatagactttcccgccgttacctccacgtcgatcgccgtcgtcttcttatcagcctcatcggtcggttgggcttccgttacttgacggcgaggtgagttatcggaacggggaattggacggtcaagcttaacaccagatcttaaagctcggcccctagaccaccgattcaatttgggactaatcttcagcttcggactcgacgaacctgtcggaattggaggttcggaattaggctcgtgatggcccgagacgccgtgtaaattcatatcgccaaagtttatgataacttttttttttttttttttctgagcgacggttaaggcgttaaccgctaaattgcgttccgatgaaaaattgacgaaaatgtcctcactaattacttgggcttgaaaacagatatttgggctttaaaaagcctaagtaaaaagtgcccaaaagactcgtggaaacaataataacacgcgcatcgctagagcttacgtttgacgcgtatcgtcgaccacaacatcgatatcgatcgagccgacaaaagaaaaaaaattatgtgaacattcctcttctttcttttttggtttaaatgttaacattcctcttctttctttttttgtttaaatttgaagaatcctctttctctctcacaatcacacgaatcttgtcttcttttctctccgtctctttcgatacttggcttcaatcctgtgacgtcctgttctattgtgccttaatcgggtaatctaaaacagaacatacactatcagttttttttcgtgccctgcttctcgaagtttccgattgtgtggttggttgatacatatctcattgattatctttgttactgttactttcatctcttatctcattcaattataatctagggttcttacttcttctttcttccctctccgctaactatttggcctggacaccttttttattttttttatttgaatcattatagtaatcgtagctttgtagatttcttgctgtataaatctctagaaaatcgctcaacggttcacggaatgtgattcaagaatcttgtttatgtttgttctttgatttaggtatctaggttcgtgtgagaaaacagaacaatataatgtatccttgtggttacgttgctcaagtcaccaacttgtctcctcaagccactgagaaagatgttcataggttcttctctcactgtggtatcgtcgagctcgttgaaatcaccgggtaacaacaacgttcattgttcagtaaattattaatcattcttgaatctgtttatattttgtttcatgtctccatggatttcaggtgccaaggggatgcattaacggcttatgtaaccttcagagatgcgtatgctctggatatggctgtgttacttagcgtaagtcccttaattagctagaaatttccagtatgatcttcttggcattgattttaatgttgatcttcagggagctacgatcgttgatcaaaccgtttggatatcggtctacggtgtctatttacatgaatctaacaatctcagacaagaagaagactatagtgttacggtaacattaaaaacaatacttactaggttactttaggttataagccaaagattctcgaaaatgtttctttgtaggtgactcgttcagacgcgtttgcttcatcgcctggagaggccataaccgtggctcaacaagttgtgcagacgatgttagctaaaggctacgttttaagcaaagacgcgattggtaaagccaaagctttggatgagtctcagagattttcaagcttggtagcgaccaaattggcagagatcagccattaccttggcctcacacagaacattcagtcgagtatggaactcgtgagatcagcggacgagaagtatcatttctcggatttcactaaatccgcggttcttgtcacgggcacagctgctgtagccgcagccaccattacagggaaagtggctgcagctgcagcgactagtgtggtcaacagtcgttactttgctaatggggctttatggttctcagatgctttgggccgggctgcaaaagcagcggcccatatcggtggaggaggaagcaattgatgtaaaaagtctttgggcttccttggaaaacataaataaatgatatgtgaggttttaaagcataaaaggtgttgtgaaaagaaaaagaaaaaaaaaaccatcatgaagatatgattagtaacgttacatgatcgaaaatatttgaggcagaaactataaaataactttattacatgaactggagaatatatatgaaatataataataagcctaaagcttttaaaatattaaggatgggtcctagaaacctccctagcttgatcctttcctcattctttctctctctttctcttatatgagaggttgatgagatccacaagaaacacctaactcatttgatagtgatttccaaatctgcaaacaacaaagtatatttgatcatcactatactgatttcacaatccattaatcactgataggtttttggtggaatacatacatg

SEQ ID NO: 10305 - DNA, 3000 bp, Unknown
  misc_feature (1)..( 3000): cDNA_ID_2715524_gDNA_ID_2213642_Annot_ID_132293 3000 nt of promoter + ATG
ttcgtgcatgttcttccaattacgtcaatcatttgaccgcaacgttttaaccttttctaaactacgccatgtgttaccaattagcatcttattaatcatgtggatgaacagattgaatagcaataatcatccacataaattgacagtcgaaaaaaccttgcatgtttccaggttcatcgtttacttacaggaagaaaatatcactaattagttatataaatcgaagatggacacaaatctctgatcatctactttggataatcagaagattttttggtaattaccgaaatattcattcataaacgaatagaaagagtcaaaatagattaactaaaatgacattaagttttggatgacttttcttgaacttgctaaacacacccaaattgcaacgttgcaactaaatgctaatgacagatattcttttgttttatagactagtaataaaagaattcagagtagccacaattattagttttcgttatccttcatcctcttacattcgttgactaaaacatatgattcatcatgcctcggttggatttgttattcaacttattattatagacatatattactttattcacttgatactttatcgacactggtgtttcatcctctctacggtcaaaggagtgtgcttagtagcgttttgagatacgcggtaccgtagtactagtgtctctaccgtcatggtacagccgcagaatcacagccgcggtttcttcaatcgccttattcgtcacatctgcaagcgccacaaccccaagaataacacatgagaatactctgcctacttgttaactttttttcttactagcattaaaaggaaagaaaaaaacagcattttgagtagcaaatgagaatggtgtttaagttttgtttacctatcactgcccatccggggtttcgctcatagatccttgacgcgaaatctagttctttccgaacaagatcaatccccgagtaattgttctctgcctctgtatctacgcctagcgttttaacccttgttcttctaatcgcttgcagtacaacgagctggatcttcaaaccaaaaacttttctcggttcaacctgaaagagcgtcctgggtggttccacgcccatcacaaacggcacattagcaactttgtaccctttttgagcaatgtaagtggacaagggcgtcttccctgtccgggaaaccccgacaagaactatatcagccttgcttaagttctcaggtaaagtcccatcatcttgcttaatggtaaactcaatggcttcaatccttttgaaatatgcatcattgagagtcttgaccctaccaggtgctccacgtgtaagacctgacggagaaacacctaagtgagacgcaatcccttcgatgattggtcctagaatatcaaccgaaagcacacccaactgatcacaagcttgctttgcggattttgccatagaaggatttgctaaagtgtagaaacacattgccccttcctttgccgcttgcttaataatctcgataagcctctcctcatcctcaacctgatcaatccccaacccaaaaccaaagtaatgacaattctcaaaacctaacactttcggtttaaaagtcaagttttttcttgctcagatgatcactaattgcaactagcattcactaagatataatcagtttccatgtaatgatccaattttatctatcctatgagcaattctactagcaacattcacagagaattctaagaaaggacatattttttcctgaaagtaagaagatttgattttcatttacccaggagaagagatgggtattcacagaagagccacgattcaacgaaaaatcttcgaattgtcccaaagcggcgttaacggaatgctctgccgtccacccagttccgtcggaaaccaaatatatagactttcccgccgttacctccacgtcgatcgccgtcgtcttcttatcagcctcatcggtcggttgggcttccgttacttgacggcgaggtgagttatcggaacggggaattggacggtcaagcttaacaccagatcttaaagctcggcccctagaccaccgattcaatttgggactaatcttcagcttcggactcgacgaacctgtcggaattggaggttcggaattaggctcgtgatggcccgagacgccgtgtaaattcatatcgccaaagtttatgataacttttttttttttttttttctgagcgacggttaaggcgttaaccgctaaattgcgttccgatgaaaaattgacgaaaatgtcctcactaattacttgggcttgaaaacagatatttgggctttaaaaagcctaagtaaaaagtgcccaaaagactcgtggaaacaataataacacgcgcatcgctagagcttacgtttgacgcgtatcgtcgaccacaacatcgatatcgatcgagccgacaaaagaaaaaaaattatgtgaacattcctcttctttcttttttggtttaaatgttaacattcctcttctttctttttttgtttaaatttgaagaatcctctttctctctcacaatcacacgaatcttgtcttcttttctctccgtctctttcgatacttggcttcaatcctgtgacgtcctgttctattgtgccttaatcgggtaatctaaaacagaacatacactatcagttttttttcgtgccctgcttctcgaagtttccgattgtgtggttggttgatacatatctcattgattatctttgttactgttactttcatctcttatctcattcaattataatctagggttcttacttcttctttcttccctctccgctaactatttggcctggacaccttttttattttttttatttgaatcattatagtaatcgtagctttgtagatttcttgctgtataaatctctagaaaatcgctcaacggttcacggaatgtgattcaagaatcttgtttatgtttgttctttgatttaggtatctaggttcgtgtgagaaaacagaacaatataatg

SEQ ID NO: 10306 - DNA, 3000 bp, Unknown
  misc_feature (1)..( 3000): cDNA_ID_2715520_gDNA_ID_2213642_Annot_ID_132294 3000 nt of promoter + ATG
ttttacgttggttattactattagtgcaaaaccaaaaataaaaaaaccaaagaaaaaaacaaacacaatcaaattagaaatgaaagttgaattaaacaccttatttactatataaacacacatatatacttacttatatagatacatacctcagcaaggagtttcttgttataggcaagtagagaagcattgtcggatttaagagactcaaactgtttcttgagtgaatcataatctctctcgagctgtctagtcttccacctagctctcctgttttgaaaccaaatcgcgatctgtcttggttgcatccctaatgctttagctagttgtatcttcctctctggctccagcttgttaccaagctcaaagctcttctctaatgccttaacttgctctaattgcagcctcttcttcttctctcccagcatagtatgtgccccatcgtctgatagattctcctcatccaaggtttgattatgatcttcttgcacgttcattaaagacatagatctgttcatcatgtagtttcctcctcctatatacaccaacagaattcatgactcaaatctatttatgtggagaaatagtgagagaaagagagagtatagtaccattgaagagatgaggaggacaagaagggagctgatcttgactgttgtcttcatgaagttgttggaacataaaaccatgttgaggaaacgccatctctaatctcaatccagcttctgttgttggatcaaacacatacatgtatgtattccaccaaaaacctatcagtgattaatggattgtgaaatcagtatagtgatgatcaaatatactttgttgtttgcagatttggaaatcactatcaaatgagttaggtgtttcttgtggatctcatcaacctctcatataagagaaagagagagaaagaatgaggaaaggatcaagctagggaggtttctaggacccatccttaatattttaaaagctttaggcttattattatatttcatatatattctccagttcatgtaataaagttattttatagtttctgcctcaaatattttcgatcatgtaacgttactaatcatatcttcatgatggttttttttttctttttcttttcacaacaccttttatgctttaaaacctcacatatcatttatttatgttttccaaggaagcccaaagactttttacatcaattgcttcctcctccaccgatatgggccgctgcttttgcagcccggcccaaagcatctgagaaccataaagccccattagcaaagtaacgactgttgaccacactagtcgctgcagctgcagccactttccctgtaatggtggctgcggctacagcagctgtgcccgtgacaagaaccgcggatttagtgaaatccgagaaatgatacttctcgtccgctgatctcacgagttccatactcgactgaatgttctgtgtgaggccaaggtaatggctgatctctgccaatttggtcgctaccaagcttgaaaatctctgagactcatccaaagctttggctttaccaatcgcgtctttgcttaaaacgtagcctttagctaacatcgtctgcacaacttgttgagccacggttatggcctctccaggcgatgaagcaaacgcgtctgaacgagtcacctacaaagaaacattttcgagaatctttggcttataacctaaagtaacctagtaagtattgtttttaatgttaccgtaacactatagtcttcttcttgtctgagattgttagattcatgtaaatagacaccgtagaccgatatccaaacggtttgatcaacgatcgtagctccctgaagatcaacattaaaatcaatgccaagaagatcatactggaaatttctagctaattaagggacttacgctaagtaacacagccatatccagagcatacgcatctctgaaggttacataagccgttaatgcatccccttggcacctgaaatccatggagacatgaaacaaaatataaacagattcaagaatgattaataatttactgaacaatgaacgttgttgttacccggtgatttcaacgagctcgacgataccacagtgagagaagaacctatgaacatctttctcagtggcttgaggagacaagttggtgacttgagcaacgtaaccacaaggatacattatattgttctgttttctcacacgaacctagatacctaaatcaaagaacaaacataaacaagattcttgaatcacattccgtgaaccgttgagcgattttctagagatttatacagcaagaaatctacaaagctacgattactataatgattcaaataaaaaaaataaaaaaggtgtccaggccaaatagttagcggagagggaagaaagaagaagtaagaaccctagattataattgaatgagataagagatgaaagtaacagtaacaaagataatcaatgagatatgtatcaaccaaccacacaatcggaaacttcgagaagcagggcacgaaaaaaaactgatagtgtatgttctgttttagattacccgattaaggcacaatagaacaggacgtcacaggattgaagccaagtatcgaaagagacggagagaaaagaagacaagattcgtgtgattgtgagagagaaagaggattcttcaaatttaaacaaaaaaagaaagaagaggaatgttaacatttaaaccaaaaaagaaagaagaggaatgttcacataattttttttcttttgtcggctcgatcgatatcgatgttgtggtcgacgatacgcgtcaaacgtaagctctagcgatgcgcgtgttattattgtttccacgagtcttttgggcactttttacttaggctttttaaagcccaaatatctgttttcaagcccaagtaattagtgaggacattttcgtcaatttttcatcggaacgcaatttagcggttaacgccttaaccgtcgctcagaaaaaaaaaaaaaaaaaagttatcataaactttggcgat

SEQ ID NO: 10307 - DNA, 3000 bp, Unknown
  misc_feature (1)..( 3000): cDNA_ID_2715512_gDNA_ID_2213642_Annot_ID_132296 3000 nt of promoter + ATG
caccgcagaccaatgatagtcaactacattttgatgttaattaatctcaatcttctaaccacaaactcttataatattgcaagttagtttaaactacttacataattgagtataaaatagcttcaaccttcatcaacaattcattatcaatcgagcaaaaaacaaaagctaagagcaacaaactaaagattttttaagaaaatggcagcttctaagcgactagttgtctcttgcttgttcttagttttgttgtttgctcaagccaattcgcaaggtttgaaagtaggtttctacagcaaaacatgcccacaactcgagggtatagttaaaaaggtcgtgttcgatgcgatgaacaaagcaccaacacttggtgctcctttgcttagaatgttcttccacgactgcttcgttcgggtatgtttctgtaataagtgaaatgaataatgattttaatatatttcatgatgtcacgttcttaataatgtgagtgaatcgtgtatgatcaacagggatgtgacggatcagttttgttagataaaccaaacaatcaaggtgagaagagtgcagttcctaacctaagtcttcgagggtttggcatcatagacgattccaaggcggctctagaaaaagtgtgtccgggaattgtttcttgctctgatatcttggcacttgtcgctagagacgcaatggttgcagtaagtaattttcacataatacaaaatttctacatatatacaaatataatagagctctcttttaatttattatatatcctgaatatgttaatttctagcttgaaggaccatcatgggaagttgaaacgggaagaagagacggtagggtttctaacatcaacgaagtcaacttgccatcaccttttgataacatcaccaagcttatcagcgattttcgctcaaagggcctcaacgagaaggatctagtcattctctcgggtacgcaaaagtgaattaatgatatttactatagtctgaaaaatgaataattaatgatggagaatatacatgtttttctaaaggtggtcacacaattggaatgggacattgtcctttattgacaaaccggctttacaacttcaccggaaaaggagacagcgacccaagtttggactcggagtacgccgctaagctcaggaagaaatgcaagcccaccgatacgacgacggctctagagatggatccggggagtttcaaaacatttgacttgagctacttcacgctagtggctaagagaagaggacttttccagtcggatgctgctctactcgacaactccaagactagggcttatgtcttgcaacagataagaactcatgggtcaatgttctttaacgactttggtgtctctatggtgaaaatgggtcggactggagttcttacgggtaaggccggggagatccgtaagacgtgtcggtctgctaattaagagatatagaaatgaaaatatctcaatatatgtgagtttgattattattgtttgcttcttttattttgttgtcatccctatattaaatgtgattgttttcttgggtattgtttcttgggaataagctgtatctaaaatttataaaagtcttgaaagttcagaatgttattattaagttataacgtttagtcattttgaaaagccaaaaaaaaaaaaaactgaatcaccatggatttgaatattgagaccataattaagttaaacaatgtattttttattattaattaataataaaagttaagatttgaaggaaaatggttaaaaaccaccaacttcagcagaacatctgttccaaactttaagaatcctgggacgacctttagaggcaaatggtttgtaataataagtctgaaacaaaagattcctcagcaccatgtgacattcttggccatatatgatcattttcagacaacaatacctcgaagttggtatgttttgaagaatctcagacatgacttgatcgctacatttttctccccccatcaagccagcgcaagtcccggcaaactgaacaagttctgttgactgtttattaagcatgtctatattgtattcactcgtactcggagatcttgcaaacgtggaatctaaatcaatattgggatctatcaacggtttctcatcatctgccaaacttggataagcaaacagtaccaacgtggtgattagaacaaaagccatgtaaacgtgattatttttcttcatttttttattttataacttagcctcctctttcacctatttactccttgtaaataaaatttgtatgtgtatagagattatataccctaaacacacagtagtcaactgaatgttattaacttatccgttatattgtaattaataaaactacgttttgtttctttgtttgttttctattaacaaaaaaaatgatttactctataaaatttgacgtttttttttgtaataaaaaatatgttcagttacgttattactattttatgtattaaatgtaaaattgaaaaaatgctttatggaattctgaatttcttgaaaacaatttggagggtggcccaaatcatcaattttcttttaaggtatttattattcaataaagttttattccggagttatgctaaagaaaagagtgtcgatatctgtattttgtggacgatttagattacgaagaaaatctcgaggaataaaaatttatgtggcgagagatcaattgcatcataatattatgctcatgaatcacgcgagagtttatggtgatttcgctcattgtgtccccattctctcttcttttgtttgattcctcctccctcttggttaacaacaacttcactcacaaagcattcccttttttatttttatcgctactctccgacaaagccttcttctttggatcatctagtctaggttcggttttctcaattagctctgttcgatttcgcggatgaaacttgttcaagtttgtgtctgatctgctctgctctgctcatacttaaaaaaggaaactttatttttctgtaa

SEQ ID NO: 10308 - DNA, 3000 bp, Unknown
  misc_feature (1)..( 3000): cDNA_ID_2715508_gDNA_ID_2213642_Annot_ID_132297 3000 nt of promoter + ATG
aaggagacgagaatagagctgagaatctcggatcatcaagttcagcagcaggtatcttgtcttccgaaatatcagtctttccttttttagctttccgtttaatattataccctttcagaccattaccatctcctgcattctcatcagctagtaacaactcaagctccgctctacttttttcttccgctgctacttcctccttctttgtctttccttctttcttcttcttcttaagaggaggttcctccataaagaaatcgtcatctccatcatctttcactgcctttctatcaatgttataatcgtcgtcatcatccggagaagaatcatcatccttctgtttattcttcctggctctcttcttctcgcgtctctgccttagatatgtttcccacaccgattctgactggttgtctttctttttaagaatctctttgctaagatcttctaaaccggtattgaatgttacctccatatcctggtcattctcctcctccaggtctttatcagaatcaacatcttcggcttctattaaagctcggtacttatctttcttcttgtccttttttttactctggttaataacttcattgcccaagtcgtcttcctcatcagaatcactctcatcagaagctaaaaactccttcatctcaagatttgccaactatgatttgagaaaattttatcagaacaataacactacaacaatggagatgcttttaagcaagcaattaagcctaatcacataaattataaacccgtatacagacctgttcaggattgaatttctgatttaaggtcttaatccggtgcggttcatcttcatcccaagaaagattaactttgctcatctgcagagctcggctctgaaaatctaaaccttcataaccagctggtgcctatatttttataacaactataagatcacaagtattcacaatgaaaccaaaagatctcaagtaaaaggaagtagcggtaacacacctcagatgcaatatcacgaggtggatgtttgaattccatggaatccggaataaatcttaggtcgagcttgtttgatgatctctcaaactcaattccatcacatgatttgtacaagtaatctgcagtagcacttgaatcacattcggcaacagcgaaataatacctgaagcaatagtaaaagcagagtttcagtaatagtccctctccaccacatatagcttaagacgggcagattcgaacttactttaatctacttatttcataggcacgtagcttctggttgatgacatcctcatcttcctcctcttcttcatcttcatcatcactagcgtcattctttttgtcgccatcaattaccggcccatggatttcctcctctttcattcgctcaagtccgaactcagatggatagaccgcaactgacaaaatgcgcccatcttttggcagaaacgaattcaacactacgtacaagtctttagcctaagtaacaaaataagatatcatccataagaacaactccaaaaatcacagagcagtgactctagagtctagacaaggcagagaaagaaacaagctctacttaatcttagattcgttccataaccatagcaaagatattaacgtcaaagaaggccaaattgaaacaaaacatcatagattgagagaacttacagagacatgtctccaatccatgttaacgatagccagtctatgagtttcttcttggataagcggtatgttctcttcctagaagccatcatcatcatcatcaccaaatttgcaacatgagaaaatcaattacttgtcaaaaactagtagaagaacaaggcacatgaatcaaagttgagcaatttaccggaatttctggtccctcatcttcatacatagcttcatcgtcctcatctgtatcatcctcttcttcttcctcctcctgcgaggataactcttcagagtctgctttctcatcagattcatcatccaaagaagcaacctttagctcactctcactctcttcctcagattctacatggctagatttttcggatttcaaatcatttatctctgtctcactcccgctctcatccccagattcctcctcagttttctgcttaccttcatcttcaattcgataaaactctcgaagcgaatctttgccagtgcctcctgttctacgcttgccacgcttatcgacaggagcagaaccagtggcaaatcgcttatcattgaacataggctggaatctggagtcaatggcgactttggagtcacgcctccgcatcctacggaatttagggtccgtgtgcgccgacgaaaaccttggatccttaatcatttcgtttccttcctctgcgactccactggatcctttagcttcttcaatgctctctcctttcctttgcttcttattctttgaacccatcgttagactgattcaggaacaacggagcttctagggttttaggactctggtagacgaagaagaatcggaaaattagggtttttatatgtctgctcaaaaaaaaaaaaaaaaacatgacgtcatgtgtaaaaaagagttatctaaaaaagcctgcgtgtcactagacgaataaacttactactattcacattgattccgattggatttggaacctaaaacactaaagagattaaaattttgaattcttcatcatgacgacgacgacgacgattcagtctcctctctctacacgttgaatttcaatcggcttcacgaaccttcaacctcgtgcggatcgaaattcgatcagtttgtagtaaccgacaagttccgaagatttttcatctgctggatttcgtcgatcagattgaaaccgagcttttcaatcaggtgacttggatatttctctacgttatgctcgatctgaagaattgggattcaaatctagtctcatagatcgattctgattaaactcgtggagatccaatctctatcactagttcgattggattgttgtttgttatcttcaaggcctctctgtgtttgtgagtgagatg

SEQ ID NO: 10309 - DNA, 3000 bp, Unknown
  misc_feature (1)..( 3000): cDNA_ID_2715504_gDNA_ID_2213642_Annot_ID_132298 3000 nt of promoter + ATG
aaaaaaaagaaaattactaatgaaattaggatatggttagtaaattgtagattaatgatttggttttgtatattattgatgttggtcatctagatataaaagtaaagacttacttagtccatagcttctatcgcggctgaggatgtcataccatctcattctttcgcaatatttcttgtatacatggtcatcttcaactccttgtgtttgaatattctctatcgtaaccgaatcttggagcgctgaatccaagcttgcaatagataaaggcgagggatgatctcttttgctagaaactagaaaagatagatcattctccacgtctgagtttacaatttcttcttcttcgtcatcgttggttaaagaagcttcatcttcttgatgtattggcatagtttgaatttcgaactcaagattcttctccatgtttacaccatcaaaaatgtcaacgtcgtgttcctcctcaacctccttagcatcaagaagctcaacaacatcttcttgatcatattcatagaaaaaatcatccacatcttcttcttcttcaagaatcttgcctttttgcatagatatacgaacttttaaatgactatccacttgatatttaaacgaaaagctaaatgcaggaaccgggttatgagtacttgtagagagttccaagttatcaagggtattcttgatctcttgcctagactcaatatgacaagtaacctcctttttaaacataatgactcggaaagaactactaactagcttagagaacgtgaacaagaccgatgaaaaggcgttgtaaagagcttgaaagggtgggagaagccataaaaagaagagataaagccatataagaagttgacaaagaaagagaacaagagggtgcatgtataatttcatgtaagacgatttcaagaaaccatcttgaatcactatggattctatcattagccaacatgctgagagtaaagccatcaaatgtctgagagagagatgagagaggggggagagagagagagagactcaagagagtgtctttataaagaagaagaagaagctgctgagaaagagccttgttgaaatatttcccccaagactaatcattaataaataaagttggtaaaaggtcaaattgattatcttgagtgttctttcctatcagttccaagactttggttttaaacatgtttggaactatccggatattgaattaaacttgttcaatttgtaacagaaaatattcgtctttagtgaattaactaaacctataaggccatgtattggctataatcatcttttttaattaaaagagccaacttgaccctccatagttgtaactgttaatcacttctcaagctccatcacaacgcacatatgaagaacatagaaaactaacaaacacacatgatgatgttcttcaatgtaagtaacatctctttcgcaaccttcacaattgaaaacctaaccagatcataccatattcaacatcaatatctatttcgatagggctcgatcccgaatgcgaaaaaaagcaagcaaatcagagagtataaccaaaatgttcttcactataacctggttcccacaatatccttacaatgcttattccaattgtacattatttaaacacatggactataacatatataagtttttgtaaaagagtgtgtatgagagaataaaactaaccgaagaaaagtgtagtgatccaatctcatttccaaagattgaacctttttttatatatataataactttgttcgcttattcatttcttgatcttcctctgctgcttctttggcccggaaacgactaatctccttacagaacaaccacacctcgctctgaaaacaagcacggctcgcccattaggcggagccatcttcttcagctcagcttccaattcacggtgatgaacacgaggcaactcaaacattcccctcttgttgctggagctcttgacgcattcctcagtctcaagctgaatatcaaactcaacagctttcctaaggcctttacaattcggtttgccgcatctctgcatagtacacaagagtataacaagccaagtagagatggcagcacagaagatactcaaagctaatgatccatacacaatcgggttctgcaaaatctcttgtttgactaaaagagagagatctgaaaagacctcaatcgatttgagggtgatgagtttgacgtaagggaagaagaggaagccgcaggcggtgatgaccgcgataaggatcacgacgtcgatagcagcggactgagatccgtcgcagacagggaatttggaacaggttggtgatgatgaagatttattacgggtgtttctggatttaggtgaggagtgagacatgatcattgggtcgacggaattgcagaccgagattgagctatgcaaatataccatctcactcacaaacacagagaggccttgaagataacaaacaacaatccaatcgaactagtgatagagattggatctccacgagtttaatcagaatcgatctatgagactagatttgaatcccaattcttcagatcgagcataacgtagagaaatatccaagtcacctgattgaaaagctcggtttcaatctgatcgacgaaatccagcagatgaaaaatcttcggaacttgtcggttactacaaactgatcgaatttcgatccgcacgaggttgaaggttcgtgaagccgattgaaattcaacgtgtagagagaggagactgaatcgtcgtcgtcgtcgtcatgatgaagaattcaaaattttaatctctttagtgttttaggttccaaatccaatcggaatcaatgtgaatagtagtaagtttattcgtctagtgacacgcaggcttttttagataactcttttttacacatgacgtcatgtttttttttttttttttgagcagacatataaaaaccctaattttccgattcttcttcgtctaccagagtcctaaaaccctagaagctccgttgttcctgaatcagtctaacg

SEQ ID NO: 10310 - DNA, 3000 bp, Unknown
  misc_feature (1)..( 3000): cDNA_ID_2715488_gDNA_ID_2213642_Annot_ID_132302 3000 nt of promoter + ATG
tcccaatccttattcattcagattgtggaatctaattttctactatgatgtgatttgctaataagttatgatgataccaacaaatgcttcttcttcatatgcagataaagaagaattcgcagattaaggccgaagcaaaggctcatcactaaaccaactcttcttctccttctcaataagattatgaagccaagtgattgttatctctaaatgtagttcttttcctccttaagctatatctccctcggtgacattttttccatctttctgtttttttaatcaaaatcttctgtctgacaaagcaatcgtatacccgttttggtttaaacctgagttcttctttggtactttcctgctattcaataaacaccatatttttatcatcttaaccagataaataatttataaaaaaaaaaaaaaaaaaaaaagaatttttattgttttcaattaaaataaataaatatccgccgtggcgcagagttaaaagtaagcagttggctattcaggacgaccaatgtggtcactgcttggtggcaagaacaagttgtgttcgagctatacaaggtcgtggcttcgaacattggtcacactcacacattcgctgtctctctttctcacgtaatagaggcattcttaaatgcctttttctgttctctttcattctctacaatttattaagttatttgaacttattgtagaaacctaaatgtttgcacccaaaattaaaggttacaagatgagtatcttctttgagattttgagaagagtttctctatatggcgttctatgtctagtttgaataatcaaatcatcatttatattcccatcttgaaactttaaaatcactatccatagaatattcaaaaccataccatgaacactacaataatacaatactatataatatattcatcattatacttttaatgggagtcatgggacacgcagtaatcggttaatttcattgtgttggtgctttcttcattggacggatgagaacttaaagaataaattagtatgattttcaacatttaaatataaataccacttgaagtgtttttgtggtccattggctaccatcaacttgaggtatattaagtccctatatataataactaactaacataagttttggatttaaattactaaaagggtaaagaaaatataatctttactattaatagaaaataaataaatatttttatacaatgaggatattatataagtctaaatcctgagttaaaacctcaaatcctatgtttttttgttgtcattgcttggacataacatattgtttcgaccaaaaacaaaaaagaacataaaatgttcttaagattcaagttctttttcatatcaattaagaaataacttacggcatctttaatttatgtttgttttgatcaatcacataattatagtgaatagtatatttttagtgctattacctatccttacaaatccataatcgaatttcaaagcaacgcgacctaccctcaggtctcaaaacgcacgttcaccaatacaaagtggcattttcgtaaataacattaagaaaaaaacaaattaaaacagttttgtaataagatcaataattatatattattagatgactcggataagccattcggctttggtctttttgttattgccaacaattaagctcaggcttacgaaagtgattgtctgattgacgttttctttttcatttccttttttggtccctgaatacaccttttgagtttgaggtatatctgtcctctttcgaatctttttcttagtgattcctgattattaagaccatctccatcaatggtttctcattaaaaaactgttcaatataaaaataaaatataatcaaaaagtatgagagagagtagaattagtctttcaagtgagaaactctgagaaacccataaaaacacttgtatatcatctatttgtcaaatattattttattgttaaaatttaattatataactaatatttattaaaatacttatatcttttattttttagaaactaagaaagtatctcactgatggagatgcccttaatacaattcggtttgtatttatttctatttttcccgtaattttatgaccctgtaaaaaagttaccgtgtttttttttcacttttcttacatgacataattaattacaaagtatccatcaccacacaaatcaatacaaagctttttgaagtgtgatggtgtgtttatttaaagactttgaagtttggacccagaccattatcacacaagtggaccttattttatatttcgggtccagttgttagaaatttctttttacactgaattcattaattaaaaaaacaattatttaattagtacattttgatcgttcgttttcatgctacatttgagttttaaatagagaaggtctcaaactcacaactatttttttgactttaaatgtataaattagctgcaactttaacaaattgtgagtagttgtagttgcctagattctatttgaagactacagaccttaaaaaaaaaaaaaaaaagaggtcatagtcaaaaacaaaaaaacaccacatttggtaaatttatgatgtgttctctttttaaaaataaaataaatttcatgtaaaaaatctgtacgttcaaaatatctcaggtgattaatctgtaagtacaaattttaattttcaacatgaaattgaatgtttaacaataatgagtagttggaacttggattgaaaactcaacaacaactcattgtttggataagtaagtagaaatctggcaataaacgtattctatttttgtaacgtagaaaattagaaaaataatagtaagaggaaaaggcatggtttagtctggtcaagttaatgtaaaccagagtggttaaaaacaaaacgacaaagcaatttggcttcttaaaaacccgcccatggagaaagccctcacgcacctctaaaccacaaacaaaaagagagagaagagaacgagagaatcattgagaaacgaaacaaca

SEQ ID NO: 10311 - DNA, 3000 bp, Unknown
  misc_feature (1)..( 3000): cDNA_ID_2994643_gDNA_ID_2213642_Annot_ID_132304 3000 nt of promoter + ATG
tgagtaaaacatgttccatatattgtaaaacatctcaaaagagcactcactggttgtttagttattaacaaagattgtttctcggtggtttaggttcttgctggatgcatctgtggttcactgaagttggtttcagaaattcgcaatctgcatcatgtgttgggaggaacacttaacccagtaaattacttgactgtctcatttatccctcttattatgctgttaattcatgaattctcataaaaggtttgttaacagaacgctgcgtacctaatcatccgaggcatgaagacattgcatcttcgtgtacagcaacagaattcgaccgcttttagaatggccgaaattttagaggcacatcctaaggtatgcaatatctcttttttgagtaaatatcctgacactatccaggtgagtcatgtgagtaaatatcgatgcaattttgatttgcaggtgagtcatgtgtactatccaggccttccaagtcatcccgaacatgaactcgccaagcgacaaatgactggttttggaggtgtggtcagtttcgaggtaatatgatctatcaccaacctaatctctatctactccagattagcatttaagtatgatcctgaacaccttgattatctttcttgggtagattgatggagacattgaaacgacaatcaagtttgtggattctctaaagattccttacattgcaccatccttcggtggctgcgaaagcattgttgaccaacctgctatcatgtcctactggtatgtctttggcaaaatcgaacaaagttatctttgattccatatgcttccgtctttgacaaaatcgaacaaatttccgatttctaatgggtggttttgatttcagggatctgccgcaagaggagagactaaagtatggaatcaaagataacttggttcgtttcagctttggagttgaagactttgaagatgtcaaagctgacattcttcaagctctcgaagccatctgaaaatgacacatcacacaaaaacgctgtcgtttctttgtcctttatttatctctctttgctgttttcagtcaccgtaataatgatgtctttgaactattgttccgcgacatttacgttccgaaataatcgtgtactattatgatgtttgttgtgctatataataaattctgtttagttcgttttgcgtcttaaagaggttaaattagataactggtcccatgtgaacgaccattgtggccattgctttgtggtaagaactccttgtgcttggaacctcaaggtcacggcttcgaacaatggtcatgaccctctagcttctgcttcttcttctctttgtttcaacaacatataaggcattcataaatgcctcgtctttttttgttttctttcctttcaatacgtagttcgatttcgatttcgatttgtagatctcagcaaaatccatgtcttgagagaatgattaatgggcctttttaataagtccactgataaagacgagagcccaaaacgtaattgtattattatcttctttatttgcttttaaattttaaattgacattaagacaagactaacttttgcttgtcaaatccatgtgttgtccagcgggtaatcaacccaaagttccggatccggacccaacagtaagcaacattttacgattcgttgtttttgaatcccaatgaaaaaaaagatggttatttttaaggaatggaaaaatcgagaaaaatggtatcgtgtcgcatcgaggacttattacgtatggcgagagagctcaaaccaaaagatcaccgcctcgactgattcatcttttctcctggtatgtattttggaaaattcgtctcttgctttttatttgatccagatcagaaaacgttgtgcagattgattctgggtttatcagttccttaccaccatagtactctccatgttcttctcaattgtaaattcctttcctttttgtgtgtcaatttacacatatctgatatcttcttcgtgttgctcccaaattttgcagattcttggcaggcttctcttggtctaagtgaatttggagttatgcttctgtcagcacttttaacttcagtgggaatcaatcttggcctctgttttctcttcttcactttgtattcaatattgagaaagcagcctagtaatgtcactgtatacggtccacgtcttgttaaaaaagatggcaagtctcagcagtcaaatgagttcaacctcgagaggcttttgcctactgctggttgggtcaaaagagcattggaacctaccaatgatgaaatcctctccaatcttggcttagatgctttggtcttcattcgtgtctttgtcttcaggttgattgattcattgagcatctgcttcaagtttgactttttttttgtgaaacttcaatgcttttttgtttggcagcataagagtgtttagctttgcatctgtggttgggatcttcatacttcttccagtgaattatatgggaacagagtttgaagagtttttcgacctcccaaagaagtctatggataacttcagtatctctaatgttaacgatggatcaaataagtaaagaactcgaagctatgcttaaacagtatcccgatttctacttgtccgtaaccgatctcttatgcttgtatgtgttttgcttcaggctgtggatccacttttgcgcaatatacatcttcacggcggttgtttgttctctactttactatgtaagacgccttttgttttgtccatccattctactttatatcgcctatatgggaacataaaataatgtttggactatctttgcaggagcacaagtacattttaacaaagcggattgctcatctttattcatccaagcctcagccacaagaatttacagttctggtcagtggcgtccctcttgtatccgggaacagtattagtgagacagtagaaaactttttcagggaatatcattcttcctcgtatctttctcatatagttgttcatcggacagacaagttgaaagttctc

SEQ ID NO: 10312 - DNA, 3000 bp, Unknown
  misc_feature (1)..( 3000): cDNA_ID_2715477_gDNA_ID_2213642_Annot_ID_132305 3000 nt of promoter + ATG
attgaaacagtctttattagcaggagaggtgagaatttgtctttttgtgactacttgcattcttcaacatattcattcctttttttttggcaaacccttttaggaagttccagctgcttttgtttcctttaggacaagacatggtgctgcaatagcaacaaacattcagcaaggaatagatccaacacaatggctaactgaggcagccccggagcccgaagatgttcattggccatttttcactgcatcgtttgtgagaagatggatctccaatgtagtggtgcttgtggctttcgtagctcttttgatcctatacattgtccccgttgtattggttcaaggtcttgctaatcttcaccagttggagacttggttcccttttctaaaaggaatattaaatatgtaagtaaagccctatttagataaagatggttcttcgtttcaattgaacaattacaaaatcttcttttttttcttatgattgcaggaaaatcgtgagtcaagtgattacgggatatcttccgagtctcattttccagcttttccttcttatagtaccacccattatgcttctactttcctcaatgcaaggattcatttctcatagccagattgagaaatctgcatgtatcaagcttctaatctttactgtatggaacagtttctttgcaaatgtactgtccggatctgccctttatcgtgttaatgtgttccttgaacctaagactattcctcgtgtgcttgctgcagctgtgccagcacaggtaaagaacacaaaattcagtattgaggtttccggaattcccttttcgtaccacgagtcatgtttattgtttaatctttggtgtaggcatcgttctttgtatcttatgttgtgacctctggatggactggtttatcatcagagatcctccgtttggttcctcttctttggagtttcataacgaaacttttcggcaaggaagatgacaaagaatttgaggttccttcaactcctttctgccaagaaatcccaaggattctattttttggactcctcggtataacttacttcttcctttcgccattgatactgcctttcttgttggtctactattgtcttggatatatcatctaccgcaaccaggtaacggaaccaatctcactcctaagtataattctctgttgatctctgataaaatcatataggaatcagctacacatattttcgttatatggaatctcacttttatcttctctttatatgtgatcccttttctaaattctcgaatagcatctttaaaccgaaagtattttttggagcttcagtcatgacataaacgttacatcaagaatccattttctcgtcacataattctttttcttcttaatgaatccattgcaacttgttgatagaaataacatcacctttttgtgctgcagctcctaaacgtatatgcggccaagtatgaaactggtggaaagttttggccaatagttcacagctatactatcttctctttggtactaatgcacattattgcagtcggattattcgggcttaaagagcttccagtggcatcttctttaacaattccccttccggttctcacggtccttttcagcatttactgccaaagacggtttttaccaaatttcaaatcttatcctacccaggtaaaggctttagagaaatagttactcatatttttgatccaatggaagaaaaatatggctagataatcttttattcctaacctaaacaaaacaaacagaacatgatgcatagtcctttattacattacagcatctactctaaacctttatatggtgatgatggatgttttacttttgcagtgtctggtaaacaaagataaagcagacgagagagagcaaaacatgtctgaattctattcggaactcgttgttgcttaccgagatcctgcactttcggcatcacaggactcgagagatatctcaccttgagatcacctttttacttgagctattgaagtttgcttatgttgaagctgttggtttactatacctggtgcaatccatgaaagaacacactaaaccggttgtcttgtacattgggtcttaaccgagaatcaagcggtttttgtcttgtacatttgcttacacttggcttgtgtaaaaaagaaaaaaagtttatgtcaatgtatctctctaaaccggtttaagacggtacaaactttttgaaagatgccaaaacaaaacggtggttaataattttaccacagagaatatttagcaaaaagatgatgactagatgccacgtccgcatgggggtatatattgtaattagtcgtaactctgggggtaatttagttaaagattgatccgtttatggaaccaaaaatcaaataatttcgtctttgatacttgcttgcgccttataggctacaggagcgagagcaatgaaagcgagaggaagaatctatcaataatttctgggtttaagctgatctctggatcttcctcaattttactttttcagctcagaaaattttgggacttttttttgctgcattttttggttccgaattttctcctccgccttttttaatttttggtaagtttcgatatctctcaattttcttatttcggaaataaaaaaaattctcgcccttttgcaaatcaatggattgatcttgaaatcgtcatttctgaatcgggtacgagagatccagtaatcctctgcgattgaattattattagggttcatattccgaattggggatagtctgaaaattgctattttaagctctcttcttagtgttggttggtttattctggataataaaagggatcctaattctcgctaaattctcatgttcaaacgagtagatgagtttaatttagtttcttcaacgatcgatcacagaatcttcaaaagtgtaaaaattacttgctttttgttcctattactcttttgcagtttgttttgtgtgttgtgtactagtagatctaatatctctctctctttttttgtagaga

SEQ ID NO: 10313 - DNA, 3000 bp, Unknown
  misc_feature (1)..( 3000): cDNA_ID_2715473_gDNA_ID_2213642_Annot_ID_132306 3000 nt of promoter + ATG
taccttcttccaaacaattagtaatacactaatactagtagtctactatgcaaaacaaatatatatattacacttaacccatgattagggtttaatctagtcatgtcccaaacagtggacaccatgattagacactttagcctatcaaatccctagattttttatttgtatggtttaaattaaaaaataattaaaaattaaccagctagtcagactatttagtttattgactaaagctggcagtttaaattgtatcatttgttcatcacatcgaaaatgacgtgattgtaaactaatctgaccacgagatttgatcatttgaagatgtttaattttatagttcaaacccataaaagaattcactttcaattttaaattattgttgttgtggtactttccggattttcgactatgtaaagggcctaaattagttagataatagcttgacccttatccaaaagtcaaccacacgtcccgacaaaacaaacagctcttgaagggtttttttggtcataagatttttgttccccatgtttcttcaaacatcaaaatctttacgatattaaaattctctgaccccaactttaggattatattttttatttttgactattttcttgcaaacatagatttcaatttctttaagatgtatccatgttaaaattatctaaaaccaggttacaattcttgacccttcttgtctcgagtttaagtaaacgtcttagtcgtttggatacaataccgtatatatatcaagaaatgtcaaacctttgttaatgttttcatttagtttcagaaaatagtttcaatatacttgattcccttttctgttgcgtccataacaactccatatcgagtgaattctaaaataaattttttgagtttatatatatcgattcgaatagtaaaatctaatttgaaaaatatggaaacatgattaagaaaatggaactgatactttccgttattcataaggtatcaataggctgttccttaggtgtcaaaaaaagaataaaatagaaatactcattgcaaaaacaaatgtcagttaattagtttaagttgattcctttaattctctcaaaactctgaagaacatgcaaggcagacactagttatgttttgtttcagcaaatccgaaaacataatttatgaaacgcaaatcgttggccgaatattcccaaaattacgttattattcattatgtcatttaatatcaaagagattagatctgtataatcagacttagtatactttgattttgagtcttttgacaattttcggcttcaaaatttcagtttaggcacaggaaaaatactcataatgattcgaacggtgtaacatatagtatcaataaattgaccaaagtcatgccgcaatatatatgttaataattagcgaatgatcaaaattatgattttggaatcaaataaatccttttaggatttttttttttgtatccattcaaaccccagtctgcatggagatatatttacacatatctcacatacaaatcctttatttataacaaaaaagttataaatggcatagtagttattctaatgttaactttattcatcttcttctcaaatgggcatcatatggtatacaaataaaataatcatagatgaatcaacgcataagctaatgagataccattagtagattttcgaaactttggtgaagcaataactagagagaccacacatagtagttattctgttggctattttagttaattgaagatgatgttctgaactatattataacaaatgcaagttggtccttttgtgtttggctcataaaagaataaggtgaatgcttattgcctattccatatctcacatttaatatcgacctgtaaaaatagtgaacaaaagaagatcaaacatatacttggaaccgtaaacagttctatatccaacacttatacgatcgacaagacgacgtacaacattatttttactacatagaaccatacacgataaacataaggctctagtgctctaccatacggcctaatatatattttcgatttatttatagtatactacaatagtttgtattctttggaaatcaaagtccgaacgtaacatatacccactaggtcaaccattgactcaaagaacttaattacattatacttacacttacattcgtttaaactaaaaagtgcattttgtcgccattggagttattgcctcgtagtgccggtcttgtgaggcaagcttcggaaaagaaaaaaaacaagcttctatatatgtgatccatttaagttattgatattcttatcacatatataatggtttcaatataataacccactatttcactactaatatcaaataaaacctagatttgtatcttctgatgattattgttgttttaagatgtgagagagattaacatggatagtaagactcgtgacatcaactcgaactttaaaaaagaaataccaagtaaataattttccgtacctgataatataaagaaagtattgattatggttcactcaaatacttaacatcaatttacaacaaggaaaaagtctagtaaacaaccgaatattgttggtccacaaaatttactatatgttaatgtacaaatagcaactaagatggcttttacaagttaaacaccataaatttggttattccatcaacctgttaaacaaaataatttaataacaaaagatgcaagttgaatatttttcataagactaataaaaaaaagatagcttaaatgcgaaaattaattagaacagagagattggaccacaataaattagtaataatattattattaaagaaattccatgtttagcccgtagacttttgaacaccaatgtcaaggctgcacgaaatcgatctaagaaaattagacattgaaacagaagactcttgtctctttgtttctctctgtatatatacacacagtaatatccatatctagagagatctacaaaaattgagattaaagtaatttatctttcagaaaatg

SEQ ID NO: 10314 - DNA, 3000 bp, Unknown
  misc_feature (1)..( 3000): cDNA_ID_2715467_gDNA_ID_2213642_Annot_ID_132308 3000 nt of promoter + ATG
acactaaaaggataaacgtgttcccaaacatccttttgtctttgatgtcaagtggcaatgcgacaaaattgcaacttattattatatcacctatacatgacaaaacttcaattattgtttagttactttctcattctacgtatattttgttttaatacaaaaaggtatcggagctcatttctcttacatccattatctaaagaccgttatctgataagtatcttgatatttttgatcggtgtatataccattttcgtaaaaatgtaactaaggtactttagtttggattcgaatctagcggaataaaactaccattttccagctgattagaaatttagaaaacgatcagctgtttggactttgggttagatttcttttttgagtttttttataaaaaaattaatttgtgtggtgtgagctaatattttttttttggtatttgttttgttgacagcgcaaagcgagcaaattcttatagtaagtgataaatatagtcaaatgttctaaagcaaatactaaaatgaacgtggaaatttgatcaactgatgaaacaagtcaaatgctctaacattcctttttcacacgtttatatcataaaaatctataaccatacaaaaaatgtgtgttcaagaattagtaagattttgttttattcaaagtgttaaatgatcgttcggataaattttgtagttattcaagggaaacatcagattactgtacatacagtgtcggtaccactggccaaagtcatctgtatttgcatttattaatttttgaaaaacaaaatacatatttttgtcaacaatcaaaacatacagtacatacatatcatcgatatggacaagtaccatttatgggtccacgatgaaaaggatatctaacttacaaatcgaagcccaagtttgtttgtttttttggtcggtcgaagcccaatacataggcctaataaagttttacaagattgttcagttgttttttcaacacatgatttttccccctaacaaaagcaaaagcatgaacaaacaaattacaactacaaaaaaaatcgaagcccaatacataggcccaaaaaagtttttaaagattgttcaaacaaattatattacaattgtttatttcgacaaatgattccccccctgaacaaaagcaaaagcatgaacaatctccaaagacacacacacacacccgagtgtagaatgactagagaaagatccaagaacccaacataataaaagagtaacactaaaactacaaaagagcttcactttgcgaagatatcaatcgaatcggatttcaccgataacaatcgttttctctttaaagattgttaccacaacctcagtaccgtgtcccaactgctgcgaaaacagctactggaataagaaactgataggcaaaaccggagaccgagaaggttcttcttgcactgttcttgttaggtgctgcagctggtggaggaggcggtttctcaactaaaacagcgagcttcatacctccgtaacatccaccaccattaccactaatcagatagtaatgccttgtcacattgagatgaaccaagtcccttccagctccacgactccaatttgcgatcgggttattgggattgcagcttatgtagttcgtctcgttcacttctataacgttgtattggtttctctcatatacaaaatctgaccagacacaatgagaatgaaacactatataagtcaacaagattcatgatttgagatcttactgaagtacagaaccagaacctaatctatttccaattacaaaggatgctgtgaaagaagcatccttttttttaataagaaaacagagctagtgaagaaactagtggtcctttttcaaagttgtaaaatttgaaaccattcatttgccaactgatgtaaaacgtatattaagtccgaaagcctgtgataacaagtatcaataagagttagagagcgtacagagccaatcgtcgaggtagaaatgtttgtcctgagcccaaatggtatagttgatattaggattccagaacttgttatcacccaccgtccacctcttcgccgtcacattcgtcgccgccagcagaaaagccagcaccgcccctgcaaccaaaaccgcaactctcgccatcgatcagtactctaaaaaaaaaaggatgagtcgtcgtttgtggggggggatgggtttatcgaagttcaatctgagagataaatatgtctctttttcagggaaaagatctctctagatccgtaattccttcgactaaccttcgaaattttaattaaacctcgaggttgacgaaaagtacaagataagcgttatgtaattaaccaaaagtaatattttccttttcattttggtcatatttcttaccttttttccggatattaatttcctttttttagtcatccagttggtctcaattgcttaatcataaagtcaggatttatttacttaaataacatagtattgaaataaaacgaatcttataaaaatgtgtttaatcgatgatacttttaaaagttgtaactatatacagtatactgttgatagccgttggggaatttcacattttgaatgccatgtcacatatgacaagtagcttttcgtgttctattattttccatcatagcttccacgcgcaagcttgaccaccgccattaaacttggtaatttagtataattcacatgaatgaattagtaattttgttaaaatgtgtaaattaaaaaaaagaaattgagaaagttctctaatgttcctttcagtttgaccaagaatatattcttaatttgtttcctttcttttgacgtttcaaaatgatataaacggagtaacattttatgtccacacaatatttcttgtaatatccacgtaggatgaaatatccatttaaaccggtccacgtgtccagacatcagcttctagttccattgtacaataataataaaaaaaccttacctgaactaaaaaaaaaaaaaaaaacgaactgagaagcgaagaagaaa

SEQ ID NO: 10315 - DNA, 3000 bp, Unknown
  misc_feature (1)..( 3000): cDNA_ID_3035915_gDNA_ID_2213642_Annot_ID_132310 3000 nt of promoter + ATG
aatttcctttgttttcttcttaatccgattgattcagagcattacgtatcactcttgctcaacagttattgctcagtctccggcgatttcttttgcgttttctcgagaaaagtaacggaagatcgattctttcaactatttctaccctcatactcttcgccaatcatctcgtcttccaacaagcttcgttttaatggaagaacaacaagaatttgagaaacccatcttcgaattccgtcctaagaagctcagaacctctcgagtttcgagaaatctcatgaagaagactggcttcagagaatctatgaatcattacgaagagctctcttgcaactacggattgagggaaaacccgaagaaaacccagaaatctttactcgatcatcgattctgtacgaggaggaggagaaataaaaagatcctgattcgatgcaaagaatgcgggaaagggtttctttacgagaaatgtctgtttaatcatctccaagtgacgcattctgaagaatctacaagaagaagcctgttttgtaggtttagtattgtgcagaggagaaaaagatcgaagagagtttccaggtacaagaagattcttcctcgattctctgtttcttcttcttcgtgtactatgtttcctgtttctgtggatgatggaggattattagaagtcgctgagtctctgattctcttgtccatgagtggtggaaagttcgtgaatggtttggaacattttggtaaagctctgggttcgactcagagaaaatttgaagacgggttattgagaaatgagcagagacttgttggtgaagctctggattcgaatccagaggtgaatttgagaaaagatggagactttgaatatgggcttttgagtaatgagcagaagaaacttgtggggataagcagagcatctgttggaacatcgaaagagctttcgggttacttggcaaacaagaagggcagagaagatgatgaattgggtcagcagaaacaggctggagcaagaatacttagagaagaaactgataacgaacagaaacttgttcgtcaagaaactgcatttgaagattcagtatcaggatttgagatgaatatagagcatcggtgtgggctctgtcacaaggttttctcgacttatcaaactcttggtggtcatcagacgttccatagaatgagaaacaaatccaaaagtcaaaccaagagatgcagagaagaatcgatagaagctgaagctgggattaataatggttcagtgacgttgacaataagtgcagagtttgctgaaggctgtttaggtcagtacatgctttaagaggttacaagaagtgtcaccacacgagagcaaatgatggagagacctttagattccatgtggatgtttctatggttactagtggaatatttgagcaggagtactgaagaagaagatcccctctaatgaataatgaagttttggaatttttgttgttgttgttgtctaatggagttgtgacttgttgtattttcatacgtagagaggtttcgtctttggttttctcaaatggtttggtattcaaagttgtacagcaacttgtagctgtgttatggttttagcattaatcgttctttcaaatctttttcccttaagtttgtgcattttgaatgtgttactaatattttgaattacaacaaaatcttgaggagccgaatacaatcataaacaaatcagatgataaaaactcgtaaatcgtttctaaattgtattcaactatacaatatattggtaatgatattgcaactttaagttgagagatcatactggaaaaagtacagtatctttttttttttttttttttttgaccgtatcatatcgtgtcggttggtcttcgcattaaaattaaaacttttcaaaattagtatgacgaatattcattataaatgaaactaaatacacattcctttcttgcgtatattaaatgactacgacagaaagataatcgtacgatagttttcagaaatatttgtgaggtgttgaaataatattagagtttcctaattgtatacttttcttcttctttttgcagccacttatttctatttatgtaaagaaaacagctgttaagaaaatattttacgtcgataagaaacaaaacaaaaacacttatttcaagtttaattataggaatatcagatccatcagaattctgaaaaatttgcacgttattagtctatctatattttctcaaactttctatcaaaattagataattgtttttggaaagaaaaagagcaaaactattcgattgggcatgaaagtcggaaagaatctataattagcaatatacaaaaaccctaaactcaaggtcaagacaccaatctcaaacacggttttatcattagaattaaaattttgattcccatttataattgagatcttttattaattacgttttttttttcttttcttttttcggctgtgcgtgcattagttgtttagatccaccggcgaaatcacttaaggaaaaaaaaggcttgatttttcttcttctcctctcatcttttttgtcttcttcttcttctttgacaagctcattgctttgtctttgatcctgcttgtatcacgaattcggaggacaacccatttcgattctcgtatcgaatttcttgaatcaaagagacggcgggaatctcaaattcagaattttgctgggttgtcgtaaatccaaatgcggtctgagagaagactacaaattataagaagagcgaatcggagtctaacatcatcggatttgggagctacgactagatcgagaatcgaaaagcaatcatcgagatcggagaagaagaggaatcgcgtagggaggtgatgttgtttggttggggattgggtggaattagggttttattggattcgattgatctgaatacaacagcggggctgcacgaacaaggatgcagcttcacatatcgcctagcatgagaagcattacgatatcgagcagcaatgagtttattgatttgatg

SEQ ID NO: 10316 - DNA, 1709 bp, Unknown
  misc_feature (1)..( 1709): cDNA_ID_2715453_gDNA_ID_2213642_Annot_ID_132312 3000 nt of promoter + ATG
cttctcaaaagctttaactagatgcatcactttaccaaattcaggtatactcattctcgcttcttccaatactttttctcttctcctcttcatcaaagaaaccctagtttcatcagaatctccaaattcgacttgttcatttccatcctccaaattctggctggattctccaatttctgatacggattctcttcgattgttgaagaactcttcctgtgacgcccgtagagtttcgtatgctatacagacacatttcttcatattggaaatggtcttagctccacatttgcaatccacagacgcggaatcattcttctccttccttgaattcttcttcaccaccacgaacctcctctctctgatccgattccgtggtgagaaaaccgccggaacaggattaggcttccatttcggattcttctgcgcagaagatttactcgatttctcgagtggagtcgagtgtgagacgaagttagggttagaattctcggagaatcgtgaaacctcttgagccttggattgaaaactgatcggatccatcaccagagtctcgtgtttagcattcttcaaattcgtcgactccatcgaaagatgagagcagaaaaatgtgagaaattagggttttgtcttttcgagtgagtgaagggaagaagaagaagagagagggagaggagggaattgtctgaccgttgcgacttgtgaggaagctctcgactttgtatgtaacggctcgctcagtcatttactggattttcgtaattactacgattaattgcttaatttcaaaaaaaattagtttaatgctggaatctaatatgtttgtttgggctggcccaaacccaattgttaaactgatctgaaatgattgttatacaaaaaaaccggttcgtgaaccgcattgtctcatcgatgttcaatactgtttccaacaaaaagattgttgtcctcgagttcgccttcaagaaagacacgagagagactccagccattgacgtctgcaaaggtttgttaggagacaaggcccgaatcagcatctatgatccacaagtcacggaagaacaaatccaaagagacttaaccatgaacacattcgactgggaccatccacttcacctccaacccatgagtccaaccactgtgaaacaagtctcagttgcttgggacgcttacgctgccaccaaagacgcccacggaatctgcttgttaaccgagtgggacgagtataagacgcttgactatgagcggatttttgaaaacatgcagaaaccagcgtttgtcttcgatggcagaaatgtttttgatgcagagaagctgaggaagatagggtttattgtttactctattggtaagccgttggaccagtggcacatgcctgctcttgcttagctcagactctttgccctttctcaagatttggattgtttttctctctgttgcttatatcaaataatttgttctgtttcttcttgacgagatattttcctatacttattatgttggttagaacaagagactaggtttggttattattgctaactacattttcatatataaagcttttagtgattctgattactgattatcgtggaaaataaaagagatgattaatttccaatatttgttataattctcaccgttcacgtgtcccctcgacatcgcatatataacaaaactgcccttgattccggcaaagagaaagagagaatatg

SEQ ID NO: 10317 - DNA, 3000 bp, Unknown
  misc_feature (1)..( 3000): cDNA_ID_3035904_gDNA_ID_2213642_Annot_ID_181318 3000 nt of promoter + ATG
ttctcctctgcacaatactaaacctacaaaacaggcttcttcttgtagattcttcagaatgcgtcacttggagatgattaaacagacatttctcgtaaagaaaccctttcccgcattctttgcatcgaatcaggatctttttatttctcctcctcctcgtacagaatcgatgatcgagtaaagatttctgggttttcttcgggttttccctcaatccgtagttgcaagagagctcttcgtaatgattcatagattctctgaagccagtcttcttcatgagatttctcgaaactcgagaggttctgagcttcttaggacggaattcgaagatgggtttctcaaattcttgttgttcttccattaaaacgaagcttgttggaagacgagatgattggcgaagagtatgagggtagaaatagttgaaagaatcgatcttccgttacttttctcgagaaaacgcaaaagaaatcgccggagactgagcaataactgttgagcaagagtgatacgtaatgctctgaatcaatcggattaagaagaaaacaaaggaaatttttggtttttcgtagttctctgggaaaatgagaagagaggtagagagtgagagcgagcaagagagaaagtggaaacagagagatcaataagcactgagagaagtgagagcagctacggaagaagaaaggggcactttcgtaaattgctttgcctataagaagtggaggagaacttttgtttcagttagaaggttcgacgtgacaaatggtgactgctgtggcaaggctttgggcttttcatttgttaaggcccttatttggtgacttgatcttattttgtgaatgttcaggctgaagcttgtgtcattataatctcacagctatgtctaacatcaaatgatcaaaattatcaatatcacagcaacaaattattccataagacattgaagaggaatcatcacaatgcagaaaaaacttgggatctgggtcacatgctcagctatttttattcaaagcacttaaataaacatttgaaaagaagagaaaaactaaaacaaccaaacacacctctctttgtaagtttgtgtaattcatcatcagcagcagcacaatgcggtataagtggaatcatcaggccttgacggtttcttctgcagcagcagcattagtctttgcttgcttctccttgtagtctctgaccgcggacttgatagcgtcctctgcaagcatactgcaatgtagctttaccggtggcaacctaagatgcttagcgatttccctgcaaatttaagaatcccaaaacaatgactcattcatcaaaatgttaaccatatcactagatttgggatattccaagcactagaacagagttagagataacaatcctgacgatatatctaagagacatgattttgatggttaaaaggcacttacgcgttcttgatggtcataacttcgtctaaggttttgcccttgatccattcagaagctgaaccaaacaaatatacaaattataacctgtctacatctacctgactctgatcatgagcctcttaacgaatcgatcaaaattgaaaaccctgattcgaaggcataccaacggaagatgaggcgatagcggagccacagccaaaggtcttgaatcgagtatcaatgatctgacctgaatcatcgaccttaatctggaggctcatgaggtctccgcaggcaggagctcctaccaatcccgtgccaacgttagggtcattcctgttgaaggagccaacgtttctagggttttcaaagtggtcgattacattctcgtggtataatcgacgacctaaccctagaggagacgcctgtaaccctaggtaagcctttctcgacgtttgccttagcatcatcatattctctctttctctttgccggaatcaagggcagttttgttatatatgcgatgtcgaggggacacgtgaacggtgagaattataacaaatattggaaattaatcatctcttttattttccacgataatcagtaatcagaatcactaaaagctttatatatgaaaatgtagttagcaataataaccaaacctagtctcttgttctaaccaacataataagtataggaaaatatctcgtcaagaagaaacagaacaaattatttgatataagcaacagagagaaaaacaatccaaatcttgagaaagggcaaagagtctgagctaagcaagagcaggcatgtgccactggtccaacggcttaccaatagagtaaacaataaaccctatcttcctcagcttctctgcatcaaaaacatttctgccatcgaagacaaacgctggtttctgcatgttttcaaaaatccgctcatagtcaagcgtcttatactcgtcccactcggttaacaagcagattccgtgggcgtctttggtggcagcgtaagcgtcccaagcaactgagacttgtttcacagtggttggactcatgggttggaggtgaagtggatggtcccagtcgaatgtgttcatggttaagtctctttggatttgttcttccgtgacttgtggatcatagatgctgattcgggccttgtctcctaacaaacctttgcagacgtcaatggctggagtctctctcgtgtctttcttgaaggcgaactcgaggacaacaatctttttgttggaaacagtattgaacatcgatgagacaatgcggttcacgaaccggtttttttgtataacaatcatttcagatcagtttaacaattgggtttgggccagcccaaacaaacatattagattccagcattaaactaattttttttgaaattaagcaattaatcgtagtaattacgaaaatccagtaaatgactgagcgagccgttacatacaaagtcgagagcttcctcacaagtcgcaacggtcagacaattccctcctctccctctctcttcttcttcttcccttcactcactcgaaaagacaaaaccctaatttctcacatttttctgctctcatctttcg

SEQ ID NO: 10318 - DNA, 1712 bp, Unknown
  misc_feature (1)..( 1712): cDNA_ID_2715453_gDNA_ID_2213642_Annot_ID_181316 3000 nt of promoter + ATG
cttctcaaaagctttaactagatgcatcactttaccaaattcaggtatactcattctcgcttcttccaatactttttctcttctcctcttcatcaaagaaaccctagtttcatcagaatctccaaattcgacttgttcatttccatcctccaaattctggctggattctccaatttctgatacggattctcttcgattgttgaagaactcttcctgtgacgcccgtagagtttcgtatgctatacagacacatttcttcatattggaaatggtcttagctccacatttgcaatccacagacgcggaatcattcttctccttccttgaattcttcttcaccaccacgaacctcctctctctgatccgattccgtggtgagaaaaccgccggaacaggattaggcttccatttcggattcttctgcgcagaagatttactcgatttctcgagtggagtcgagtgtgagacgaagttagggttagaattctcggagaatcgtgaaacctcttgagccttggattgaaaactgatcggatccatcaccagagtctcgtgtttagcattcttcaaattcgtcgactccatcgaaagatgagagcagaaaaatgtgagaaattagggttttgtcttttcgagtgagtgaagggaagaagaagaagagagagggagaggagggaattgtctgaccgttgcgacttgtgaggaagctctcgactttgtatgtaacggctcgctcagtcatttactggattttcgtaattactacgattaattgcttaatttcaaaaaaaattagtttaatgctggaatctaatatgtttgtttgggctggcccaaacccaattgttaaactgatctgaaatgattgttatacaaaaaaaccggttcgtgaaccgcattgtctcatcgatgttcaatactgtttccaacaaaaagattgttgtcctcgagttcgccttcaagaaagacacgagagagactccagccattgacgtctgcaaaggtttgttaggagacaaggcccgaatcagcatctatgatccacaagtcacggaagaacaaatccaaagagacttaaccatgaacacattcgactgggaccatccacttcacctccaacccatgagtccaaccactgtgaaacaagtctcagttgcttgggacgcttacgctgccaccaaagacgcccacggaatctgcttgttaaccgagtgggacgagtataagacgcttgactatgagcggatttttgaaaacatgcagaaaccagcgtttgtcttcgatggcagaaatgtttttgatgcagagaagctgaggaagatagggtttattgtttactctattggtaagccgttggaccagtggcacatgcctgctcttgcttagctcagactctttgccctttctcaagatttggattgtttttctctctgttgcttatatcaaataatttgttctgtttcttcttgacgagatattttcctatacttattatgttggttagaacaagagactaggtttggttattattgctaactacattttcatatataaagcttttagtgattctgattactgattatcgtggaaaataaaagagatgattaatttccaatatttgttataattctcaccgttcacgtgtcccctcgacatcgcatatataacaaaactgcccttgattccggcaaagagaaagagagaatatgatg

SEQ ID NO: 10319 - DNA, 3000 bp, Unknown
  misc_feature (1)..( 3000): cDNA_ID_3035915_gDNA_ID_2213642_Annot_ID_181314 3000 nt of promoter + ATG
ctttctctcttgctcgctctcactctctacctctcttctcattttcccagagaactacgaaaaaccaaaaatttcctttgttttcttcttaatccgattgattcagagcattacgtatcactcttgctcaacagttattgctcagtctccggcgatttcttttgcgttttctcgagaaaagtaacggaagatcgattctttcaactatttctaccctcatactcttcgccaatcatctcgtcttccaacaagcttcgttttaatggaagaacaacaagaatttgagaaacccatcttcgaattccgtcctaagaagctcagaacctctcgagtttcgagaaatctcatgaagaagactggcttcagagaatctatgaatcattacgaagagctctcttgcaactacggattgagggaaaacccgaagaaaacccagaaatctttactcgatcatcgattctgtacgaggaggaggagaaataaaaagatcctgattcgatgcaaagaatgcgggaaagggtttctttacgagaaatgtctgtttaatcatctccaagtgacgcattctgaagaatctacaagaagaagcctgttttgtaggtttagtattgtgcagaggagaaaaagatcgaagagagtttccaggtacaagaagattcttcctcgattctctgtttcttcttcttcgtgtactatgtttcctgtttctgtggatgatggaggattattagaagtcgctgagtctctgattctcttgtccatgagtggtggaaagttcgtgaatggtttggaacattttggtaaagctctgggttcgactcagagaaaatttgaagacgggttattgagaaatgagcagagacttgttggtgaagctctggattcgaatccagaggtgaatttgagaaaagatggagactttgaatatgggcttttgagtaatgagcagaagaaacttgtggggataagcagagcatctgttggaacatcgaaagagctttcgggttacttggcaaacaagaagggcagagaagatgatgaattgggtcagcagaaacaggctggagcaagaatacttagagaagaaactgataacgaacagaaacttgttcgtcaagaaactgcatttgaagattcagtatcaggatttgagatgaatatagagcatcggtgtgggctctgtcacaaggttttctcgacttatcaaactcttggtggtcatcagacgttccatagaatgagaaacaaatccaaaagtcaaaccaagagatgcagagaagaatcgatagaagctgaagctgggattaataatggttcagtgacgttgacaataagtgcagagtttgctgaaggctgtttaggtcagtacatgctttaagaggttacaagaagtgtcaccacacgagagcaaatgatggagagacctttagattccatgtggatgtttctatggttactagtggaatatttgagcaggagtactgaagaagaagatcccctctaatgaataatgaagttttggaatttttgttgttgttgttgtctaatggagttgtgacttgttgtattttcatacgtagagaggtttcgtctttggttttctcaaatggtttggtattcaaagttgtacagcaacttgtagctgtgttatggttttagcattaatcgttctttcaaatctttttcccttaagtttgtgcattttgaatgtgttactaatattttgaattacaacaaaatcttgaggagccgaatacaatcataaacaaatcagatgataaaaactcgtaaatcgtttctaaattgtattcaactatacaatatattggtaatgatattgcaactttaagttgagagatcatactggaaaaagtacagtatctttttttttttttttttttttgaccgtatcatatcgtgtcggttggtcttcgcattaaaattaaaacttttcaaaattagtatgacgaatattcattataaatgaaactaaatacacattcctttcttgcgtatattaaatgactacgacagaaagataatcgtacgatagttttcagaaatatttgtgaggtgttgaaataatattagagtttcctaattgtatacttttcttcttctttttgcagccacttatttctatttatgtaaagaaaacagctgttaagaaaatattttacgtcgataagaaacaaaacaaaaacacttatttcaagtttaattataggaatatcagatccatcagaattctgaaaaatttgcacgttattagtctatctatattttctcaaactttctatcaaaattagataattgtttttggaaagaaaaagagcaaaactattcgattgggcatgaaagtcggaaagaatctataattagcaatatacaaaaaccctaaactcaaggtcaagacaccaatctcaaacacggttttatcattagaattaaaattttgattcccatttataattgagatcttttattaattacgttttttttttcttttcttttttcggctgtgcgtgcattagttgtttagatccaccggcgaaatcacttaaggaaaaaaaaggcttgatttttcttcttctcctctcatcttttttgtcttcttcttcttctttgacaagctcattgctttgtctttgatcctgcttgtatcacgaattcggaggacaacccatttcgattctcgtatcgaatttcttgaatcaaagagacggcgggaatctcaaattcagaattttgctgggttgtcgtaaatccaaatgcggtctgagagaagactacaaattataagaagagcgaatcggagtctaacatcatcggatttgggagctacgactagatcgagaatcgaaaagcaatcatcgagatcggagaagaagaggaatcgcgtagggaggtgatgttgtttggttggggattgggtggaattagggttttattggattcgattgatctgaatacaacagcggggctgcacgaacaaggatg

SEQ ID NO: 10320 - DNA, 3000 bp, Unknown; identical to SEQ ID NO: 10312
  misc_feature (1)..( 3000): cDNA_ID_2715477_gDNA_ID_2213642_Annot_ID_181309 3000 nt of promoter + ATG

SEQ ID NO: 10321 - DNA, 3000 bp, Unknown
  misc_feature (1)..( 3000): cDNA_ID_2994643_gDNA_ID_2213642_Annot_ID_181308 3000 nt of promoter + ATG
gctacctcgtctgcatctgcggtttcttccgccgcatctgcagccgcagcctcgtccgccgccgccgcccctgtggctgccgcgcctcccgtcgtgctgaaaagcgtcgatgaggaggttgtggtggccgaggaggggatcagggagaagataggtagtgtacagctgacggattccaaacattctttcttgagctccgatgggagcctcactgttcatgccggtacctcctagatccaccagattcagtcatttcatatctgattttgttgttggagattgataaattaggttttacacaggtgaaagattaggccgtggtatagtgacggatgctatcactactcctgtagtcaacacatctgcctacttcttcaagaaaactgctgagcttattgacttcaaggtccgttgattgattcagtctctttcttttatggattagaataacacctattaggttgaaagaatctcttactagttttattgactttgtttatcttcaaaaaattgaattattgtaggagaaaaggagtgtgagtttcgagtatggtcgttatggtaaccctacgactgtggtacttgaagataagataaggttattattattttatctttaataatgtgttttataattgcacttgcctttcctgaagattatgttgttgatgcttttggatttgtttgattaatatattgctgtagtgcacttgaaggggctgaatcaactttggttatggcatctgggatgtgtgcaagcactgttatgcttttggcattggttcctgctggtggacacattgtcactactactgattgctacaggaagactaggatcttcatggagaattttcttcccaagttggggatcactgtaagaagatttccattgcatctaaattttttaattactgtcttcctttttccaattccagtttttcaacttgattgtttaacatcatgtttatgtccaggtcactgtgattgatcctgctgatatcgcagggcttgaagctgcagtgaatgagttcaaggtcagttctgtaacattattgtcctttttacagttggaaagagagtatgtgtctcaaatttattccgacttgtctggcaggtatctctgttcttcactgagtccccgacaaacccattccttagatgtgtcgacattgagctagtttcaaaaatatgccacaagaggggaactctggtttgcattgatggcacctttgcaacacctctgaatcagaaagcccttgctcttggtgctgatcttgtcgtgcactctgctacaaagtacattggaggacacaatgatgtgagtaaaacatgttccatatattgtaaaacatctcaaaagagcactcactggttgtttagttattaacaaagattgtttctcggtggtttaggttcttgctggatgcatctgtggttcactgaagttggtttcagaaattcgcaatctgcatcatgtgttgggaggaacacttaacccagtaaattacttgactgtctcatttatccctcttattatgctgttaattcatgaattctcataaaaggtttgttaacagaacgctgcgtacctaatcatccgaggcatgaagacattgcatcttcgtgtacagcaacagaattcgaccgcttttagaatggccgaaattttagaggcacatcctaaggtatgcaatatctcttttttgagtaaatatcctgacactatccaggtgagtcatgtgagtaaatatcgatgcaattttgatttgcaggtgagtcatgtgtactatccaggccttccaagtcatcccgaacatgaactcgccaagcgacaaatgactggttttggaggtgtggtcagtttcgaggtaatatgatctatcaccaacctaatctctatctactccagattagcatttaagtatgatcctgaacaccttgattatctttcttgggtagattgatggagacattgaaacgacaatcaagtttgtggattctctaaagattccttacattgcaccatccttcggtggctgcgaaagcattgttgaccaacctgctatcatgtcctactggtatgtctttggcaaaatcgaacaaagttatctttgattccatatgcttccgtctttgacaaaatcgaacaaatttccgatttctaatgggtggttttgatttcagggatctgccgcaagaggagagactaaagtatggaatcaaagataacttggttcgtttcagctttggagttgaagactttgaagatgtcaaagctgacattcttcaagctctcgaagccatctgaaaatgacacatcacacaaaaacgctgtcgtttctttgtcctttatttatctctctttgctgttttcagtcaccgtaataatgatgtctttgaactattgttccgcgacatttacgttccgaaataatcgtgtactattatgatgtttgttgtgctatataataaattctgtttagttcgttttgcgtcttaaagaggttaaattagataactggtcccatgtgaacgaccattgtggccattgctttgtggtaagaactccttgtgcttggaacctcaaggtcacggcttcgaacaatggtcatgaccctctagcttctgcttcttcttctctttgtttcaacaacatataaggcattcataaatgcctcgtctttttttgttttctttcctttcaatacgtagttcgatttcgatttcgatttgtagatctcagcaaaatccatgtcttgagagaatgattaatgggcctttttaataagtccactgataaagacgagagcccaaaacgtaattgtattattatcttctttatttgcttttaaattttaaattgacattaagacaagactaacttttgcttgtcaaatccatgtgttgtccagcgggtaatcaacccaaagttccggatccggacccaacagtaagcaacattttacgattcgttgtttttgaatcccaatgaaaaaaaag

SEQ ID NO: 10322 - DNA, 3000 bp, Unknown; identical to SEQ ID NO: 10310
  misc_feature (1)..( 3000): cDNA_ID_2715488_gDNA_ID_2213642_Annot_ID_181307 3000 nt of promoter + ATG

SEQ ID NO: 10323 - DNA, 3000 bp, Unknown; identical to SEQ ID NO: 10309
  misc_feature (1)..( 3000): cDNA_ID_2715504_gDNA_ID_2213642_Annot_ID_181302 3000 nt of promoter + ATG

SEQ ID NO: 10324 - DNA, 3000 bp, Unknown; identical to SEQ ID NO: 10307
  misc_feature (1)..( 3000): cDNA_ID_2715512_gDNA_ID_2213642_Annot_ID_181299 3000 nt of promoter + ATG

SEQ ID NO: 10325 - DNA, 3000 bp, Unknown; identical to SEQ ID NO: 10306
  misc_feature (1)..( 3000): cDNA_ID_2715520_gDNA_ID_2213642_Annot_ID_181296 3000 nt of promoter + ATG

SEQ ID NO: 10326 - DNA, 3000 bp, Unknown; identical to SEQ ID NO: 10305
  misc_feature (1)..( 3000): cDNA_ID_2715524_gDNA_ID_2213642_Annot_ID_181295 3000 nt of promoter + ATG

SEQ ID NO: 10327 - DNA, 3000 bp, Unknown; identical to SEQ ID NO: 10304
  misc_feature (1)..( 3000): cDNA_ID_1015752_gDNA_ID_2213642_Annot_ID_181294 3000 nt of promoter + ATG

SEQ ID NO: 10328 - DNA, 3000 bp, Unknown; identical to SEQ ID NO: 9287
  misc_feature (1)..( 3000): cDNA_ID_3035956_gDNA_ID_2213642_Annot_ID_181288 3000 nt of promoter + ATG

SEQ ID NO: 10329 - DNA, 3000 bp, Unknown; identical to SEQ ID NO: 9286
  misc_feature (1)..( 3000): cDNA_ID_3035959_gDNA_ID_2213642_Annot_ID_181287 3000 nt of promoter + ATG

SEQ ID NO: 10330 - DNA, 3000 bp, Unknown; identical to SEQ ID NO: 9285
  misc_feature (1)..( 3000): cDNA_ID_1715608_gDNA_ID_2213642_Annot_ID_181286 3000 nt of promoter + ATG

SEQ ID NO: 10331 - DNA, 3000 bp, Unknown
  misc_feature (1)..( 3000): cDNA_ID_2715543_gDNA_ID_2213643_Annot_ID_132317 3000 nt of promoter + ATG
attaaactgacaatttcaataaaccaaaattgaaattctcggttcggttcgaatgaaaccttttgtaggtcgtggtcgtatatagttggacacttgacaaatctgagcatttcctttttgcttacagcggaaatatctgaaccaacgcgatgccgtcgacgcagtccttgaccgtcgcagcgaagacgctacgaaatcggatcttctctaggtctggatctacatccgccggtccgagtcggtgggcgacgccaggtcacgaggagcgacctaagggttactttatgaaccgtactcctccggcaccaggacagtcgcgaaaatgggaagattgggagcttccttgttacatcaccagcttccttacaattgttatcctcggcgttggactcaatgccaaacctgatctttcaatcgagacttgggctcatcagaaagctttagagcgtcttgagatggagaagctcgcgaccgctggagattcatctgattaagcatcaccgttggatctccggttgcttgatttggtatgtccttattctccgggagttgaggagtttttttaccgtttaatgatgatgataacgaagactggagagttagggtttcgtttggcccttgaactttgtttcaattctcctttgttttgtcgataatgatgatgttcatgaaataagtgttcttttaactgtttagacgcaattgccttcactctctacttcttattacaattctcaaatttggtcacttttgatttactcatttctcaaatgattcaatttcgactattgattgctgcattactaattggagaaagagattaaacgagagttgtatgctgatgttgtgtgcttctcttccttagttcatggcttgtttatgttctctgtgaatctcaggtttgcttgtttcactcagtgcagtgcatattgattagattaatagctactttatgttagtcgattcttatctctttagatcatcttttttatacttgtcatttgttgtagtagtagtgataagctgatagtgtagctctaactagggcatggattgttcctttgtgttgtagacatgttcgtgattataggttattgcagcgtgcacaataagttttgtaggctttcaagtggttggaatggcatcagccattgttagatgcaacactctagatttcagttttgtcatttgctgtattttattaggctagcgtttggagttttcatggtgtcagctattggtagatttgacacactagatttcagtttctttgacggtggtgtttattaggtttctacttagctgagaatagcagatgagaatgttgatttcgatcttatacttggacaagtctggagttgaaagtaacttcactagatttgggtagataatgttttagaaatcatgactgcttacctctatctctatagattttggtcgattaatactatactgcctttgagtactactattgctcatagtttcccaaatcctttgtttagtttcctaaagtgtggcttcatattcttctcttttaagtacaagtactttatgctggtgttggctttttagcaagcttgtgatcttcatctcatcctctggtttcatacatgatgattaaacaaaagaagagactagcgattaaacaatagaagagactagagtagtagcttaatttgttgtttgccttagttgagcaatctcgtgtcatcaaattgcatcacatagagagggatcttgtggtaattacttctctctgtgtagttgtgtttcccgagagtacaattctgtaacactgtctggaaccattaggctaggtctaagaagagacattatcacgacactcttcacatgctttttttttttatctctggagacccaagaagagtctagtgtaaagccatgtgaagaccatttgtcatctatccatttcctctgtacatcaatcagatgttttcagtttaagaaggaaaaaaaaaaaaactcggtagtcgtatgtaaatgtaagtcggtgtcggtcggtggagttgaagccaaataatcaataatgtttaggacgaaagtgaaaaggtcaataacggtcaattaaaagtaaagtttatttttctggtaatgtgaccggttattcccggtaaacacacgagccaccgacacatacttccatgggtcacgaccacgattgcagtccgtacacgatccatgtttttatttatttaaacgcaccataacttcccgcattcggatctcccatagcaaagacagagagagaagtaaagtagctttattatggattacagataaaagacaggtaatctcaatgacgcaaagataaagacaggcaatttcacttcagtgatgcaaatctgacagtagacttcactcttgtgtatattaaagtaaccgtcttgaagaggaaggaagataaccaagtgaatttcgtgatggtttcattgtaaaacaccactttttcaaattctctccttctcttggtgctctgtttctgttggagatttcagtcattggtaatctcttcttctcttctctagtcctcatggttgtttcatgctctgtttcttttctttgaaactgatagatagatcgttggatactttagaaaatgcattttattggttttatcaaatcaagttaatttactcgttcttgtaaaatccctatgtgaatgcacccatttttctattttagcaactatggacaagtagctggggcctcaactgctactgtaggatcagacaaaaacatagcaagtgccaattatgtcattttcctcctccattatttgctgtcgttttcaggaacaggaatatatcttagctgtgttttatcctttcgctcatcttgcaaaatggaaatctaaaaatctttacttcttgaagattgattatcacagaattttggtttctttcttgtctttgtagggttacacaaatcttcttggattgttttctcacgttgctttggctgtattgagagagtttcacg

SEQ ID NO: 10332 - DNA, 3000 bp, Unknown
  misc_feature (1)..( 3000): cDNA_ID_2704665_gDNA_ID_2213643_Annot_ID_132322 3000 nt of promoter + ATG
aataaattgtattatcatattttaaaattttgatagcagtatcatatgtaactctaacattctatgtttagagatgaatttatctatatatatctacttggataaaccaatttgcaccatactatttgcagcatatgagactaactaactcttgatacactgaaatgatggtagacaattcagtctatatatgcgagttaactcctaataccgtgaaatcataataggcaaattcagtccacaaattttttacgtaggattttgatattttccactctttatatatacagtctataatcttcaaacctatcacctataaataatctacaatctaccatttagtcaacaatggtgaaatttctaaaccctcgtgaaagtctacctatctcccaaagtttctaattctatctacttcacatttttctccacccaccaactaaagtataagccttggaaaaacaatcaaaataagaaattctataagtcctttattccttatataataaatcataagttagtaaactcttttgttcacttttcttttgcatccaccgaagaaaaaccagcttcacaatgagctccaacgacagagatcatcgcaggttcaactctgaccaccactcattctggcctaatccgtctacttacgatcttaacagcaagatcatgcttgccgcagtggcttctttatctggagttatcctcatcgtcttcgctcttcatctttacgcaagattcgttctccgacgccgtagagaagctttccgtggcctccccgtcattttccgccacccttttgagatgcctaagcgtggcctcaatcccacagtcatcgcttctctccctactttcactgttggagccactgatggcgtggctgcctccgctactgaatgcgcagtgtgtctaagcgtgttaaaggagcaagacaaggcgagagagttgcccaactgcaagcacatcttccacgtcgactgtgttgacacgtggctcaccacttgctccacttgtcctgtttgtcggactgaagttgagccaagaccgagacttgagcctgagccaagggaaggaccagtcggtactgcaccgcagttgttggtggaaaccaggctgaacttgactgtagaagccgcatcctcttcttcctcagataacaaaacagttgtatccccggcttcgcgattaaattcgtttaggaaaatcttgacgagggaaagatcttcgaacaggatcaaccattcttgtcctgaccaagatcgtgtggcagatcttgagagacattgagtcgacatatagatacatattatgcatataaatcatatacacatatcgataatctttaatttatacaatatcctcctttcttttttactatatcatgctctgtttttggttttagatagttttgtgtaacggaacactaaatatatgttagtcaaaagatacatctggtgcagttcatgccattcaagttaactattcacagtggtagacagtacatatcagggctccataaaagatgcagaaccattttagttacataaaactgagggagaagagagatcataaaagggttaccttcaatcaccaatcggaagctaaacctgttggataatcagtgtcattgtcacaatgtggcctaaaatgacgaagggtgacaaccagctgctaaacatccgccttgctcggctcaatctgagaattctggtgcagttgctccctgcattgaagtggcatctgcgatacttccattgctcactcccttactgcacaccagatttcaacagcatgagtgtaactattactatactcaatgaaacgaagcctcatggagaatgagaacattttcaaaaaaattgctttaatagtttttgaaacttcttctatgttctgcagtaactgcatcatattgataatatgaacaatataatcaccaagatcaaaatcaattgtcgaggagaagtgaagtaacttcatccttctaagccagaagctaatgaaaaaaacaaaaaaaagatttcatttcactcaaaagttcaaaacccatcaaactagaaatcattttctaaaagaacctatgatggatcaaaattgctccaaacagactataaatgagacacacacacaaacgctaattggcaatacaaatgtggattacttaattaccttgaaggaaacttgcatgttccttgacctgaaaacgaaaaattgcagaaaaagcatcaaactttcaacattttcaattagcaaaagtcataactatctgctagacattgatcctgaaagaaaatgtgaacttactaggattgagagaagtaacagctgcgttgttactaaagttgcaagcttcatctgcgagaccattccatcagataatagttattgaatacatacgaagccatcttcactatatccaatggatcgtagcaggatccaccttgctgaatctagacgcaatcagctcctctgggaccacaagcccagtcaatggccgtttaaagtgttgaatcctcaacgttgttcttcgccacgcaccaaagctccgtctctaatacctccccaccaaactccgcagtagcagcaaccgtaatgaggagaaatagagagattcattaggaagcagtgaggctgagagagagaatacacgatcattttccgagagattgatcgattttgtactcggagatttcgaagaggaggaagagtgtgaatttgaaagagtcgaatagatgttggagtttgttgtgattaatgtaaagatttgggtgaataatgtaaaatattttaattcttaccggttattgaactcggttatactgatttgggccgtattaaactccggcccatatacatatgggcctctaatgaagtgtttttagctgctctgtttttgatgacggagcatattaattatggttaattagtaaacaaaaagactctttagctccttaaccttttcaatttctgaaagaggaggagatcggaaaacaaaacccagtc

SEQ ID NO: 10333 - DNA, 3000 bp, Unknown
  misc_feature (1)..( 3000): cDNA_ID_3036011_gDNA_ID_2213643_Annot_ID_132325 3000 nt of promoter + ATG
tcatcaacccatctctataataatgcaatctttatcactttttgtctttcttaatactcacatacacatgcaacccactttctctaatcctaatttctagcttctatactgcacgtaattctactacacagtttcatattgtataacaacattagggatgattgaaattgacaaatttataaccaataataacacaattaataaagttaaaaaattataacatcgttgttttcttttaaaaatcttctcttgattgaaaaaactaggaaaataacacatatactgttgaacactcttgataaaaaaatcatatggagattttttcaactttaatttcattttgacttccaataaatttaagcctaatactatttaataccattagcctgaatgcaatcacaatctctagctcacgtactgctcagctaaacatgattatactagatataattttgaagtacaaatactagctaatcaaaagaatttagaggtagcctagtcgaagctccaaatcaagaacttggttgggattcctcaaactcatcccaagctccaaccccatgacttgatcatctttcttattcatcagatccccacggcttatctcacatcttactgaatgacatgcatcgatggcacttttcttgatctctctgctacatacattgctcttgttcttctctctgtccatcatcaaacctccatagctagtagtactgtccaaaagatcaaaccgggcagaaggaaaaggagtggttttggatctctggttggttagggaaggctcaagatgagctgttgttgttgaagaggaagaagaagagctaaaattagggttagggtttgcaataggtgtgtggtggtgaggttcgaagagccaagaagggatctgcctgagttttgctctgtctcttctatgaacattcatgtggcctccaagtgcttgagcagatctgaactctctcctgcagaagctgcaagtgtaattcttgggaggccatgggatcagcccagcttcgtaattcttgtagtgattcatgatgactctgttgtcaccattaccgtcttctccttcttcttcttgggttttgtctctgttactaaaacttgccaaatgtgttctcttcatattttccaacagatgatgatcaatgctggtggtgaatgatgaagatagtatgatactcccctgcatgaaataaactaagatgttatgtatgtatatattaattcaaaagtgagaaagaataagagtgggggatgatgaaaaccgtatagatagagatttttgagtttgatgaggaactaaggaagaatgtaactacggaggagttactatgtgttatatagagtcaaaagggaaacaaaaacagaaggtggtttttatccttacttgaggaaggaggtgcatgtacggatgatcatttattagggtttaagtctgttacatgtttggtcagatatattggagaataatgagtataggctaggctatgttcgattagatatcatgagtggaaattatttaaaaaaataaaataaaaagagagaaagaaagagacaaagaggtagtttcatgattaagagggagagaaagaggaattgaatagaggctacttaactcatgatgctcatatgcctgcaatgtgtctgcttgttactataattggaagttacttgagaccaatgttattgtggtatgggaactctgtgttgcattaatattttgtgtcaaaatcttgcagggagataacttgccatttcattttcatcatattccatctctggctccacaaatctcttcattatatatatttgaacatctattatatacacacaagatagcctaaaaatatgaacatgtgtttagttttttgatatggagagattgtagtgaatagtgatggagggccaaaagaaaccaaaactattactaattgattttgacattgattagaagaaactgtaaaggaaagaaacaaggcttgtgtatgcattaaggacatagacaatgacgtccctgatgtcttcagagttattgcagcttatatccataactaagaaaacttacatattactttaaaactaagtaataaaccagtaacgctaacaatcgtatgccacatctagacaagtgtaaacaaaattggtggatatagaattataaccctatcagcatatcaactttatgggttgaggaactcaatttcggttgtcaaatatatattgtgtgacaaattttaacttatcaaattttattctcattccttaatcaagcattaaagttttctcaattgaccaatctctaagaattgaaaaaataatcttcatctagttaatgcatatctattgaatttggaaaatttaaaagtttttttttattaattttgtttttgggaaaatcataaaagacaccctcccctcaatagaagatgaaacgcggcgtttcataaataaaaacgagaaaatcaaaatcgtcgctctctgtttgctggcgtaacttagccttgttcttcttcttcatcgcgatatctccggtgtcttcttcgtctccatcagaagaagaagctctctgtatccatccatatcgaaaaagtatgaactttatccgaatttcttctcaattttatggatttattagtcagactcatgttagggttttgttcgatttcatgaatttagggttgaaattttgcttgtttgtatagactctaatggaactgatggtttgttttaggattgggttgatctaaaaaaatgcttttttgctttgttgttgtcgtgaattctgctcaataccttccattaagtaatcagttttggtttgtgatgaatagccagagatcggaggaaggagagagagataccaatctctgttgctttggttttaaggtaatgtgtttgtttccttcctcatgagaatcggaatattaaggtattttgtggttaagattttagttgatttttgagaatggttttggtcagggtttagaggagatg

SEQ ID NO: 10334 - DNA, 3000 bp, Unknown
  misc_feature (1)..( 3000): cDNA_ID_2704652_gDNA_ID_2213643_Annot_ID_132327 3000 nt of promoter + ATG
tgatagagtttgtcatccttcgaccaaagaatacaaaagaaaattgagatgtatcaattagtgtgcgaggaacctataaatttaatctttggaaacgcctggacatcgaagcaccagtggtctagtggtagaatagtaccctgccacggtacagacccgggttcaattcccggctggtgcaatttttttaacaaaccaacgcccaacatcgtaatgaacctatgtgggctttaacggcccattttgcttttcagtccgtaaacactaggccttttttatgtgttatgttgtccttcctcccaaccacatgattacactccttgagttcaaaaatttctcttatgtttcttttaccgattgtttcatttagttattcttaccaacatctactggttaaaatttgcatatagccatgggaattcaaatatctggaactgaaattcgaaagcgacgatgcaatgcaaataaaatataggatttatttgtgaactaaaaaagtattttaatgatatttggaaaaatcgagaaagtccgaatgggaattgtaagttttaaacacaaagagacatttttgctttagtcaggcgtgatggagaaaactcccaagggatttagttttccctcgagttaagttattatgtcattaaacattcttctgtaatttatgatctaaaccggaaaagaaaaacgggttagcgcaaactgcaattatctcaactaattcttaaataacagtaattatgatcccattgctcaagtgttttagtagtcttttaacgtttagttatgttacttcactgttccagtaatacgtcctaaattatctcgtacttcaatttagattaccatgaactacaatgttaaattgggattatgggaacataattactaagatgttttgagacaattaaaacttttaaaatattgacaaataattagtatattctttcagccgatattgatttgaatttatctttttttttttctggaacatccaataaaattaaaacgattagaaaatggcttagcatggttcatgcacataaatgaaatacataaaaatgattttatttcactaaatataattcagctaactcatttgcaagtttgataacatgactgtagttgagaaaaaaaatgaaactatagttaatttggtcttgtttctcaaattttcggttgcttatttgatttttttttatttacatgataacaaacttaccaactataaccatatccgagtaacttttaaagtacacgagcactaagtgaagaaagtcacatgcgtacactaatcctaattgaatcacacgatttctctcgtgtgcaaaatccgtaagtacataatattaatacttttttttgtaacatattaaattctaataatctcctcaggtgatttgaatcctagtctgtaccagctacatactcactccatgtaaccaaatattcctaagccacctaagcagatccagcacgatcaatcaatattacgagctttagtgtttgttttgtcataaagggagtttaattagcttataattacgcatttaacaattatacttacataaatgggcttcaaatacattcatggcattagcatttgtcggtacatctttaccggcatttgccggttcatccggtccccacacttcacgacaaacagcagcagttccgatgtccggcgttcggcggaagaacttataaaataacttttctaaaattaaaataaaaataaagaatgaatgaaagaagatagacaaaattgattattaattgagtttgctttgaagctccaagaaccaaacgtatccgggtataaaataatacgagataaagtgatagaagacctaagactacctcattactaaaaatatggatatttttctatacaaatccacgaatgaaaagaaaaagaagttggactaattaaattgaaatccaataattgtaaatataatattaaaacccaataaattagaagtctcatgttgcagtctccattattgattgtctccttagaatccaacatgtgaccctccattgtctaccattcacaccctttggctcactcgataaatttggacattaattgcattcattttatttgtaagaaccagaatctcagtagatgttatttgtgttgagtaaactgttgttatttatagactaggctattcttcgtatacactttgatactgatttttagttcatcatctatctaccgactaaatatagtgtttctatgtggcttctcctcaaatgtcaaatttatttctttaatgttgtttgagtttcaaacttgcaaagtgcaaaccaattttggttgttatactaaaaccacacatataattaaagacacccactatagcataaaattcgtcgtgtaagcaattttactatagtctaaactccataaaaggacgtcgaaaaatattgtgatattggaattatagtgtcagtttgtttttctttgggcaaatggattgtagtttcattatatattacaatttataaacgaaacgataagtatggctcatactttagtgatggagaattaaagtattttatattcagagatgacacaatatggtagaccaaaaataactaattaaaatagtatcatattagatatttatatgtgattgtaaatttgatcattgagtgaacattttaaattagtatgcccaagaaagaaaagaaaaaaaaaaaactctttctctctcatgataatgttccttttataaaatccacccaaagacaccaaacacttctccatcatcatttcatttcttgttctttttccaccatcaccatttcctagttcgctcgtgcacatctccgacgatcccaattctaaaatcatcacttcttccaatcttttcaacatctcttcaaaatatccagtcaacaaaaaaaaaagtacttaaaacaaggaaaccccttctttctttttgtacatataacataaaaatcatcacttttttgttcgtttcgccg

SEQ ID NO: 10335 - DNA, 3000 bp, Unknown
  misc_feature (1)..( 3000): cDNA_ID_2704644_gDNA_ID_2213643_Annot_ID_132329 3000 nt of promoter + ATG
tcccctgtgagtccttggattccacgaaggaagagatccgattaagagaaagactgaaagacaataatatatgttcatcgtttctttttttgcattcttctttcaagttttcctttagaatatatattagagaatataaactaaattaggtgttagagaatataaactaaagatagattcatcattagttcgaaggtagaatcacatactagctagtagctctaagtacaaaaccaaacccattttggttttcatacaattaagctcattaggaaccctttatctcctgcaaagtgtatgttagttctgttctcgatccaaatcgtacaaatgtggtatatatataggtggagagatcaagtttaagcttggaataaaaatatattcttatcacaaacgaaggagctctaagaactcagcaaataatgtttaagaaaaaaaaaaaaatatatatatatatggttacgtcccctctcactaaaaagggcttgagacaatgtgtgagtgtattcgaaacaggcttacggagattagtctcttctcctaaggtgccttgcgtcacaagtccttgattttcagttaactttctctttttcttatctcaatctcaagaatccgaataataaaactaaagatttcttatgataaaacagagcaatcatgcgacagttaaaaatattatgaaattctacatgatgagtttattaacgacatttttttttaattaactaaagcacggatctaaacacttttgagttttgactttttcatttgattttcttccttctttggaattcttttaattaactttttccttgatttcaaacgtcttcatcaagtatcatatctcatgaataagttaaacgtaaacaaacaaaaaagtatatatattgtatggaaataagttatgagaatttttccattttgattccttaataaggctttttacttctttttttttgtttcaacgtctctttttattttttaccattaatgtaagcagtatcaacattacagctccaaacagcttctgatctgtaactgctaatcctctgtttttgtcttgacttgcaaggtgaccgacgtacggaattgggctcaggacattgcctcttagcaagcttcaagaggaaggatttttggagaataacaaactgatcattagagtggaagttaaagtagctgaagaaggatatttaactgggaaggagatgtttgaaatcaaaggttttgaagttccttcttctcaggtaggttaaggagcttcacgtattctttttctttcttgctttttctggataaccagatgttgttgttgttggtaggttatttctgtgagccagcttttcatgaaacacccagacattgcaactggtttcaaactaaatggcaaaggtctgaagacagcatacatgagtcttctcctcagcctcatcgagacgttgcgaaggcctccactgagcttttctgatattgagttaagcaaggctaacagcacgttgagggagctgacagaagcgggctttaagctggattggttaaagaaaaagcttgaggaggtttccttgaagaggaagaatgcagtagatgatggttctcgtgtcaaacaagtggaggaacgcatcaaaattctgaaggttgacattgtcggaactcaaagatgagttgcaatttgagaagactagatctgctgctgctaatcaacctttgtcgtttgatgacattgtttaacatcaaaatcaagttttgtgtttcataaatatctctgggatttttcattactctttgaatccagttttcagttataagcttcaacctgtgtaataaatagctgcacaacaaaatgcaaaacgaaatattcatagtatctcaaaatagtttttttgtgacttctaaaatcacacaactttcagaagaagaatgacgaaacataaattatagaggaggaacatcactactattttcattttttcagccaatcacagcgctcctctatacgcccactcgcacctacttcacgtcacgcgctcaattccatacccattcgcaccaacctcgcgttgagcgcgtgtcatcaatttctataggggtaaacccacaaaatcatgtctatttctattctactcgttttgattccaaaagagcctcgcgtgaccccaaaacctttttttctgaaaaccatattaactctaatgcaaaccaaacccaaatcaatttcaatttcaaaaccatgtaaaccgaaccgaaatcataacaccaaaaagacaacctagcaatatactcatatatcgtcaatttcactattaatccaacgagccagtttattgcgatgacgtttctaatgcttcctaatgacatgtttttaacttatgttgatcgtttcatcctctgtttagtcctgaccacttttcttagttcaaatgttttgattgaaagcaatgaaacccaaacatagtttccttgcaacaaaagctttttactttataaacatgcataatttgatcattttatttaagtttaaattttcgagtctctttgtttctcttaactttgttgatttgtgtttattctcctctattacgtaactcaaccaagccctaaatttgggttttgacttgtataggaagaaaccaatcagggattttcaaaggccttacaaatacagaattatggttccaagaaaatgtttgagttaacgagaggttaagttctaaagaagtttatgacatatttggtttgttgattcattgttcaagtttttaattattctggtatccttgtttcactaaacgtcgtctacagagactaaagttttctgtttcttaacccctctctatgaaataaacagagcaaatcctctgtttctagcaaatcctctgtttctttgaccaaaagacgtaaataccctgattctttactttaaaattcaccggattttaaatggactgataagaaaaggcccaataaagcccattactcattgctgaataagtctggatg

SEQ ID NO: 10336 - DNA, 3000 bp, Unknown
  misc_feature (1)..( 3000): cDNA_ID_2704640_gDNA_ID_2213643_Annot_ID_132330 3000 nt of promoter + ATG
attagatgttacatctagttaacattattacatttttttcttgtgcatgcaggttaaatcagtgagttggatcttcgtgaagcatccagacactgcagtacatttcttaccaaagaacaaactggtgaagaaagcacatatgaatactctcctctgcctcatcaagacactgagaaagcctcctctaagtttgtctgagactgagctaagcaatgcttacagcgagttgactaagttaacggaagtaggcttcaagctagactggttaaagtcaaagcttgagaaggcttccttggagaggaagaaatcagtttctgatggttctcaggtacaacaactgaaggaacaagtcaagaatctggagcttactgtgtgggatctcaaagttgaactagaaaaggagaagatcgttgctgataaagttttttcgtttgagttcatagattttttcataaagagattctttctctcttgtttctcaatctcaaaacattaattaactatgttttctgtcaaagcttaaaaaggtttcattaattaacaaatctccaaattactaaattacttatcagccaattaaataaaagaatatgatttttcaagattttgtaattgcatggattgtaaatataatcagattaatacttgttccccctttttcgtagataaggattatctttatatttaattttgaggttttctttcttccactaatcagatttcgtgtgtgtctagatctccgcctacgattcaaggatcaaacaaatctccaagtatttcgtctgttttctcctccctcgaagaactaccaaaaccttaaaaagtaaacagatggggacgcaattccgcaaagctttaactttgacggtaaccaacttctcccaaaagagctctccgataaactctcctcctttcccaagcggtggctgcaattggtaagagtctctctttagctagctttcttaagtttcttctctgcatgcaacaataataatcttattgttgtttttgtcaggtatattaaattttatcccaagggaagtgctgatgataattacttgtctttgttcctgtcccctgatgatcctaaatcacttggacttaattggaaaaggagagctaatttttactttgttttgctgaatcaatcaggcaaagaacttcatcgaacacctggtacgtattttaactcatcttctctctgtgtgactgtgtctctaagagaactacacacatcttatctgattgaagatgaagaaaacttgaagttacacttttgtttttgtcttaacagaaataggtgatcaatggttttgtgatgactcactaagctggggttttccacagacattgcctcgaaaaaagcttctagacaaaatctttcttgataacgacagattcaacattgaaatctatattaaagttattgaagttgttgaaggatatcatatgtttccagcttcattcactaataagctcttaagaagttccttagagtatccagataagtctgagaaggaaactgtggatatcaatggtttcaaggttctttcttctcaggtaagttgcttttttggttttttctggttgataaaaaccacacaagattcaaactcaaaattcatttttctttggcaggttacttcagtgaagcgaattttcgaggagcatccagatatagcagaagatttcagatcaaagaaccaagtagtgaagacagaatacatgagtgtccttcttagggtcatcgagacaatggctaaaccgccacagagtatttcagagactgagctaagcaacgttcatagcgaattgaccgagctgacggaagtaggttttaagttggagtggttgaaggcaaaacttgaggaggtttgcgtggcgtttaagaaagcaaatgctgatgggtgtcggattcaacaacttgaggaacacgtcaagaatcttgagcagactgtgtcagatctcaaagttgaaatggacaaggagaaggctaaatctactgctaaagttttgtcgttggaggatacattgtctgatctcaaaactgaactgggtaaggagaaggcaaagaatgctactgctactgataaatttttgttgttgaaggatacttattctgatctcaaagttgaactggagaaggagaaagccaaatctactagtgctgctgctaaagttttgtcgttgaaagaggctttgtctgatctcaaagttgaactggatgatcagaagatagtaaattctgctacaactgctaatgttttatcgtgggaagatgatgatgatttattttcacatactaactgtttaggaattcagcagaagacaaatgcctacaaaagaataaactgaaataactgtttatgttcattgatagtttcattaatctcgtgttctgttttttcacatcaaaaatgtaaatttattatatcaaacttataaacagacattactctgttcttgattgtgtgtttgccattcgcatccgcctcatgaaagcaaagcatttggaatgatttgtgttattataacaaatcatatgttattcatatcatatatttttttaagtcttctaatatctaatattattaaattagtgatctggaaaaaaacttaaaaatccaatgttatttaagacattttcatttttaatgacttttaaagatttagatattttcttagttaaaaatacaaatatctaaatcacatggttttaagtgggatttggggagatttttcttggttaactttcttgaattcattgaaaatcatataaaaacacattaaaaatcaaatcatttaaaatatagggttgactacacccctagattttgtttccctattaaaataggatttataagcctaacaaaaaaaaaaaaggaattataaagtctttttctttccgtgtctgacttataaagcaagaaccaaacaagtctcttgtccctcactggaagaaccaaaccctaaaattacgaaagcgttcttgagatgatg

SEQ ID NO: 10337 - DNA, 3000 bp, Unknown
  misc_feature (1)..( 3000): cDNA_ID_2704628_gDNA_ID_2213643_Annot_ID_132333 3000 nt of promoter + ATG
cacacaaacaacttaaagctgatcgcccgagctcaccagttggttatggatggatacaactgggctcacgtaataatgaaactataaacctttctttgcatagctttgcaaggcttaagattctgagctcatttttactgtcttccctatcaaacaggagcaaaaagtggttactattttcagtgcaccaaactattgttaccgttgtgggaacatggcctcgattcttgaggtcgacgactgcaggaaccacaccttcatccaggtctttccccaaatcccacatgtcttgtctgctaatgaaactagtgtagaagaatgaccaaagctaacttgagtatataaaatgtgagtgcagtttgaaccagcaccgaggagaggagaaccagacgtcacccgaaggactccagactatttcctgtgatcactggacacagactcatctcaatcagcagctgcaggcacccacaagtgaaaagtcacagttggctaactctagattctggtcctatgcattgtgttcaggttgctctgtttaaaattcaacttagtgcccaccaccggaatatagtgtgtattataggcgaagaaggcttcttatcttcctctataaccaagaaaagaaaaaagatacccattatgaacattgttttgttgatgttattagcttcttcttcttctcccttctgcatcagaatgtggtttcatgtgagaaatcttctaattttatttcacgttattcgttcttgaacatctctgatttttgaatagaaccttgaaattgttatgtttatttgttcttcaaagcttgatataataacaatagtcgctgaacgcatcagatcagccactcaaaatgttcgactgtgaaccttctcttgacttgcaatctaacggcattgaaggctttgttgtactcatggctattgcattgagaatgagataaataaagaacaacattgagactcagtgcagactggaaggagcaaattgatagacctctaaatgaagagctcaatgagaaagctcctgagttggtgctgagctggatagacaagtgttttaatgtatagagtcgtaatccagtctaaatacaaagtagctgtgggaagtagaaggttaaaggttgttgtaaagggaacacattctactttctcgggacttttctttggtcaatcaagaattggtgcttgtttctatcagtaactgaacaaaaccagagagtatgagtttgatctttaccaaacgcaacaaggcatacaaaggcaaatccatagtaatgacaaaagatatctaagaaataataagataagtaatacatttgcttaacaacaaagaacaatatagttcttagccaaaaaacataaaaaaacaatgaacaatatagttgagaacaatgtgatagaccaaaatcttatgtattcattcatcaaaagagaacagtttatattggaattctaaacgttttgcctactattgaaggtttcacaagaaacaaaacaaaccaaagactagaaaacaaagtgtaattcaatagtctacgttaacatgacgtgttttcgcaccgaagacaataatatataaactgtgatgacagaatatggagtcatggactatgtaaggctaaactagattatggagtcatggacgaatgaagagtttttaatttcgtgaatttcataaataatgtgagcctcgtaataccactagttgtagacagcggttctttggtggtcgatattgcatggattatgcggtccactccacgatctaattattacaactatatacatatatttatatatcatgcactatatttgtattttacaatcttaaaaccataacatatcaaaacactttgattagtaacttttgtaattttataagcttcttgtgatttttatgtgataaaacataaacgacaccaattcgtttttttttgttttcatacatattttctataatatctgtcaggatctaataattaatatactgctctaaaagtatatatcatatcaattgtctccaagttttggtgaaacacctcaaactcaagttaataagactattttggttgtattcatgttttttttttggctatgttccattctgcttacttcttaaaacaatgtagtgtccaataacagcataaacctgataagaataataattatgcgtgtagaattttggtgaaacacgtcaaacttatttaacaaaacatatatgtttcatttttttttggttaattttttcccaattttttttattttgaaataaattttcggatagtgacatataaccttatgtagtctgtcaattgtcatatttttctatttccatcatcctatatactttacctttgttaaaactccttagataagaacttccaatattttccttacctatattttaatttccagttttatatatttagtacttaaaaaattcaaatggaaaatatgtttgactctaattagacacatataatatatatttccaaatagtaaattacaaattgagaaactcatgaacaatagtgcatccacgtcgttatccaagttggatttctttctaaaacaaataattagacctttaaaaaaaaatataaataggtacttgttaaaaagtaggagagcccacaaataaggctttggccgcttctgcttggactctccaacaaaaatcaaactctttaaaaaaacaaacaaattgaagagcgattatacgatcacggagaactcaagatccggtgacgaatccaacttcttgtgacggagctcaagtcgagagagagaagactgtactagtagtagtagctgtggatttttgtgtcatcatcggagatcggaatcttcttcttcttcttcttcttggagcttctagaagtggagagaagggggaagatcaagcgacggatagtgataggttttgctgtatgtcagtggattgtgttgaaactgattttggtggatttggagaacttgtgaaccctattcaatg

SEQ ID NO: 10338 - DNA, 3000 bp, Unknown
  misc_feature (1)..( 3000): cDNA_ID_3035992_gDNA_ID_2213643_Annot_ID_181359 3000 nt of promoter + ATG
gattcatttatttcgtttttatgttggtttatgaattctaatagtcaaaagacctagtttatctgcgtcatttctggatattttttcgttccaacattaaccaacaaatcgtttatccttacacttaccatattttcacgtttgagatggataatttctcaaagaaggatgcagcgatacgaactcatccatttagatttaaatataacattattgtaactggtttctttatttatctaattaatttgatgaagaatatataacatttaaattgatcttttgtttatgtattagagatgaaattaacatatgtatctaaattgaaatacatatctgtcattaaaattattagtaattgtgacaaatgcatcattatcacaactaaccacacaagacttttatgaaagaaaaaaaaaatgttcatgacttagttataaagaggaataggattatatttggttaattaattattgcttctgactttgttttaaaaatattaattttcagcttttccttatatcttttgagatagggttttaaaaagttttgttttattttcaatgtctataaatattaaacagacgtgtgagattcttccaagtaacaaaagcctaagaaagcgtctcggaagagatatggagaatcatgagcagacgagtttcacgtttgagatagataacttcttggagaagggagatgcgatatctcctatattcataagcggcggatgcgaatggtaaaacgagcagaatcagttctttagctttcttaaactcgttcactagactcaacaaaaacttgttctcgaagatcgatgtatcttattagtttgtatgtttagggtttaatctttgtatttttttctttctcaggtttattagggtttggcaaattgaagatcacttggctgtgactctgagcgttccgaatcttgaatccttacgatatggatgggaaaggagaaccaagtattcattcattgtgttgaatcaatcaggcagagagctcgaacgaacatttggtaattaacttcaactatatatataatatatgtatcttattgccgaagaagaaaggttgagaattttattttgtttttttgtttgcctcacagaagtagaaggtctcttctgtactgaattattagaatggtgtcatcccaaagtaatgcctacgaacaagcttcaagaagtttgtttagaaaataataaactgatcattgaagtccaagtaaaagtacttgaagttgttcatgaaggaggggtaacaactgagaaggagatgttcaatattgagggtttcgatgttctctatactcaggtatgttaagtatcccctagtttcttttttagtacttagagctcataatttcctctggattgtttttcgatcatgttaacattgattttgcttaatgttgtcaggtgtctcgggtcagctggcttttcgtggaacatccaaacattgcagtagatgtcagaataaagaaccagttggtgaggacggcatacattaatgttctcctcggtcttatcgagacactagacaggtctccacggagtctttcagagactgaccttagagacgctcacatcgagttgagcgagctaacagaagcaggattcaaggtagattggttaaagaaaaagcttgaggaggtttccttggcgaggaagaatgacatttctgatggttctcaggtggaagaactcgaggaacatgtcaagaatctcaaacttgagctggacaatgagaagattaaatcttctactgcttctgaaagagttttgttgttggagaaagaggtgttagatctcaaaattgaactggatcggacaaggagaggtcagccaaatctcctatatctaaagttgcgttattgaaggatgctgcagattccttcccacttctcgttaaccagctgcagattccttctcgtttgagttcataatttttttataaagagattctttctcacttgcttctcaatctcaaaacactaagtcactagtttttcaatttaggaaaaaattggttaatatattcttgatccaaagagattttgcctaaacatctcatagctggggacaataattctttgtctcagttcttatcacttttttcaagcaagtttgaatacctagtcttttttttttccattccctgacttgtttttttttatatcatttttggttacataatagaagtatataaccaacgcagtctcactctttgtatttggtcactacacaactatattattactaagttcattgatagttctctgtttttttaaaatagatcaaaacgtcccctaaggtgccttgaaacacaagtttttaaatgcaaaacagaggaaacaaactataggtaattgattgcgtctcttcttctatctcaagaattcgtcccaccaaattaaactttgtaaattattagaagaggagtgacagatattgctacaaaaatagactttccaacaaacgttgcaaaatgaaataaatacaatcgctatttaggagtagaaaatccatagttattaatttttatttatgttttccatatttttaaccataatttggttattatttataaaagcaatttcatttataattaaacctttttgaaaatattatctaagagaaaaaaaagaagcaaaagttacttttatcctaataaaaaaccgcatacaactgatctgtaagttttggaatttaaataagataataagttacagatctagttaatataattatgactaattgtattaaactttttatatgaagattttggtctagttatctcgtttgattaattattacgggttcggttttcctatattaagagtaaaaatttaagaaaccattttgttaaacttgagagttgagagagcagcatcttttagcaaatggagacagaattgaagaaggcttttacatgggagattgataacttctcccaaaggaacgatcatgcataaactcggaaaccttctcaatg

SEQ ID NO: 10339 - DNA, 3000 bp, Unknown
  misc_feature (1)..( 3000): cDNA_ID_3036000_gDNA_ID_2213643_Annot_ID_181357 3000 nt of promoter + ATG
gctagtagctctaagtacaaaaccaaacccattttggttttcatacaattaagctcattaggaaccctttatctcctgcaaagtgtatgttagttctgttctcgatccaaatcgtacaaatgtggtatatatataggtggagagatcaagtttaagcttggaataaaaatatattcttatcacaaacgaaggagctctaagaactcagcaaataatgtttaagaaaaaaaaaaaaatatatatatatatggttacgtcccctctcactaaaaagggcttgagacaatgtgtgagtgtattcgaaacaggcttacggagattagtctcttctcctaaggtgccttgcgtcacaagtccttgattttcagttaactttctctttttcttatctcaatctcaagaatccgaataataaaactaaagatttcttatgataaaacagagcaatcatgcgacagttaaaaatattatgaaattctacatgatgagtttattaacgacatttttttttaattaactaaagcacggatctaaacacttttgagttttgactttttcatttgattttcttccttctttggaattcttttaattaactttttccttgatttcaaacgtcttcatcaagtatcatatctcatgaataagttaaacgtaaacaaacaaaaaagtatatatattgtatggaaataagttatgagaatttttccattttgattccttaataaggctttttacttctttttttttgtttcaacgtctctttttattttttaccattaatgtaagcagtatcaacattacagctccaaacagcttctgatctgtaactgctaatcctctgtttttgtcttgacttgcaaggtgaccgacgtacggaattgggctcaggacattgcctcttagcaagcttcaagaggaaggatttttggagaataacaaactgatcattagagtggaagttaaagtagctgaagaaggatatttaactgggaaggagatgtttgaaatcaaaggttttgaagttccttcttctcaggtaggttaaggagcttcacgtattctttttctttcttgctttttctggataaccagatgttgttgttgttggtaggttatttctgtgagccagcttttcatgaaacacccagacattgcaactggtttcaaactaaatggcaaaggtctgaagacagcatacatgagtcttctcctcagcctcatcgagacgttgcgaaggcctccactgagcttttctgatattgagttaagcaaggctaacagcacgttgagggagctgacagaagcgggctttaagctggattggttaaagaaaaagcttgaggaggtttccttgaagaggaagaatgcagtagatgatggttctcgtgtcaaacaagtggaggaacgcatcaaaattctgaaggttgacattgtcggaactcaaagatgagttgcaatttgagaagactagatctgctgctgctaatcaacctttgtcgtttgatgacattgtttaacatcaaaatcaagttttgtgtttcataaatatctctgggatttttcattactctttgaatccagttttcagttataagcttcaacctgtgtaataaatagctgcacaacaaaatgcaaaacgaaatattcatagtatctcaaaatagtttttttgtgacttctaaaatcacacaactttcagaagaagaatgacgaaacataaattatagaggaggaacatcactactattttcattttttcagccaatcacagcgctcctctatacgcccactcgcacctacttcacgtcacgcgctcaattccatacccattcgcaccaacctcgcgttgagcgcgtgtcatcaatttctataggggtaaacccacaaaatcatgtctatttctattctactcgttttgattccaaaagagcctcgcgtgaccccaaaacctttttttctgaaaaccatattaactctaatgcaaaccaaacccaaatcaatttcaatttcaaaaccatgtaaaccgaaccgaaatcataacaccaaaaagacaacctagcaatatactcatatatcgtcaatttcactattaatccaacgagccagtttattgcgatgacgtttctaatgcttcctaatgacatgtttttaacttatgttgatcgtttcatcctctgtttagtcctgaccacttttcttagttcaaatgttttgattgaaagcaatgaaacccaaacatagtttccttgcaacaaaagctttttactttataaacatgcataatttgatcattttatttaagtttaaattttcgagtctctttgtttctcttaactttgttgatttgtgtttattctcctctattacgtaactcaaccaagccctaaatttgggttttgacttgtataggaagaaaccaatcagggattttcaaaggccttacaaatacagaattatggttccaagaaaatgtttgagttaacgagaggttaagttctaaagaagtttatgacatatttggtttgttgattcattgttcaagtttttaattattctggtatccttgtttcactaaacgtcgtctacagagactaaagttttctgtttcttaacccctctctatgaaataaacagagcaaatcctctgtttctagcaaatcctctgtttctttgaccaaaagacgtaaataccctgattctttactttaaaattcaccggattttaaatggactgataagaaaaggcccaataaagcccattactcattgctgaataagtctggatgaatccagtcggtgagctttcgttcttttcctccggttttggttttccgatttgcttgccgccgataatctccgactttaatgctccgccgtgtcttcgaagttgcacttacttaaagctttttctcttccgccgtcggctttggaaggatccttctctttgaaaggtggattctttttggccggagaaagccaattctgagctcgccaatg

SEQ ID NO: 10340 - DNA, 3000 bp, Unknown; identical to SEQ ID NO: 10334
  misc_feature (1)..( 3000): cDNA_ID_2704652_gDNA_ID_2213643_Annot_ID_181355 3000 nt of promoter + ATG

SEQ ID NO: 10341 - DNA, 3000 bp, Unknown
  misc_feature (1)..( 3000): cDNA_ID_3036011_gDNA_ID_2213643_Annot_ID_181352 3000 nt of promoter + ATG
gaatgtggaataatttaaagacatttttctcaacaatgagaaaattgttttcatttttttcacgcacacataccattaagtgctttcacgacatgcatgagaaatgctagatatatgtaattatacataaagatgtgatggtgagtgtaaaagatgaaaacattaactattcatgagtcaattgatcatcatccatctttatatgtttcatagtaccactttgtcgcatgcgtctgtgtctcatcaacccatctctataataatgcaatctttatcactttttgtctttcttaatactcacatacacatgcaacccactttctctaatcctaatttctagcttctatactgcacgtaattctactacacagtttcatattgtataacaacattagggatgattgaaattgacaaatttataaccaataataacacaattaataaagttaaaaaattataacatcgttgttttcttttaaaaatcttctcttgattgaaaaaactaggaaaataacacatatactgttgaacactcttgataaaaaaatcatatggagattttttcaactttaatttcattttgacttccaataaatttaagcctaatactatttaataccattagcctgaatgcaatcacaatctctagctcacgtactgctcagctaaacatgattatactagatataattttgaagtacaaatactagctaatcaaaagaatttagaggtagcctagtcgaagctccaaatcaagaacttggttgggattcctcaaactcatcccaagctccaaccccatgacttgatcatctttcttattcatcagatccccacggcttatctcacatcttactgaatgacatgcatcgatggcacttttcttgatctctctgctacatacattgctcttgttcttctctctgtccatcatcaaacctccatagctagtagtactgtccaaaagatcaaaccgggcagaaggaaaaggagtggttttggatctctggttggttagggaaggctcaagatgagctgttgttgttgaagaggaagaagaagagctaaaattagggttagggtttgcaataggtgtgtggtggtgaggttcgaagagccaagaagggatctgcctgagttttgctctgtctcttctatgaacattcatgtggcctccaagtgcttgagcagatctgaactctctcctgcagaagctgcaagtgtaattcttgggaggccatgggatcagcccagcttcgtaattcttgtagtgattcatgatgactctgttgtcaccattaccgtcttctccttcttcttcttgggttttgtctctgttactaaaacttgccaaatgtgttctcttcatattttccaacagatgatgatcaatgctggtggtgaatgatgaagatagtatgatactcccctgcatgaaataaactaagatgttatgtatgtatatattaattcaaaagtgagaaagaataagagtgggggatgatgaaaaccgtatagatagagatttttgagtttgatgaggaactaaggaagaatgtaactacggaggagttactatgtgttatatagagtcaaaagggaaacaaaaacagaaggtggtttttatccttacttgaggaaggaggtgcatgtacggatgatcatttattagggtttaagtctgttacatgtttggtcagatatattggagaataatgagtataggctaggctatgttcgattagatatcatgagtggaaattatttaaaaaaataaaataaaaagagagaaagaaagagacaaagaggtagtttcatgattaagagggagagaaagaggaattgaatagaggctacttaactcatgatgctcatatgcctgcaatgtgtctgcttgttactataattggaagttacttgagaccaatgttattgtggtatgggaactctgtgttgcattaatattttgtgtcaaaatcttgcagggagataacttgccatttcattttcatcatattccatctctggctccacaaatctcttcattatatatatttgaacatctattatatacacacaagatagcctaaaaatatgaacatgtgtttagttttttgatatggagagattgtagtgaatagtgatggagggccaaaagaaaccaaaactattactaattgattttgacattgattagaagaaactgtaaaggaaagaaacaaggcttgtgtatgcattaaggacatagacaatgacgtccctgatgtcttcagagttattgcagcttatatccataactaagaaaacttacatattactttaaaactaagtaataaaccagtaacgctaacaatcgtatgccacatctagacaagtgtaaacaaaattggtggatatagaattataaccctatcagcatatcaactttatgggttgaggaactcaatttcggttgtcaaatatatattgtgtgacaaattttaacttatcaaattttattctcattccttaatcaagcattaaagttttctcaattgaccaatctctaagaattgaaaaaataatcttcatctagttaatgcatatctattgaatttggaaaatttaaaagtttttttttattaattttgtttttgggaaaatcataaaagacaccctcccctcaatagaagatgaaacgcggcgtttcataaataaaaacgagaaaatcaaaatcgtcgctctctgtttgctggcgtaacttagccttgttcttcttcttcatcgcgatatctccggtgtcttcttcgtctccatcagaagaagaagctctctgtatccatccatatcgaaaaagtatgaactttatccgaatttcttctcaattttatggatttattagtcagactcatgttagggttttgttcgatttcatgaatttagggttgaaattttgcttgtttgtatagactctaatggaactgatggtttgttttaggattgggttgatctaaaaaaatg

SEQ ID NO: 10342 - DNA, 3000 bp, Unknown
  misc_feature (1)..( 3000): cDNA_ID_1032307_gDNA_ID_2213643_Annot_ID_181350 3000 nt of promoter + ATG
caagcataaactccgctcctgatttccatgaccaaaaactcagcagcaacttggatataacttctcagtatgattatattttctccgaagtgcgtcaggaactagataacagcccttccactaagcttgattcttctgaagagattgacaactttgctgaattttctactccatcaagtgtccgtgtgcctccatctgcttttctgggacctaagtgtgcactatgggattgcacaaggcctgctcagggctccgagtggtacctggattactgcagtaactaccatgggactctagctctgaatgaagattcgcctggcacagcacctgtattgaggccagggggcatcagtttgaaagataatctattgattgatgctcttcgtgcaaagactcagggtaagaatgttgggatcccagtgtgtgaaggagctgttaacacaaaatgcccatggaacgcagcaggtgagagcattgtcccactagagcccagttttgcttctctctttgttttagttcaacatttcgttgcctctttgaaaacagaagccttatgtgagtttcttacttttgcctgacccttaattttttgtacttgcagagctatttcatcttgaactggttgaaggcgaaacaattagagagtggctcttctttgacaaacctagaagagcatatgatagcggaaaccgaaagcaaagatcacttccagattacagtggaagaggttggcatgaatcaagaaaacaactgatgaaggaacaagaaggccagaagagatcttactatatggatccacaacctccaggtccctttgagtggcatctctttgaataccaaatcaatgaatctgacgcatgtgcgttatatcgcctagaacttaaagtaggaaatggaaagaagagtcctaagggaaagatttcaaaagaccctctggctgatctgcagaagaagatgggacagtttaaagtggcttcagacaaaccctctcctccaaccaaaggtcgtaaggagtgaagttagctattggtaatctaactcaagactcctgcaacaatagctccaagttgtctccagcattctacaaaagagccatcgccacctctgttttctttttttttttctttctgactgtattatgaagagataggatctttgatgtgttgtgttaatatggacaagtctggtctttgccctttttcttgatagaatcgtagatgggtttgtaaatttttgcattttatttttctcctttaaaaccacaaggattttgttaacgaagtggtgtattcatatttcaaaggtacatttgcaacaccattgattctttattccaattcttatctacgtgtgtgtgtgaatgaaacttgaaaccaatacaagtcactaatgctctcagattatgtaattgggctttactgggccgtttataaaattgggctagaaaaagggagacagcagacgacaagagcatccttgttctctttaaaccctaaattacaagcaaatcaccaacagagagagtaatggcgaaaaattctggtagctcgtttgaagcagagaaatcagagggaaagtgtgttacgacgactactgaagcacaagtaattcaaaattctggctgatgaattatgtatttgattttacgtatttgtaattcactaattctcactgattcatacaatttgtgtcgtaaatgaacagcaaagtagtcaacctgttttgagcaaggaagaggagaaagtgagagatagctacttgttctgctgtgaaaatttctacactcttcctgagatgatcaatttcatgaaggagattcatggtgtagaacaaaccactgtgacaaaggttttcagggaacttttaaaaggtagaaaagctgaagcatatctcagagaatctcagaaaagaatgaaggcaagaacaacaacaacaacttgaacagaggaggatgaggcttaggttgctctaatttgaaattctttggtttggtttactggttagtaagaaatagacttgtattgtcacatttttttatcatattttgaggtccattgctttgggtgtatggaccagactaggacaaatgaataggagatgcaaaagggtaataatggagaagtcagtcttgttggtctattcttgtccgagtccatgatttttagagggagaactagaaggaggaactaaaagttgtttaggttaatggtttaggtgctaagtgttggctctgtgtgttacttatgactcgtgggatctaatgtcttgtgaaaaatcacttgtgagataaaatggacatagtctagagaagaaggtatataagaagaaaagcagtcaacttaactacaaaatcacaacggctcacaactgttttatgttgtagaagttggttgcttcttagagtggttcattcttcattaccagctaaccgcaaataaccgtgacttgaagtctttcgaattacacttctttcactcgtggttcaaacttcttctgttcaagttgttatgccttctccagccattacttgatttcaaaatggtgttgatggtctcattcttgaaggcttggatgtttctcaactttttgctcttgaacaagagccaagaggtgatgggactccgtagtacaaacacaatttaagaacgtttgagtaagagttttgattcacattgaaaaaaaaacttagaagaaaaaatgaaccaaactaaaataatcaaattaatttagtttattaatcaagaattaaatcaagttttaataataacctgaattgtagattttttttcttttcttaatagtcgaatactgaacactgtagtattaaatgaaaactcaaagcccaatataattcaaagcccatcgaatcaaatatctggccactccacttattcttaacttgaaacttaaaagccgaaatcgtaaagagagaatctggtcggaataatccactcgaatcttaaaacgacgtcggtttaaccaaatgcgagtcaacggatg

SEQ ID NO: 10343 - DNA, 3000 bp, Unknown
  misc_feature (1)..( 3000): cDNA_ID_3036023_gDNA_ID_2213643_Annot_ID_181347 3000 nt of promoter + ATG
gttttatactataggaaatcttcaggacatggtcaagaatctacaaggttttgcaacttttcttgggaagcttatttgttttgtttgattgtctagcaaactgatacaaaaacaattgttgttgttgttgtttccaggtatgaagcttgttttcgctcttcagatggtttttatcggtttcttagtgatcttatggatgcttaggagtcgtgctcggtctaagagacgacgctatctgctgaagaatgtacctcccattaatagatcagctaactaactccctggaacttgtattatacttttgtgaagcttttacgtggaacctgagtgttaaagccacatatgtcaagtgtcattactagctatacttattcagtgtgagattgtttgttcctagttacataattgtcttggtcttcatgtttattaagccttcagatcctcagaccatagtaggtaccgatgagtcttatcacaagtaagatagtcacatgatctgcagattttctagaaaatggatggattcacaatttgaatgatctcatggtgaattattcgactgatataaggttttatgaaaatgaactcttgtttgtttctcacagacaaaatcaatatacaaaaaacattacaagccattgaagagaagagagaaatttacagttaaaaaatcctgaaaaaatgatttgtaaactcaagattggaaacatccacaagttgcctttggaacaattctaatggcccagtattttagcagccgtttcttcttgcttctccacgcttaccttcaatcattgcacttctttcttctgcttccttgtgagtcactgaaacctaattcatcctctctgcatactcctgctttcttcttctctagttcctcctgcagtgaaacaaattcacaaacacttcacttctcattgttctcaatcacattgaaacagtatcagctctctattgctaagtttattttacctccattttcttgagttgcacttcgacagctgctttcttcacttctcaacggaaaactagtcacatagtttagtttaaggtcacctctaacgagtgaagcagaccaagatttcgccagtgcagattctgtaagaattttcattctactaaaacataaacagcaatatgccaagccttaacacaaagagtgtcacaggtaaacacatacagagcaaatgcatgattctgtcataaagcttcaaatttagctgtaatatattacctccatggatgtgtattgaatcgtaaataggccgcttctctctcgaaacaagaactagcaatggtagcctgatgtcaacgtatgttgtatgaatcaagtccccagtgcaacttgaaggtaaaagaacttcttcacactgttaggtcgaaaggtgaaacttaaagcttatgtactagacaaggcgatggaacttcttcacactgttaaggacagacttagaggtaaaagaaaaacttgagtagctcatggagtttagctagaggttggtcgctaagatatttgtaaactgaagatgctaatggttatattagggatgatgatcttgaaggaattatttggaaatgacataacagatgatgtgtgatttcctcctttaaaacaaaatcgtttggttttgataatcatgaaaatatttctatgagattactgtccgacacacatttagagaaataattcactgactatatattccgtaaatacatgtacatataactttctcaagtttgatttataattttaacatttcaacaaaacaaaaaaatatagattccgttaaatattcctatcgatccggaaaagtaaaaaattggacagacaaaatatccaaaattatacgatttaagagagaaaaaaaaagtagcaagtgtcctacatgtgggtgtggtctgggacaaagcaaatatagaggggaaaaaaagagtacagaaaacaaatcacatggactcacacatcaacattatactcttcactctctctccactcgtccactaccctactttctccatgcattgtttagccctcctcatagcagtgatggtaacaagataatccattaccatggtgaaagatatgtgataaataagctaagtcgtcggatttgttttccaataaattaagtcatgtttatcaactcgacttaattctattattctatatatagatgatactgtgtgctattaactcatgtattcattgtacttgcttgacgtaggtttacatgtaccaaaattattaattgacacatatgatttgcaacaaatacgagatattgcatttacatgaacctatcgaaaaaccattcataagaaagaaacgtattaaccattcaacaaaagaaaggtcacaagaacacgtgcttgcttgattcctcctccaaatctctttacatagattaaaaagaaaaaaaccagtggaggagaatttccagttataccgttgagacctttagcctcacttctcaagacagctgtttcatagctgtccgatctcaatatctccctccatgtggccctactcagagagataaattaaacactttgatcacatcgaatttattatgttctttcataagattttacataatatatatctcatgtatatatatatatatctctatttatctccttcattaattctgtttttttacttccttctatttatataactatcatttgttaaacatagccattttggttactcttgttccgttttcttctttcttcctctccttccttttttcttttctctatcttcttcatatggttcatgacattgatctaattccacttcccatttgtctccacatttcgtttctttcctttgttttttcatctaggtttttggttttctgaattggatttacgttagtttatcttgtacttattaattaaggttttttttttttccttcctcaatcctgtaaattcagatttgctttctttggtaatcttttggatcaagatccatctattttttcttcaatg

SEQ ID NO: 10344 - DNA, 3000 bp, Unknown; identical to SEQ ID NO: 10332
  misc_feature (1)..( 3000): cDNA_ID_2704665_gDNA_ID_2213643_Annot_ID_181346 3000 nt of promoter + ATG

SEQ ID NO: 10345 - DNA, 3000 bp, Unknown
  misc_feature (1)..( 3000): cDNA_ID_3036031_gDNA_ID_2213643_Annot_ID_181338 3000 nt of promoter + ATG
tctccgaattgtacccatcggagcttcgttttctccggatcagccatacagagagagaaacagctccgattacaaccgaaactccagaaatcagagaaacggttactgaaccggtgatctgctgcttcttctcctttgcgtcgtcattgctgattacactagggtttggtttctggagttcttgagtaccttccggctttgcagcgacgaaatttggggttttgattttttcacacggcgtttgcaatgggaagccacagagatgagagtttccagcgaatgcgtttggtccttgattcaacagagatcccacctgaggtacttttccggtgagattgttgtgactaaaatctaagctgacgtgaactcgaaatcgaccgtacgacggtggaatctcgccggtgaattggttgaaagagaaattcaaggttccgacgaggcttccgagttcagtgagtgactcagggagtgaaccgttgagatgattggaggagaaatcaaggtggttgagtgacttcatggacttgatttgggccggtattgggccggagagtgagttgtgagagagatcgatgtaccggagcttggttgcttcgaagagacgaaccggtatggttttagagaaattgttgtgagctagatcaagccggtttagcgagttgagtaaaccgagttctgatggaatgtaaccggagagactttttccgaagagtacaagagttgtgactcggccgtttgtgcagacgattccggaccaatggcaaggagtcgggtcggattcagaccagtgggtcattactcgggtcgggtcgttatcgacggcggatttgagagctaggagagataaaccgtcggaattgagagaggagcaaaagctcatgcagagaaagatggaagaaacaacaagtgaaagaatcgatggtaacttcattttttgcttaggatataggaatcttgaaactttttggttgttaaagaagctacaaattacagatgattcatatagtgtgaggcaacgagaagttgcagaggaaaaacggtaaacagtgaagacgaaggagaagaataatgggagatttgaccgaggtatgattcttttatggtttcatgttagcaacgtggtgtaatgtagtcatgatcaattttttgaattcttgtccatatactatggtttgaaattttaataatatatacactacagttctaattaaaaatgtgatatattgggatttgcgttttgggtttttgacattttgtggttatttttgaaactttttgaagtttagttattgattgatgcaggtgggttgttgttacatttttaatttgtgtgtatccgttggtgatatctagggtcactggatttttatagcattaaaactatatataggtatcaaaaaaaaaagttacaacaaatttgggatacaaaaaataaacaaagtgttatcttaaatgctatagtctatagaatcttaactcgtataggacctcttcactcttgagccatgaaaaaactgtacagtcccactgggtcgataattgttttacttttacaagattcagcagtaactaaaaaaaggattaaaatatgtttaagaataattgaaaataatcgaactcgacctattgcatatgaatttgaattggatagaggatgtcatatttattcaaattaaaggagggaagagacggtagagagtggattgtgtcagagaaaaatcattaaccaaccgacaaagtaaccacacaaagatgcatttgaaaatatgccacttttggctcctctactcctagtcttaatgggcaattccgaaatatacacgaagagtcacaagtcccattgttgttgggttagcactttgtcacggcccaaattcaacttattcacaacatcaaataaatatatgcatcatatcatcacatccgacttttgttaacaattacttttttcagttaaagaactttcaagaggaaatagtagtaccttaaaatcctacaaaaccttgtcgtgcaagaactgggagggctacaaattgcggtcaatgtacgcaaacatcttaccgtttttggtacaaacactagaactccaatgcagtgagtgagatgggccaattttggcaatctcaatcaacggtccatgtggcccaataaatcactaaaaacggccgaatttttagatccatgtaacttaaataattggtggggacggaaagtcttgtcgttttcatttattcgagtgtggcactctgattcatctcaagcttattttttataaaaagagtaattttagaggctgaacaataacgaccttgaacaaaataaaataaaataagagggtgaacaacgaccagtcaaaatttgaaaatttactcaccagagtctataaaaattaaaaaggaaaggaaaaaaaaagaatgaatcatagtgaaatgaccttatttatggctccaactatagtgattagtaaccactaaaccagaaaaaaacaagtgacccattacacagggattaaaaatactaccgaataaagcccaataggcccaattcaaaagcgtctctctatcatcgtctctccaaaccccataaattggatatttcctttctctaaaaatttggctttattaacagacgcactccaaagctaacgttgctttcttcccactccaaatggctcttgtgctctcagaacacacacagatataataaactcttaacgaagaagaagactttttcttttcttgagcaagctctgagaaactcacagagagggacagagagagaaatatttcattcgctactctctttaataccgccattgatgcaacctccttcgcgttaactgtcaaaatactccccaactgacaaaaattaaattcctttttttctctctcgattttaaaagctctaaaaggaacgagttgatcaagtcggtcggttctggttatcactgaatttcattcaactcggtttattccggtttaagtgtgattttcccggcta

SEQ ID NO: 10346 - DNA, 3000 bp, Unknown
  misc_feature (1)..( 3000): cDNA_ID_3035977_gDNA_ID_2213643_Annot_ID_181364 3000 nt of promoter + ATG
ccaacctctaacgcacgaagactcgcacactttctcacaagagctctgagacaagcactagtatcagcatccggaggagtgtccactgatgcacataatgctactacccatttgcagtcgctactctctaaaccgctctccttttcaccaaacatatccgctttctcagctttgatacccgtgtcactgagtccattccttgtatctctgaaaccatcccaccaaatgactcatcaatgtttgtgtggggacgtttactgaatatctccatgagtacatctcctaaagactcgttgccattttgttttaaagcctgtgaaaaacccataaaacttaaagtcattacttgtccgttaagagaaacactgataagtatgcaagttggaagaaaggaataccagacgaatgtgtgagaagtcggaaagcaacgagtcctcccattccttcaccggttgcaggtgctctgggaatttgtggcatgtaaacactttgctctttctctctgtacttgcttccacttaccttggctacttttacatttggaattcgcttagcctcccaccttaaatgatggaaacaacttaaccatatatgcctaaatgcagatacacagaaagattgaaacagagtgacatatatacctgactcgtcttaaatattcaatcccgtcttctggtggtccagaatcgaaatcaggttctccatccacagcaaacgcaggcctcaaaatgctattgtaatcgtcattatcttcagttttctcctcttttacaacatagtcttcttcaagtagttaagtcatcaattccttgcctaaatgttctcatgaagaaacaaaaagtcacattttcttggaatctcagttttgatttctattgaagaaaccaataaaaacaaagaaaagaactaagcccatcaaaaagatttagctttcaaaggtattgatttttattgaagatgtatgaacatgtacaactttttagccgataaaatcatggccatacacactttgaaccaaacaaactctctagacccctttaaacaatctgaactaaagaatctatatacagaaagaatgtattgtttcttagaaaaggaaaaattggtgaacacaggatttatgaaacacaggcttcgacagatttcttcaggtcaatgtacaaagagacgggttcgtcttggtacagccgatatgggacctgtggaaaagaaaacaaacggcccctatcaaaaagatacttaggaacaaccactgctgaaagagtcgcagacactaagcccgactggatttgtcactttgagatgaccattagagaaggaaatcaccataaaaccgtagcaaagaaaaagccatttgagtgacacacacaaacaaaaatgcagcagatatagcttaaggttatacatgagctaagtaatcttaacttggagtgacatatttctattagacctaaaagtttcctcaacatgttcaactaaaaacaggcaacaccacaaaatgcagcagctaagataaaagtaaagtaagtggagggttaccgaggatactcttgtgattcttcaaaccttcgtactcagtcaccagctcaggtaggagtctagcatacaagtcactccacagtttcttctgattcgcaatgtgggcatacctcatcgactccatttggttcctagagtacattatccgcaactgcttcccattcatttctccactgttacgaaagtcagaaactttggttgacgcattcctttcaacaatgctagaagcatttcccttatcaatcggtttctctactccaactttcttatgctttcttggtgcatccttatcagtgtgtgcagttactggtctcttagaatgatctttacctttcttgtagaaaggaacaacatcaaacaacgcagtatcatcaaccaaatcaatattcacagatcttccaacaaatgcattatccttaactctcactctttccaccttctcacgctgatctttagacccatttccattcttttcgatcttatggatatcagaagccctagcgagcgtgtccccatcattcttcttctcagtctcccaaagtatttgaacatcagaatcttgtcccttcttctgagagttcaaaatttctttcatatcagagatagaaccgacgcaatcatcctctatcttgtacacatcatctccaaattgatcactttctgtagaaatctcagagacttccttaatctgttgcagttccttattctcttcaagaaacgtggaaccatctccgatttcagcgaacaatattatcttctcagcctccacaatcctctgaccatcagaatcttgtcccttcttctccgagttcaaactttctttcatatcagagatagatacgacgaacccatcagtctcaacaacatcctttatcttgagcacatcatctccaagtcgatcgccttctgtagtagaaatctcagagctttccttaatctcttcaccaaccttattctcttcaagaatcgtggaaccattttcaggtacagagactactactactccaggacactccacattcatcgccacggtttcttcaagagtcgtttcggagaaagaaatgtcaatagaatccgaatggatgatttctccatccttctcaaaaacagaagtaaaaggcgaagactttacttgcttctttgggcttatcatctcttcaacagagtcgtcgttctcaaccggcggcaaagaaacgatctttagcgagtcttctgcaaattcatcccgagaaatcgaagttttccccgacccaatactttcaccggtatcaaatctcgtcgccatcacagagataaaaaagagagagcgagactgtgagactagagagagagagctttatgaagcgaaggcaaaagtctctcgagacgattatataagctgaaaccggttcagttaaaccgtagaagttagtattaaaccggtgatggctattgcaccaattaaagtagaggggtattatg

SEQ ID NO: 10347 - DNA, 3000 bp, Unknown; identical to SEQ ID NO: 10337
  misc_feature (1)..( 3000): cDNA_ID_2704628_gDNA_ID_2213643_Annot_ID_181363 3000 nt of promoter + ATG

SEQ ID NO: 10348 - DNA, 3000 bp, Unknown
  misc_feature (1)..( 3000): cDNA_ID_2994291_gDNA_ID_2213643_Annot_ID_132334 3000 nt of promoter + ATG
agactcgttgccattttgttttaaagcctgtgaaaaacccataaaacttaaagtcattacttgtccgttaagagaaacactgataagtatgcaagttggaagaaaggaataccagacgaatgtgtgagaagtcggaaagcaacgagtcctcccattccttcaccggttgcaggtgctctgggaatttgtggcatgtaaacactttgctctttctctctgtacttgcttccacttaccttggctacttttacatttggaattcgcttagcctcccaccttaaatgatggaaacaacttaaccatatatgcctaaatgcagatacacagaaagattgaaacagagtgacatatatacctgactcgtcttaaatattcaatcccgtcttctggtggtccagaatcgaaatcaggttctccatccacagcaaacgcaggcctcaaaatgctattgtaatcgtcattatcttcagttttctcctcttttacaacatagtcttcttcaagtagttaagtcatcaattccttgcctaaatgttctcatgaagaaacaaaaagtcacattttcttggaatctcagttttgatttctattgaagaaaccaataaaaacaaagaaaagaactaagcccatcaaaaagatttagctttcaaaggtattgatttttattgaagatgtatgaacatgtacaactttttagccgataaaatcatggccatacacactttgaaccaaacaaactctctagacccctttaaacaatctgaactaaagaatctatatacagaaagaatgtattgtttcttagaaaaggaaaaattggtgaacacaggatttatgaaacacaggcttcgacagatttcttcaggtcaatgtacaaagagacgggttcgtcttggtacagccgatatgggacctgtggaaaagaaaacaaacggcccctatcaaaaagatacttaggaacaaccactgctgaaagagtcgcagacactaagcccgactggatttgtcactttgagatgaccattagagaaggaaatcaccataaaaccgtagcaaagaaaaagccatttgagtgacacacacaaacaaaaatgcagcagatatagcttaaggttatacatgagctaagtaatcttaacttggagtgacatatttctattagacctaaaagtttcctcaacatgttcaactaaaaacaggcaacaccacaaaatgcagcagctaagataaaagtaaagtaagtggagggttaccgaggatactcttgtgattcttcaaaccttcgtactcagtcaccagctcaggtaggagtctagcatacaagtcactccacagtttcttctgattcgcaatgtgggcatacctcatcgactccatttggttcctagagtacattatccgcaactgcttcccattcatttctccactgttacgaaagtcagaaactttggttgacgcattcctttcaacaatgctagaagcatttcccttatcaatcggtttctctactccaactttcttatgctttcttggtgcatccttatcagtgtgtgcagttactggtctcttagaatgatctttacctttcttgtagaaaggaacaacatcaaacaacgcagtatcatcaaccaaatcaatattcacagatcttccaacaaatgcattatccttaactctcactctttccaccttctcacgctgatctttagacccatttccattcttttcgatcttatggatatcagaagccctagcgagcgtgtccccatcattcttcttctcagtctcccaaagtatttgaacatcagaatcttgtcccttcttctgagagttcaaaatttctttcatatcagagatagaaccgacgcaatcatcctctatcttgtacacatcatctccaaattgatcactttctgtagaaatctcagagacttccttaatctgttgcagttccttattctcttcaagaaacgtggaaccatctccgatttcagcgaacaatattatcttctcagcctccacaatcctctgaccatcagaatcttgtcccttcttctccgagttcaaactttctttcatatcagagatagatacgacgaacccatcagtctcaacaacatcctttatcttgagcacatcatctccaagtcgatcgccttctgtagtagaaatctcagagctttccttaatctcttcaccaaccttattctcttcaagaatcgtggaaccattttcaggtacagagactactactactccaggacactccacattcatcgccacggtttcttcaagagtcgtttcggagaaagaaatgtcaatagaatccgaatggatgatttctccatccttctcaaaaacagaagtaaaaggcgaagactttacttgcttctttgggcttatcatctcttcaacagagtcgtcgttctcaaccggcggcaaagaaacgatctttagcgagtcttctgcaaattcatcccgagaaatcgaagttttccccgacccaatactttcaccggtatcaaatctcgtcgccatcacagagataaaaaagagagagcgagactgtgagactagagagagagagctttatgaagcgaaggcaaaagtctctcgagacgattatataagctgaaaccggttcagttaaaccgtagaagttagtattaaaccggtgatggctattgcaccaattaaagtagaggggtattatggtaatagcaaaagaaagagctcgaaagatacaaaccactcgcttctctcctcacgcgccttctcaaaattcgatcttctttcactgcacacaaagcgaagagacaaagaagagagagagagagagagagagagagagagagagagagagagagaaagtgggggaaaaaaggcgaagaatacgcagattccatccaatttagggttaggacttcccctaatttggaaacctagtcctgtttcctgatctgttttccggatcggacgagagacgaattaacgaaaatg

SEQ ID NO: 10349 - DNA, 3000 bp, Unknown
  misc_feature (1)..( 3000): cDNA_ID_2704167_gDNA_ID_2213643_Annot_ID_132335 3000 nt of promoter + ATG
ccacatcggtcatcggggtcagaccataataagtcacacatcggcccttcatggggcacttcttgaactcgatcaaaattccttatgttgtcaagggtctcgatagatggagataatccaccatgaaggcaaaatatttctgactcaacctgcagggaaaaaacataatgatttgatgattcccaaaaatttgtgtagaaaataccaacgatttagtcagataaggcatacatgaaatcttccatatataacagatctccattctttgcatttttcagaatactaacgtcttgcaattgatgtgacactagcaaaagaaatacgacagcacagtacaaaagtactactttggttccaaataatactgccagcacaagacaaagaactgatcatctatattaattgactaccggacgaggatagacttatatgtgaacccccactaacaaaaaaggaagaaaaatgtgagacatgtatgataggtactaaccaaggctgtcagaggaaaatagtcgaagaggtctgtaaagattttccaaacatttgcgttgccgtacctaaaaaggaaaacatggtttgttaaatttattgcaaaatctatatcccaaataagctgcaaactaggatgtgtaagattatacaacatagaacaatactataagcaagtaatcataagcccaaaggattaacagaaacaggaagtaaagaaagaaaagacaattttggacaggctaccatacacacatacaatgcaacagcaaaaatataaggacaatagtaatgctaataataattaaaaaaattgtttaaatgcattagaaaataaggattttttttccagtataaggattttttccaggagactcactttcgtagacattcatcataaaatccataaacctgagtaatctgcgagatggaagaaaaagaagaaaagcctgtgtcagattaaaatagtaatatgataaaaaaaatgtgcacaaaacgaattttgtagacaaaacagagacttataaaaaaggaaattgtgtgtcaaccaagatctcaacgatggaaaagactggatacacaatgaagtactgtatttaacatcagaaggtgaatttacaagtggaaccagagtaataaaatcataaagcattagtctacctgacgactttcatggtttcctctaagaatagtgattcgctgaggatatcgcatctttaaggcgactaacagctggaaagagaataagaaagagaaacagtatcagcatacttcatagtcacacccaaaatatatacattgtaaagaaaaaaatatccgtcaagttaatggtatcttgttaccaatataaaaagacaatgactggcttgccaatcagcctactcttaaatgaataaaaaaaggaagtctaaatatttcatcttcgtaccgtaacagtttcaacagaataataaccacggtccacatagtctcccataaacaggtaattggtatcagggcactgcaaaaaagagaaaattaatactttgtaagattggtagagctatttgtagagctctgtatattttatagatgttaccattccccctatacggaaaagctctgcaagatcatggaactgtccatgaatatcaccgcagattgtcacagggcttttcacaggctgcatgcaggaaatagaaagaactaataaattcatggctagtagcacaatctaccacactgaaaatagaatcaccaagtgtggtgaaagaaattgctcaaccaaagagatatgcaagaccaggaactaacctgaacattgctttcatccattaagatctccttggctttctcgcataatgctctaacctaaggaaaataaaacaatgctgcatatgattttcacctctttaacactctcaagacatgcagctaataaccactatcaaacacatgacatagaaatatatacttagagaaatcaacttgacacaggcaacaaacaggagcatcaattaagaaaaaaaaaaaaccaacaagtattgatcagctattgatacgaaaatattaaaaatttatcagtccataagaatcccgattgacattaccaggcacataaaaacacgagcttagatgtgattaatcactatgctaagaatccaaatcagccaaaatttaacatcaaaccatagaagcaaagccaattctccaacccatagaactgcggtgacaaatgagcttccgtgagaacatacatgccaagatctaataacatttcctgaagatgttcatttagaaaaaaaaaaaaaaatcgaaactttccaaatcaaatctgataatctcgtacccaaagaaacctcaaacacagaaaaaaataccactccactcaaaaaaacaaaaaaaacagatccaatcatcgataaaaacaaagtagagaaaacgtcaagggctaaggtctaaagagaaagttgtaggcacctgttgctccgagagaggcttgcactgcatgagctgcgagatctgctcatcaagatcaatggttgcgtccgtcggaatagaattcgcgcccattttcgttaattcgtctctcgtccgatccggaaaacagatcaggaaacaggactaggtttccaaattaggggaagtcctaaccctaaattggatggaatctgcgtattcttcgccttttttcccccactttctctctctctctctctctctctctctctctctctctctctctcttctttgtctcttcgctttgtgtgcagtgaaagaagatcgaattttgagaaggcgcgtgaggagagaagcgagtggtttgtatctttcgagctctttcttttgctattaccataatacccctctactttaattggtgcaatagccatcaccggtttaatactaacttctacggtttaactgaaccggtttcagcttatataatcgtctcgagagacttttgccttcgcttcataaagctctctctctctagtctcacagtctcgctctctcttttttatctctgtg

SEQ ID NO: 10350 - DNA, 3000 bp, Unknown
  misc_feature (1)..( 3000): cDNA_ID_2708714_gDNA_ID_2213644_Annot_ID_132336 3000 nt of promoter + ATG
cgactacagctccatgagacattctgatggaccttacggcgagaatatcgccgcgggatgggtccaacctaaggaccaaatgagcggtccgatagcggcaaagtattggttgacggagaagccaaactacgatcatgcgaccaacaaatgcaaagatgtttgcggacactacactcagatggtggccaatcaatcgttaagtctcggatgtggctcgttcaggtgtcatgagaatgagttgatttatattgtatgtaactattatcctatgccagtgggtgatgagaatacccgtccttattgattatattgatgcaaagaaatgatccatatggtaatgtgatttgacaattattaatatgttaagttactgatcaatatatatgtataagaatataaaaccaagtttatgatatacattggtttgtataagttgctgctgtgaaatgattcagaataaaatgtgatgttcaattggttaaacaaattgtgattacatatatttgatataataatatatgaactttttgttatagatgatttataatattttcgtaaattatattcggagttattttcctttgtatttagtccgttggtatctagagcaattgtgaaaatgagtagctaagacatgaaaaattgtgcatttagataatgatggtttatgtttctttttgaagagcatgcccaatcaatatacaaatagacacagctctactgctctagcagaaaatatggagcaaatttctgtcttggggagctttatgctgcggttaaagcggctatgagactctaagcatcctagtagagtagataacgaattctatagactatatagcgtgtggacatcaacatgtctttaactttaaaatgattaaaagttgtctaatgggtcggtttaatagcttatcatcttccttattttaacttctaagtactagagttaaaggaatcaaatgatgcgtatgctttaacttttcaagaaacacaatgatgcatagttttaagacactgtaactgtaagtgcaaatgaaccaaaaatgatgctttaacacgacgttgagttttggggaatcatttcatctgacatatatgggaggacatgttttgtttgtatatcgaaattcggaaaatgtatggctaagtgggaatattggatatcacataacttattagaatcagaagagattgcaaatttgtccaagaagcatatatcaagacactgtaagcgcaactctgaaaatttcattgttgatcaaaaatacaatatagtatgtggcaactggcaagtcatacaatcacatttgatcgtactagtgagcagagccatgccaaggttaatggttgacggaggcggtcaaaattttttttctccaactaaaaaaaacgatgcttataataatagaagtaaaaatgtctacaaagataaattgtcatatgacgaaaatacgaaaaaaaacaaaacataaaaatagttctaaagcgtaattcttcttcctttcttcccaacaaaatcattagccaaacgttcaaagtcaacttctctaaccaatgctctttcgatagataagatcgccaagtcacttaacctttcttgtgacatactcgaacgaagataagattttatcaatttcagctttgaaaaacttctttccgcagatgcaaccgaaactggaattgtcaacaatacttgataagcaatccatgaattaggataacaaccttcaactttttgcaagaagtctaacacttcaataggcctcctaacttccttgggtaaagcttctcttagaatttttagttcataaaagagatcactagcaagaatatctgaatgtgttccatgagttaaagcatctttaaggttggtacaagatgccatcaaactatcatcactcgccgactgcaactttttcaaatcaaacaaaaacccaaatatttgttcatacctttggaattgttcgaatcttgtctcaagcgagtaaagagcttgatccatgatttggatgaagtagtcaattctgtaaatttcgaacataagtgttacaaaatttctgattctaatttgggggaaaactacaacatgtataattaagaattacatcaaaccataggatagaacaaggataaataaagtatcaaacttactctaacgagtcaatgttaatacgttcaaggctcaagagtaacaggattagaaaaagtcttgtggaaagagacggcgattaaaaaataaaggaagaggattctctaacctaacttaataatgctttgttctgtttgtttccttattctttggatttttttttatttttattttattttcttattatttagataaatgcaaatgatctgtaatattggtctattaaactaagagtatcttatagaaaaatatgcttctaagttttttttcaaaaattttggacgtaagcgaaggtttctttcttatgccttgaggcacggctctgctagtgagttatagtttcaatgaccaaggagttccatgcgatacacaatgcaccaaatttggtgtgaagaagtaaacgtaacttatcaattgttcgaatttctgtggattttatgcaatcagtattcgtaaagtaacttggttttataagtctgttctcaatttccatggcatcaaaagaaaacgtttagtctgtttacttcgttatctcataatccaaattcaacggccacgatcagctagactactgtaaatcaggtggtcgtgacagcacaagatcaacgatctgagttcttccttcttcgctcatatgctaaattctgattgaaacatctgacgaattcgttcttcccctttctaatttgattctccttggaacaaacaagctctgttacagagatcagagtcgaatccgtaacaccattgttgattctctaaagcatctactgatttcaatcgtgaaattagccggtggtgcatggaagctcctttagcggagagttagtttcaattttgattcatcaatg

SEQ ID NO: 10351 - DNA, 3000 bp, Unknown
  misc_feature (1)..( 3000): cDNA_ID_2704766_gDNA_ID_2213644_Annot_ID_132339 3000 nt of promoter + ATG
tgttttctagttaaagaaagtacatacaaaagtgccttctaacccatgttatatgaacttgtatatgtcaagggtaaactatatcttaatctagtttgtctgtgggatcaaatcttaatttatagatgctcttgaaatcactttttcttgtacgtcgaagaacaattgatttttgtaaaacatacactttggaaatgcatatgcattcgaattgaaccattgcttttgtttgctattgtcaatctaaagtgtgaaaagcttggagattgtaaagttgacgctaaaactgtaattttgtattgagttatggtcttattgaatgagatgtattattgatagtgatattctgtttatatacaagagtaatcggaggactaattagatcaattagatgagttttcttgatctgtagaatatcaagtttccttattctatcaatttcttgtcctggatttacactatgtaaagagtttttcaacattaggaaagtgaaaagaataagatataaaacgttccaaactccgtaaccccaccaaagcaacttctataaatacgttagccaagaaaatgctttcttttacgacacaataagttccaaaacaattaaccacacaaatacaaaatgaatgaaatgtcgttctttggttatagtttcatcgtagtagcattattcttcgatttaactcaagcctatcgtcacactcccgctcaaccgccaaaagcaaacgcaaacggtgatgtcaaaccgcaagaaacgctcgtggttcacaacaaggcccgagccatggtcggagtcggaccaatggtgtggaacgaaactcttgcgacctatgcacagagctacgcacatgaacgagccagagactgtgccatgaagcattccttgggaccattcggcgagaatctagccgcgggttggggaacgatgagcggtccggtagcaactgagtattggatgacggagaaggaaaattacgattatgatagtaacacgtgtggtggtgatggtgtgtgtggacactacactcagatcgtgtggcgtgactcggttcgacttggttgtgcctccgtgagatgtaagaatgatgagtatatttgggtgatttgtagctatgatcctccggggaattacatcggtcaacgtccatattagtgattggattttattatactgaatcaacaagattactatatatggtaattaatgtgatttaagaaaaattcatactataacattttgtgtccttaaatgataaaagcatatataaatgcacactagtttttttaccatcaatgtgagatatgtttccatgatatatcaaagttgttgatttgattataatcgacttcagaattcttacaaattttttctttcatttcgctctacagcaaaagaaaacatggacagtttaagattgaataacagaaaaaccctagaacaaaatagaacattttcaaaatatgtgaaatatctttaatacagtatatagcactttaattcaatatacaaaacatataagatttaaagttttttttttttgccaaactttaaagttgaatttttattaataatatttttagaaaaggaaagaaaagaatttccatataaagacagtttcaaaagttgaatctcgtgttgggagatttaaaggaccctcctaaagagctatattggacttctaaacgataccactactttcctaaagttgttgttttgtttgattaacccaaaactctaagagaatatttctttctcggtgggtggaaatatcgttaccctacatttatctcaaccatgaataatcaatctcaccgacattgagtatctacttatgaatcgagttatatatagttcacgtgcgtagtatgtttctctttactgagtttattaaattgatcaaaaccatattgttagaggtatttatcggtttcggttaagattgttctttattattacaaagcgttgtacgttttctcacgggtgtgctaaaagttccaattcgttagagaacgtacttaaactcgtaatttttttttatttttttttcttgattatcttccactccaaatccaaaggaaagatcgatataagttcaattacgtaagaagtttttaggcataaggtttaattcgagtccgtgactgacaaattgtttcttttttttatatatactattttatcaaatatttactatttatttaatatataaacatacatgtcaaagaccaatcagatccagtcaattactagaacattttttttttggtctaatgttaaattcagttactagaaaccatttgactactaagcatatttttttactctacattacaaaatattatcccacaatgatcttcagaaatggtttacatacgtcgaacaaatatcacgggtgttaaatgaaactcacgagagttaatagagattatatatatacgcgtacgtaactaagaagactaatcaaaattccgattggagattaacgaacgtttttcactttgactttcttaattaattaattatttaccagaatttcgttaaaggatttgtaaggaaacatctaattagtgtgtctcagagagcaaaattcttcttaatacgaaaatagtgtctaaaaatagatttctgttactgaacaatctttatgggaatacattagtgatgaagtagaatattttttttagtgataacttaatgataaatatcttttgttactctaaaattagaatctcatcctaatttctgttaatttaagcaatttcgaagagcaatatataggttttactatttgataatttaacaaaaagaaaaacaacttcgtcttctttttttggtttaatggtgaatattgaaaacttaaaaatagtcacgaagctcttgttttgtttgaggcttacaaaaggagatgaaaacccatcagaaaaggaatctgataagtcctcacgaaaacatagttagttccaaaccaattctacaacaaaaacaaaagagagaaaatg

SEQ ID NO: 10352 - DNA, 3000 bp, Unknown
  misc_feature (1)..( 3000): cDNA_ID_3036089_gDNA_ID_2213644_Annot_ID_132341 3000 nt of promoter + ATG
gcttcacaattcaagactctgctgccgtagaagaggatttcaagtttctatgcgatcttttctggtcaaacggagacggattgcctttggatttgatcgagaaggtttcgacgactgtcaagagtatacttccgctgctgcgcacggatacagattctttgattgaacggtttaaagcagtgtgtctggagaatcatggttctgacagagggaagcttccgttaccgccgacttctggtccgtggagtccgacagaaccaaacacacttttaagagtattgtgttaccgttacgatgaacctgcgactaagtttctgaaaaagacctataacttgccgaggaagctaacctgagagtgacctacttactacattggtacaaaacccggtttagtttgaagtgtggaatatattttggttaaagcggctagcgattggtatttggcaaattaaattacttgtacaagaaagtagaaacgttttagtgaaatattcttcttttgtactaatcaaaagcttgtgggctttgttatatgttgtcaactgttataaatttgtatatttaatacctttgtttttcatctttctttttcaaatttatcagatttctgattgataattcaagattgcaacgatggttcatgaaatggtcctttaaaaactcataatgtttatgtgatggataacatcagatatatgatgatatggttgaaacttgaagtattctaacttgaagtcatgattcatgatccgtttaacaacgtttgaaatgagtatcagaaaatgattatcgtagatatgaaacttttcctgcagacacgttctagtattttgctaaaataatagtttgttgcttattcaaccaaacaaaaacacttgttcaagtagcgcaatatcttcgatagttcgattcattattatgatacccttcttcgacttctttgatttcctcgagttcttctccatacgtcacatgactcacatcgtcagcgatttcatggcaatgttacatgtggtggacgacatggagtatccgcgaccgcgagatgatcttgaagaggtgtttgctttatgaatgacgatgaatcggctctgttttcctgtttccaacggttgtaatcacaccatcatcgttgtcttcatctatactaatattcaaatggtcaattataaagcccaataagctaactaagcccaaaaatgaaaacacacggactcagcccatacaaattttaacacttaaggctaatgggtctgtcacgtgcggaatagactgaaaacagagcatcgcacgtgccgcatcaaaatttgaaatcacgacgacttcaaaaaaatcccaaatggtaagaaaaaaataaaaagttgcagaaaaaacagaaaaccctcttttctctctcttctctctctctcgaggaagaaaggcaacaactatggaagctatgcttgtggactgtgtaaacaacagtcttcgtcattttgtctacaaaaatgctattttcatgtgcgagcgtctctgcgctgagtttccttctgaggtaatcaccctcttctttcactctctctctctgattttacctctctaattcaaattctgtaaatcgaagctcttggaatggtaaatttgatatttttgggtttgtaattcctctgggtatctatgaattcgtcgaaagtgcgtctctttttggatttggaattcgatagcttcactgtgttcttcgagattgattttggtttcttaccttttagccctttgttttcaagatccgtgtgttcaattaggagatgaattcgtgttcttttctctctcttgttgaatttgttttctctagtagctgtgctcaatgctcattactgatttggtctttggaaaatttgcattttgagggttaatgacttttgtccatatatgtgatctcaagtttaagtatttattatccttggaacttagctatgagtcaactgttagaggaatgtctctgggattatctcaagctttgttaaaatttgggttaatacagcttcaatagtagttgagaaagtattcattcattcagcctttggtctggaatattttcaacattcgtagtggttgtccagtttctagcttcagttagtagaaatcatgtcaataaatgattggcctttttgtttgatcactttctgaattttcctcttatataggttaatttgcagctattagccaccagctacctgcagaataatcaagcttacagtgcatatcatctgctaaagggtgcgtggcattgtttcttgacttgttgcttgttagccttttagtcagaattttgcaccttcttttgttaggtcgttttgattatctttgtatatatattttttttttgttatgtaaaggaacacaaatggctcagtcccgatacttgttcgcattatcatgcttccagatggaccttctcaatgaagctgaatctgcactctgccctgttaatgaacctggtgcggaggtatttaatgttctctggtattttgcctttattcgcttactgaatgtcattttacaaaaacagtgtgtcagtttctggaccttatttattgatttagttcagtgaagataacaacatgcttctgattattgtgcagatcccaaatggtgcagcaggccattaccttcttggacttatttacaagtacgttttttgttctgtctatgcattttttcttgattctgaatggcttagatgagatgattcctcatatataacagtgaccttttaggtatactgatagaaggaagaatgctgctcaacaatttaaacagtccttgacaatagaccctctactttgggctgcatatgaggaattatgtatattaggtgaacataatccgttttctgcatacttcacagatatgttatggttctcttacacttttctgtctgctcaactttcaggtgctgctgaggaagcaactgcagtttttggtgaaacagctgctctctccattcaaaagcagtatatg

SEQ ID NO: 10353 - DNA, 3000 bp, Unknown
  misc_feature (1)..( 3000): cDNA_ID_2704774_gDNA_ID_2213644_Annot_ID_132342 3000 nt of promoter + ATG
tatttatattaaaattatctgaaattgatttttttatatatagtcattagaacaaattcgtttatacataagataataagtatttacgagcccaaactttcttagctaaacaattttaataaatgttatttgcacttatgaacaattgtgtttatttgacgtaactttgtgttaaaatattaatgatttttttttgtttttttatcgcacatttatgtattggcagttatttttttgtgtttcaattttgtttggtggatcggttttgttcggaggagatgacgacatattttttgctacttttggaatctctttttgtttcatatacaataaggagaaataataggtgggactatacagagatattaacgaaatgaccggaatcgttgccgtgtataaactaaccagaatcattgtcgtgtagaaactgaccagaatcgttgccgtgtagaagaatcgcagaatatttcctcctcctctcagtctctgcggcatcgtttcgttaaagttgacagacggaggagaacatcaatagaagaacaaaaatcttcaaactatcgtcgattaaaagcaaatcgaagattagataaacaataatttgaagatttcgatgaaacatgtaaatatggtaaacaatatcattaaccaaaatgcatatttttcatagatttttattttctccctaattattttttggtaaaaatttatatgaatccttgctttttgattttcttaattatcaagacagtaaaattgtcacttaacaaatttgatctacagatcactttcatcaatttggttttaaaaacagtggtaaaaaatattgatgatgcaatgtctacatatatgttcatttgtcttttagaagttgttttattctttataaggaatttgaaaaagattatacaactcatcgagagacttcacgagttgaatcttttcagttttcaatattatgatctcatgtaaattcctccccgatgtaattttttctttcatccccatgtgttttctagacttacaggagatttgttccaagcacgtaaacacaattggcaaaaacaggttcggtcactaggccaaatgcagattcttttactagttggctttagggacctagttcgaatacgaaatctgatatcaaaaaatagttttggtgattcatatataatataataagtactactgtttacgtaaaattgaagaattcaaatgatctcattcaatccaatgattatattttgtcttgtataattctttaattatggttatttgaaaatgaaggaacaaatatattgattagaagaataattaaacaatggtcaacaacggcctcaccacatgataatattaaagaatatctcgtagtacttgaccaaaaaaaataaaaatagcttaaatgtatttagttgaatcggtacttggtattgccgtgtgtgggaaagaaatgttgtcaatgctaaataaatttgccgtgtgaaaaattcaatcaatatgaactctagaacccataatggtagaaagtcttcgactcttggcagagaacaaaacaactattgaaattgtcttcaaataacaacattatcgaaaacttttcaactctagatctagtaacatccaaaggatatgatgctacataggtcttctagttcgaatcacaaagcttgctccaaatcacaaacttacgcatctcagtctccaacttagcggattaacaaaaacttaatttataggtcaaatatcaatttgcaattaaatgaaaacatatttgatctcttccaaatttgagttaattttgatttcccattataacatttagacattaatgagggctggacaaaatattcgttcgatccgcttcgattcggtattcgatttgatttgattcgaaaaattcgaatatccgtaagattttggaccaaatcaaatagaaaaatgtagtattcgtaaaaaccgaagcaaataacaaataatgtttttaagataatcgaatatccgcttcgatccgtatctatcgatatatatttaaatatatagttatatctatatatagatatcataaatagtttatgtattgttgctatcttatatttttatgttaaaatatttatttgatcatttttctctcatgttatatcttgatcaataacatcttaaactatcgggttttagtttttggaattagtttgataacattttgttgaccggtgataataacaacggttatgtttggtatttagaacttattttgtaagcatgttaaataataactttaaatatattatatggttatatagtttacaaatttttttaatatttatatgtatcaaagcggatatccgcaaatatcacaaaaaaatccggatattcgaaatttcggatatctagaaattttcgaatcaaagcaaataacaaaattaagtattcggttaaaacgaatcgaataacaaatatcacaatttttctggatatccgcttggtgcccagacatattcacaatccctaatctctcttctactattgattaaattttcttctcctgaaaaatatacaaataaaataaaaacatgtgcatttggtaccaaagacaacacctttctcaagtcttctctttcatttttttgttgtcgccgtctggttttactttttttctttcttcaaaatcattcattctttaacatcaagcaagaatcaaattctgggcatactcaaattcttcatctttttaatatatatttttgccaagaacaagtcttttactttatctctgcagtttttgtttgctcctttgtgcatttggtgatgattcaatcaatgattgtctcttacctttgatctaatcgtttccgcaaaattctcttctcgttttttctgatttcaagctcaacaatctcaaaataatcaatttttggtagtgtgttaaatctgagaagggtttttgggttttgggtataaagcttgttactttgatctttattttgtgaattcgaagtggaaatg

SEQ ID NO: 10354 - DNA, 3000 bp, Unknown
  misc_feature (1)..( 3000): cDNA_ID_2704778_gDNA_ID_2213644_Annot_ID_132343 3000 nt of promoter + ATG
aagaatttgagtatgcccagaatttgattcttgcttgatgttaaagaatgaatgattttgaagaaagaaaaaaagtaaaaccagacggcgacaacaaaaaaatgaaagagaagacttgagaaaggtgttgtctttggtaccaaatgcacatgtttttattttatttgtatatttttcaggagaagaaaatttaatcaatagtagaagagagattagggattgtgaatatgtctgggcaccaagcggatatccagaaaaattgtgatatttgttattcgattcgttttaaccgaatacttaattttgttatttgctttgattcgaaaatttctagatatccgaaatttcgaatatccggatttttttgtgatatttgcggatatccgctttgatacatataaatattaaaaaaatttgtaaactatataaccatataatatatttaaagttattatttaacatgcttacaaaataagttctaaataccaaacataaccgttgttattatcaccggtcaacaaaatgttatcaaactaattccaaaaactaaaacccgatagtttaagatgttattgatcaagatataacatgagagaaaaatgatcaaataaatattttaacataaaaatataagatagcaacaatacataaactatttatgatatctatatatagatataactatatatttaaatatatatcgatagatacggatcgaagcggatattcgattatcttaaaaacattatttgttatttgcttcggtttttacgaatactacatttttctatttgatttggtccaaaatcttacggatattcgaatttttcgaatcaaatcaaatcgaataccgaatcgaagcggatcgaacgaatattttgtccagccctcattaatgtctaaatgttataatgggaaatcaaaattaactcaaatttggaagagatcaaatatgttttcatttaattgcaaattgatatttgacctataaattaagtttttgttaatccgctaagttggagactgagatgcgtaagtttgtgatttggagcaagctttgtgattcgaactagaagacctatgtagcatcatatcctttggatgttactagatctagagttgaaaagttttcgataatgttgttatttgaagacaatttcaatagttgttttgttctctgccaagagtcgaagactttctaccattatgggttctagagttcatattgattgaatttttcacacggcaaatttatttagcattgacaacatttctttcccacacacggcaataccaagtaccgattcaactaaatacatttaagctatttttattttttttggtcaagtactacgagatattctttaatattatcatgtggtgaggccgttgttgaccattgtttaattattcttctaatcaatatatttgttccttcattttcaaataaccataattaaagaattatacaagacaaaatataatcattggattgaatgagatcatttgaattcttcaattttacgtaaacagtagtacttattatattatatatgaatcaccaaaactattttttgatatcagatttcgtattcgaactaggtccctaaagccaactagtaaaagaatctgcatttggcctagtgaccgaacctgtttttgccaattgtgtttacgtgcttggaacaaatctcctgtaagtctagaaaacacatggggatgaaagaaaaaattacatcggggaggaatttacatgagatcataatattgaaaactgaaaagattcaactcgtgaagtctctcgatgagttgtataatctttttcaaattccttataaagaataaaacaacttctaaaagacaaatgaacatatatgtagacattgcatcatcaatattttttaccactgtttttaaaaccaaattgatgaaagtgatctgtagatcaaatttgttaagtgacaattttactgtcttgataattaagaaaatcaaaaagcaaggattcatataaatttttaccaaaaaataattagggagaaaataaaaatctatgaaaaatatgcattttggttaatgatattgtttaccatatttacatgtttcatcgaaatcttcaaattattgtttatctaatcttcgatttgcttttaatcgacgatagtttgaagatttttgttcttctattgatgttctcctccgtctgtcaactttaacgaaacgatgccgcagagactgagaggaggaggaaatattctgcgattcttctacacggcaacgattctggtcagtttctacacgacaatgattctggttagtttatacacggcaacgattccggtcatttcgttaatatctctgtatagtcccacctattatttctccttattgtatatgaaacaaaaagagattccaaaagtagcaaaaaatatgtcgtcatctcctccgaacaaaaccgatccaccaaacaaaattgaaacacaaaaaaataactgccaatacataaatgtgcgataaaaaaacaaaaaaaaatcattaatattttaacacaaagttacgtcaaataaacacaattgttcataagtgcaaataacatttattaaaattgtttagctaagaaagtttgggctcgtaaatacttattatcttatgtataaacgaatttgttctaatgactatatataaaaaaatcaatttcagataattttaatataaatagtattgccaaaaaaaaaaaaaaactgtaaagtttctcatgtaaatatttttcctccgctaccaatgggctttaaaccaggctgattgtcttacgaagtcagctaataatggggtttgaaaacaaatgggctttaaaacaggtgggcttatgcgacccattatgtttgtttttctcacaaattcgtccccatagtttcaatcctcctccacaccaagtcaccaactgtggatgagtctctctaaaaccttggcttccttcgacttcttctgttttctccggca

SEQ ID NO: 10355 - DNA, 3000 bp, Unknown
  misc_feature (1)..( 3000): cDNA_ID_3036081_gDNA_ID_2213644_Annot_ID_132345 3000 nt of promoter + ATG
atgggtcaagggttgtcaaggttccgtcttgtaactatgaattgagatgctcgtttttgtctcaaagagggtattatcctgatgctcttgataaggccaatcaagatagtttcgctattcatactccttttgggagtaattcggatgatcatttctttggggtttttgatgggcatggtgagtttggtgctcagtgttctcagtttgtgaagcggaggttgtgtgagaatcttcttagacatggtaggtttcgtgtggatcctgctgaggcttgtaattcggctttcttgaccacgaattctcagttacatgctgatttggtagatgatagtatgagtgggactactgcgattacggttatggttagaggaaggacgatatatgtggcgaatgcaggtgattccagggcggttttagctgagaagagggatggtgatcttgtagctgttgatttgtctattgaccagactccttttagacctgatgagcttgaaagggttaagctttgtggtgctagagttcttactcttgatcagattgaaggcttgaaaaatcctgatgttcagtgttggggtactgaggaagatgatgatggagaccctccgagactttgggtgcctaatggaatgtatcctggaactgcttttaccaggagtattggtgattctattgcagagacaattggtgttgttgctaaccctgagattgctgttgttgagctcacaccggataatcctttctttgtggttgctagtgatggcgtatttgagttcatctctagtcaaacggtggttgacatggtaaggtattcttccctccgcagtcttgtttcatcacagttccctaagtagaggaagaagtctcacaaaatttgaatgtattctttttcaggttgcaaaacataaggatcctcgagatgcttgtgctgcaattgttgctgaatcatataggctatggctacagtatgaaactcggacagatgatataacaatcatcgtcgtgcacattgatggactaaaagatgtaaagaaagcttttggttgttgactgtatatcatcttttcttgtgtttgttaatggctgaggttagatattgaatattttgtaggatgctcctcggcaattgtcgagtacaggaactcaattgcagcctcctattccacaagttgtggagcttacaggttcggaatctccttccacctttggatggaactctaaaaatcaacgtgtgaggcatgatctatctcgagctaggatacgtgccattgagaattcactagagaatggacatgcttgggttcctccatctccagcccacagaaaaacctgggaagaagaagtaagagtgcttgtctgcttcgtatttgctcaaccaatcaggaatgcctcaagtcattcttatattcgaaggctaaatgctggattttctcgtgcaggcacacattgagcgggtgttgcgtgaccatttcctcttcaggaaactcactgattctcagtgccaggttttgttggactgcatgcaaaggcttgaagctaatccaggggatattgttgtgaaacaggtcgaagcatattcctccttgttgcagattctccaacatagattcatcaataaacatatgatatcataatctctctggcttattcttttgcagggtggtgaaggggactgcttctacgttgtgggtagtggagaattcgaggtcttagcaactcaggtttgttctatagtaactcgatttgacttgtgaccagctttgagcattatgatcatgtgcttaaccggggtgaatgttaggatggaaagaacggtgaggtacctaggatcttgcagcgttatacagctgagaaacaatcatcattcggtgaactcgccttaatgtgggttctctgcacttttacttttagaaataatcttcttcaggtgaagacgtactctctgtctaattgagtttcttgtgatatttgatggtgccaggcataacaagccgcttcaggcttctgtacgtgctgtagatcacggaacattgtgggccttaaaaagagaagattttcgaggaattttgatgtctgagttttcaaacttagcatccttgaagcttcttcgttctgtcgatcttctttcccgtcttacaattttgcaactaagccatgttgcagagtctctttccgaagcttgcttttctgatggacaaacaattgttaccaaggtgaagttaattttgctttttgtaaagactaaataactctactccaagagattctttcttacacgtttctgtgcatgtataggaccaaaaacttcagggcctgtatgttatccagaagggacgcgtaaaaatatctttctgtacagaggtgttggagagtcaaaatgtttcaagccttacaactggaatcactaacgagtatgacaatcttgaaatcggaacagaagtctccatagaaaagcatgaaggaagttactttggtgaatgggctcttcttggcgaactcaaagattccttaagtgtggttgcagttggcgaagtggtttgtgtggttttaacaaaagaaaatttcgagtcagcggtcggccctctgaccaatatttcagatgacggtcccaagtatggcattcttcatgcttgtatttgtttatttttgtggttatcgttgactgattccatataatgtttttttttcaggacaagacattcttcattcgagctgtcaaaggaatctgcaaaagttaccgataccacagctcttgctaaagccactcttgcagacctggtaagcaatcttactctacatcaatcttaaaacggtgctcctcaacttacactattttggtttatccaggaatggacaacatgcttgagtacaacagactgtagtgagattgggctcgtgcatttgaaagataaagaaaatttgctcagcttgaaaagattttcaaagcaaaaggtgaaaaagttaggtaaagaggcacaagtattgaaagagcggaatctgatg

SEQ ID NO: 10356 - DNA, 3000 bp, Unknown
  misc_feature (1)..( 3000): cDNA_ID_3036055_gDNA_ID_2213644_Annot_ID_181394 3000 nt of promoter + ATG
caagtagacaataactttctaagaatttatgttattatcactaatcaacaatttaattattcaaatattaacacagtcaccgagagtacgtacttcagacggtgagaaaccaaaatgagtttctaaataataatataaattaaatattttcataaattaaattatcaatttttttttgatgaaaaagatagacaattatagacacataatgtctcaagagttttttgtgagttattcaaataagagacaaaaattttagaatttctcacttttctctcttatttttttttatattttattagtaattaagagactcccattaaatatgttctctcttaatgtctcattgtttcagttcctacttcctacaaaatcataatttggtaaagaaaaaaagctacatacaattgcataagcatatgtagtctataagacgagatatatatgataattttcggaatattattacttagcattttgtttaaatataaccacaatcaggctttaatttcagtttttgtcttgtcatttgcatctaacataaaatattatattttactctaaagaacaaaaacgcaaatcattattattcaatcaaaattttttacgacttttttatcaggagataatatttttttctattttgcgttttgtttaatttaaagtaactttgatggtaaatcaaaatatattttagataggtacaaatcattttagcggacaaaaaaaatgtacaacagcaagagggtgatttagcaacaaaatttagcttgaaaaaattgatgtttatagattatgtctaaatctgaataaaagaataaataattaagtttgatagatcatgcaagagggtggtttagcaacaaaaataaacatattaccctgtctcataaatcattgagattatcaataaaaaaaacacccaatttctgtcttaatattgtccccaccaatgtgagtccatatctgattctctgtttctttcttccctacttggaattatataaaaatatgtatatacatattaatgtgtatatatatatatatatgtgcgtgttcccatatcaatgataaatgctctttatcaaaaggtaaaatgattataaaaaaaaataagttgtttcattttatttgttgttttcaatgcaaaatttattattattttattatttttgattcttgaaattctgcaactttttattggttaaattattttaaaatatgtaattaaacatatttttaaaatttaagaaaacagaaactaaatgatcttaatcaatgtaccaaaatcttaaactagaacaaaatagaaacaaaagaagtattatagaagaaattaacactttgttcactaacttgactactataaatgattataaattaacactttatgtagcattcgacttttctgtttatagaagaggagactcacttaagtctttaatatcatgtttgcatatgttgtagtcttttgtttttaacatctttggattgacatggtctattctatagccaatatctattatgcaagataacacgatttagtggagtcaaactctggtggaaaaagcggaatcaaatggatttaaccacaagactaaaggaatatttcctgcaagatatatgtagtcttaaatctataatttagcgatataaaaaaggacaatttttaaatatgatacttaagtttttgtttatttctttaaaaataccacttaatgtttggtttcttaaaataacataaaacttaaatttaacttccaacattcaaaattaaactctaaactttaaacactaaaccctaacccctaaaaacaatatcttaaaattaaaatggtcaattcaaacttaatttttttaattctgatgaactcttgaaaatcaaaattgaagtataatatttttggaaaacaaaacttttggtggtattttgacaacacaacttgaaagtgtgatattttgctacaatactcctctagaattcgaggctcccttaaaacaaaatattattttcgtgtcagtcatatttttttgagacatttctcaaaataccacattttcaagtcttattgctaaaataccatttcatccggtattcgatcttctatcaaaagaaaattatattcatgtaggatgtctaggtttggtccagacaagttaaatggtaatctggtaacatgcgattcagttatgtttaagtgttaatcagttaatattctaaactcggaataaatgtgtgatgatccttgaatataaatttattttgtaatacttaaatatatttttaccaaaattaaccggatcattggataaagtttataaaataatttttttttgatgataatgccatgaaaacaatttatagtacggatgagaaacaatgaggctgattattttatctccgtcagctacaaatgatctcagacattttgtttttatgttcaacttggttttttattcagaggttaaaaaatgggcacaagtttctattcagacacatacacacataaataaaatagagaattcactgttaaagttagttgacacaatagtaaatgcgatacatgctagagtcacggaagaggcaaaaacaaactccaaagagagacatataagaaaaagacaaaaacccttaagaagcttatcacattcttaaagcacgaaaattcagaataagattcagtcatcctttagcacaaaaaaaaaaaaaaaaagatccagtcatccaatactagttccccagaaataaaggtgatatatttttttttttgagaagcctatccagtaccaacctcaattctctaggttagatatagtctgggtagtatatatgtttcttcactgattagtaatctctgtgtgtagtacacttactcactagtgctactcttttggatctttctggggtttttcttttggttataaaaccagaagaagaagataactgtttgttattttaatacttaccattatcatcatctttgtagagagagagatatg

SEQ ID NO: 10357 - DNA, 3000 bp, Unknown
  misc_feature (1)..( 3000): cDNA_ID_3036059_gDNA_ID_2213644_Annot_ID_181391 3000 nt of promoter + ATG
tcaaaacaattccatcatatttaagcaaaaaataactaattatagtatatgttttaaatgatttatactgtaatatttattattgtcatttttgtttgttacatacgtcttcgaattatcacattaaaagagaaaattattctaacgattatatattttcccaagactgcacccaatgttaaatctgatatggaaaataattttcttacaactttcagatttattttaaatataaaagttaagcaaaaactataatatatatatatttgagatttctatatgagataaagttctaaaataaattaaagtttacaaaggcagagaaatgaagattcataattaggtcaggtgctaagcacaatcctcctctaagaaaattttggtcgatacatttttagctgcagtattttatttcaccataagaattagtaacatgttggaaacaaaacgtacctgagatcaaaagaagagctagacagagaaatgttagaccatttttttcttcgatcaacaatgtctctctatatataccacattttatactattccctaatatgtaaaacgatattgccatttgtcatgtgattattattagggtgggattatctttgattatctttttgttataaagtcaatgcgacagtaatatgaaagacacaaggacgcggatacaaattataatctataagaaaagaaaaaaaattatttttaaaagggctaaaagaaaacaaggttattcaaataatattgacaaattacacttctcgacaaatttttctgtgttttttggtttctctattcgctcagattttgtgaaacgtctcttctgattttttattttttcctatcgatcggccaaaggtttttgaatagtcactttaagattcatttccaatcgaggccaaaggtttatcaagagtcgatagaatctgcggcattgacattcccccggaaacaacaatctctgcagatgaagaatgagtatacagtgttcagtatctttccacaaaataatttgaatgctatataacaaacgataaatgtatctagtatagacaattagattctgaaatctcaccaattccttcccggacagagaggtttggcctgataacgtcattactgttgacaagtagtatatctccaatgtaaaggtggttcgtgggaacgtatacacagcaaagttcctcctcggttgggtagttctgcaagaacgaatagcattattacattgggtaaaaagattacgaaattatggtaaaccatataactcgaaattgtttgtatcctcaaggagacgttctggaaagaataacaaaatccttgagcaaagtattttcactcacctggagaacaacagttgatgtaatgaagccaaatgcatattcacctacacggggatgcctgatgattgcaacttccttgaaagcttgtgtattttgatctgtgatgagaaatggataagaacaagatgagataggagatcaacttaatgttgagaagcaaaacaagatttttataagcaagctagaccaggcgatatggcagtgctgatttgcttggaggcgttgtagatgtgacgaacaaatggcatccgcttgataaaccactctcccaagttcagaaccgatgcccccaaccacgaagacatgaacaccccaaccaagaagatgaatgcaatggaagtcaaaaaaccgaaacctacaaaacaataatcaaactcattgtgggaaaccgatatcaagttgttaataggataaagaggggccattcaaattcttaccaaatatgttgattccaagtagtgcatatattggagagaagaatccatcgacaaagtgaataaaccaccatgttgtatagaaagtaactgcaataggaagtaggataacactgcaaaaagcaatggagacttaaaactaatctgtggaagttttcatcaaatgccaaaatttcaactcttccttaccagcctgtcatgaacttctttgacgcccaacccctaatgaacaagcttaaagtctgcagaaaagagctaaagcatcaggccacaatgctctataagttatacatgcttgaaaacatgaatgagcataatacaaagactcaagaatctgaatgattccaaccacaacaacttggaatgcaaattcatactctactcaatcacaactaccaaacttatctaagcaagtgttcttgtgatatactgaatctagggcaaaacaagttccaagattttgaactaaggggagacagaatcgaccaaatctatgaataactatcatccaattctactgttagtttcgcatgaatcttgaaatgagaaaacgaagaacacgtttttagatcaggtgacaaaaactagacctcgtggccggattgatgcgaagaagaagcagaggaagaagaagaaggcttcgaagaagaaccatcgtctttgtcgccgaaatcagcgacgggaatcagaagctctcgatctctttctcgattggccataacaattgtcgtgtaaagagagataaaaccctaaacctagaaactcaccgagagttcgaagattgtaaatcacaatctagaagctagttgcgaaacagaagaaccacctcgaagatcctgagatttgatgatgatgattgtgatgatgatgaatgacagatagagaagacgatgaaattgatttttgattcgatttccccaaatggcaaaagaaaagttccttacctgtaccgattgaccgtaccaactaccaaaccaacgaattgacttttacaaaacttaaaccgaaattaaagataattaaaccgagttattgaactaaaccagataatagcttaggttgaatcagttttaaaaaaatttgcgatacctaaggcccactaagtttttcacatcgtaaaaaggcctaaaataataagcccactttaatcatctcctcccgttatcagattaaaagatttgtttctccgagagcaagaaacctcagagagacgaagcaca

SEQ ID NO: 10358 - DNA, 3000 bp, Unknown
  misc_feature (1)..( 3000): cDNA_ID_2704802_gDNA_ID_2213644_Annot_ID_181388 3000 nt of promoter + ATG
tgggctgttgcgaagtaggccaacccgttttgtcaccaatactcccactagatcacactttcaatattattttaaatatctatgctgaagaaatattttctgatttggttaatcagcttgtgaatgagtattgcatgaaaagaggagtttcattgtcatcgacggacaatcaaaaatcaaatcctaacgaagaaccgatgaaagatttgagaagtagagggctttgtcttgttcccatctcatgcacactacaagttggcagcgacaatggtgccgactattgggctccggcgttcggaaccactctccagtgaactattcactttctgttattttatttttggtcagccaaaaaaaaatagtagatgttataacatcatgagcaaccaatcaattgagaaaacatcaaaatgagtttccaaatttgattgctcatgatgctatactaaaaccgattggttttggcgtttggcctttgagcattttcagttgacgagtatgagatggcttgttgaatcatgtttttcttactttaataggaaactttatttattctcttaatgtatatgttggttctattttaattttattattgttataatagaatggttaaacagttaaagatgttttcatactaacttcatcactaggtttaatcgtttaagatgttttaaagaagcaagaaatgttgtcttcggaaagaaaacagatgtacttatagatactttctgttcccaataatttagagactaatgatttcttttataaattgtcctaatcaaagtttcgtttgttttagttgtctttttagatttctcgtgcatggtctcagctcagtttatttttagacacttcagacatctcaccatggtattggaattggtagtgctcaattggtgggtttattataagccctttgctccatcactataattgggtttatggactttgaattaaattctacaggcccatgggtttatggatattgttttcagcacatgtcaaatgtcaatatatgaaaaattcaatgtggagaaacttctggtggcttcataaagagtaagactgcatttcctgatagtagtagtgtactggtgtggatgcagataacgttattagaaatcaaaattgaaaaggtagctatttttaggtcacatattgtatcattaatagtcattgttcaatgatgaaataatgaaagactaaaactcttggattgagtcttagagatctataatgtaacttagggcattagcttagccttaatttcacatggtcagtgctttagtgttgtgcaaatgaacttgaggaagaagcattagttggattgaagttttattagtatgcttatatatacttttgtaattcctcatatagtgaagtgtccttcaacgtattaaaacataaaatataaaatggtttgagacttgtaatatcttttattttcatgcaaatttttttttaaaaacttttataagaacaaacttagcagttggtctctagcacaatgagtttattgtagaattttgtggaatcaaatttaagatttaattaacctgaaaataagtttaatagatttgtgacatcaaatttttaaaatggaatcacagtcttacgttttcattccatctctaaagtatgaaggaaacctgtaatgaagcttccatgccacctaagttgtacaaagttcttatctagcctaatgaataaaacctaaaaattaaaccaactacaaaagttcaaacatgaaaagcacataggaaaggatctaatcccgatgtcgaacatcatagttcactcatatgattttcagttttcgttggtcttgtgtgttttaagtctttttaagtcttgtgtgtttattggtaccaaaaaattaaatattcttctaaaatttacgtatctaattaaaagagaaaatatatataataaatcttttaactattggtaataagtgttaaaacaaatctcaactttataatagagtaaatatcaatgttctttttgttgaccacgcaaaatagacctgaaattagtcaactttaactatactattgtattaactaaatgttaatttttagttatcaatttattattttgagaagataatcaaactgttaactaaaaataaaagtcactttcagtttctataaatccccaaaaatcaattataaacccaaactcttcctcacttcatgtttaaagtttaaaccaaaaaaaaaaaaaaaaactcttcaaaatcctgattttggggaagaacatagattcgcaaatcgattcctcttcatcacgcaacatcaacaaaatagtcagtttcgattccttttcttacttagattttttgtttttgtttttgaatatttaaaactattggggcattttcgtgagtaacttaataatttgggccaaaaccgttattttaaaacattacttctctattatgtagtagtcacgagtgatcggatcggacggtgaacgatcgacgaaacttcaaaccttatatgaatagtaatcgtcagatcaacgtatttaataacaaccgtacgatcaaaatgtctgtgaaatctaaccgtcgaatataatccagaaaattgaaatttcaaaacatgtataagagagggaggagcagctctcgcgaagacgaagaagaagaagaaaaaccccaaatttctctgttttttttcgttgggtggttcctcagtggttaccaaatctctcttcttcttcttcgtcagaagctaaaacctttcaaaaccctaatttcatctatctatctcaataagtctagatcaaaaattcgaatttcaaaatcccgttttgagttttagtagattcggtttctgggttttcgtagaaacgggattaagggcggattcagatcttgaaatttttgtgtgtttctcaaactgattataaattttggtttttttttttaaatttcgtgtttgaaaaatagggaaaatttctgggtttcttctgagaaattcgaattttttggag

SEQ ID NO: 10359 - DNA, 3000 bp, Unknown
  misc_feature (1)..( 3000): cDNA_ID_3036067_gDNA_ID_2213644_Annot_ID_181387 3000 nt of promoter + ATG
attctactccaagaattatttatattattatttttaattcatttttgcaaacgaaaaaaaaatccaccgtttcgccttctagtcgggattgaatgcgtcaccatgaaatcatgctttaatcatattctgcgtgagtgggaaaacaactatttataagtacatagtactactttttggattaaatatttccctccactttaaaccagaggtgcatactgcataatataggtaaccttcaaaaattgttagtattttttcttactctaacatgctcaaattacaagaaaaaattgcatatatgtatggtgatttaaagccgatcctttaaatgtttccacggttttcgttcatgagcctcattgtatatatataatatataattttagcacgttggaatgagaaagaaaattgataatggataagttttattaacataccaaaataataaacttgtttatgttacatgaagttcaaagaggtagcctctaaaatgaagaatacttaacagaataagcaaatatacatttttgttttccttatatttgattaatcccacaaagatacaaattactactattaattaagcaacttatcttagagggataagtgaaccatttgctttgaaatggaaaaactttgctttagttgatgtctatatatctatgaatttgtttccctaacatgttttttacgtcaatatttttaatctatatctgacacaatcaagtagacagttattatacctaacacattatcaggtagtctatagactctataccattttaaatgtttaacgcatgtaagttaatcacatactctatgatctggtggtttatttgttaaaagtgaatttttattctccaatgaattaatgatatcaagacagagcaacaactaattttaattagtttttttttggtataagaagagtcatataaacttttgagtcatttaaacgtaattagctttgttaaatgaaattcctttttaagtgggtacgtataaaaccctacgcaacgcatgttgatccatttaagtcaccatcaacaaaaagaattatataaatcattggttggatgaagaaattattatatgaacaaaaacaggacaaatatcttaacaaaattaaattctctgaacttatcgtataataaattagtaatttaaatcacatcaaactgaactaaatatatggaattaaaagggtttaaaatacatttgataatttgatgtaagaaatatgcatagatgcaaaatacttgttatatatgtgggaaatatcaaaaatttatattcgaatatgttatacaccgtacaaaaaagtcttcgaatatataacccgggtcaccttttctcttatggcaaaaaatataaccccttttctgtttctaattttaaaattttgcattcttgattctgagctcatagttcgatgaaatataatctagagaaaaaaaaaaaacataattcgattaaataacaaaagcacctttccctccctactttatgcataaagctaaagcatggacaaaaatgaagtatagaaaaatgaattactgattataacagtctttcttaattaatctagtaaatatttatacatagtactgtattacataaacttacacacttaggtttatctgtatcatggttagattatcgtaaagactaaagactataatattgtgttcatgaattagaaaacttattcctccgttcatccaaaattagttaatcgttatatcgaatatggtccatatgggcatccatattttcagaagaaaagaaaaaaagaaagtaaaagcatgttaggggaaaaaataaaaaataaaaacagagaaaaaaaatcgagagagggagagagaatggtgttaaatacataaaaaacccatcattgacatgtatcgattgctcaatttgtttgtctctctcttcttctttccttttctccaaaaactagagcctaaactaaagcatcgagaaacaacaaatcttaaaatcttttcatattctcggttagtagaaactaggaaaagagatgaatagaggagtgttggagagttcgccggttcaacatctcacggcggctggaaaccctaattggtggaataatgtcagccgcggcttgaggccaccaacgccgttgatgagtcacgagccgccgtctaccaccgcttttattccaagtctcttgccaaacttcttctcttctccgacttcctcttcatcttcttcaccttctttccctcctcctaatagtaaccctaacttctcttcttggcttgaaatgagtgatctgcctcttgatcagccatggagccttagtcaactcctcttgtaactccctttctctctctctctctctctctctctctctctctctctctctctctctctctctctatctatcgttcggatgttttctatgtataaacggttttgagttcttggatttgttttgtaatctaattcgatcttataaagtttctttctcttttttttttctttctcatgtatacataatctacttatattatttcatataaacaaacatgatctaatatggattgtctttgaatgaaggggtggattgatgatgggagaggaagagaaaatggagatgatgaaccatcatcatcatcaaaatcaacaccaaagttaccaagcgaagaggatacaaaattgggaagaacaagttttgaggcaccaagcttccatgaaacaagagagtagtaataataatagttatggaataatgtcctcaccaaactcacctccaaacaaatcttgtgctacaattatcaacaccaatgaagacaacaacaataacattcacagtggtcttaacttgtccgaggtgggtcaaaatagtgaattattcagatcaagatataatctttaccaaatattaattaacatctccatattttttctttatcaatgaatatatctgaattttgtttctgtctatgtgtgttcatgaagtgtaatagctcagag

SEQ ID NO: 10360 - DNA, 3000 bp, Unknown
  misc_feature (1)..( 3000): cDNA_ID_3036077_gDNA_ID_2213644_Annot_ID_181383 3000 nt of promoter + ATG
agaaaagatgtggcgaagagaagtgaaaagggcagccacgttaaggcatttaatttgaataataataagactaaaacaaaaaaaaacgtaaagccttttgaggttatgaatgcgaaaatggtccctcacgagtcacgacctaatctcattgaaatttatttagcattatattgcgtcgtgtctcattacccttttttgcttctcattattacttaattattattattctctatatatatttctccactaacctgtattagttaataacctttcattgcttttgtacggtagatcataatatgctaagatgtttcaatgattgaaaactcaacaaagaagacatagaaaaccaatataactaactagataaacatataatacaagtagttatttctaatatttgagtgactgcaaccgatatacagaagcgttctaaattttattaagacaatcatgtttgaaatgatgtcaataagaatcatgattcaaactttacaacgtaacaatattgcatgcaaaaaacaatttagttacgaatgaaccatatagtctcgaatattagtttatgttattataaattatttagaccaatattggttatatttattacataaattcactagaagtctgaaactgattatttatttttatagtgtgtttttatctaatttttatttttagtgttggttatatacaatataatttatatagagaaaaattggtaccggtggaaagtccaccatcgataaaaactgtctgatgtccatccaaaaactaagccgacatagagttgtatttggtcggtatattagacgtacatgtatatttatctttccataaggtttcttttgaatataaagttgtgtatccaaatgcagattcttttatgctttatcttaagtcatcttcgcattttattttggtcaaaagaaagttagaagataagagaaagtttttgggtcacacatacgaaagaaacgtaaatggcttctcatgcctaatagcgctttctacgcttgtggggtatttgattggatatacgtcacaactcataatacgtagttgtttactagcttatctgtacatggactccacttctatatgatatatatagaaatgccactaatatacgtacgtatccacaataagagaattataatgaatgtgagattggtaagtagtatcacataatttaagggtgtgaaggttaattaacggtaggttgttctatattatatatggttactcacgtaaagtttttaacaaaatatacaaattttaaaatgtattacttaaccaatctctgttctcatgagagtagtttcgcttattcaaactgctaccaaatattatctagtagccttttctaattggtatacaaatacaaattacacgatgtgatagacactttattgtttgtgcatactacctttagagtaggcactagccaatcatgataaaaatggcaaatctaaaaaatattaagcaacatggtaaatataaaagatttaggtgacaaaactgaaaacagaagaaaaaacttacgttttaacaagtgttattaaatgctggttttggactaaaagaggatatgggtttaatgaaaaaacttaatttttaggaaaaaaaaaaaggtggaatttgagtagaatacaacaaaaagtcttagagtttgattggtaacacaaaactttagctgttacggaataatgtaaaactgtacaaaagagctgtaaaaaaaaattgtatcaaaaagctgagagtaaagcttttcgtaacgcttttgataaagtttttgtaaatggtaattgtcaaagctgtacaaactgtactgttttgataatgggttaccattcaaagctttaaattttaaatcgcatgataacctgtaaataattattttgaatatatgttagactttattattattggttaactatgttctcttgattgaaaaaaaaatagatttgtaactcattgctgttttttttttttaagaaacaaatagagaactatataaaaatataagaaaacgttggttttgtccaagaaaaaaattgttgggttttggtgggtggcaatagaagatgccatgtacatagtgggaacaagtagccttacgcccataacatgtcggaacatcaccaataaatttctatgttcaaaaatatcattgtaacaaaaagtttttcgaatttcttctcccaacccaccataaaaacccaatcaaatgcatgtgaatgttcttgttcatttgatgaggtcaagatcaagaagccatgtaatctagaatacaacagtacacatgtgacttgttacagttttgaactctcgttcacagttttgcaagttcttaccaaagctatagatgcctctcatcccatgagccttcatcacctgatgggcttattaggtttacaggcttgactaaactctagagcctatacgtatagaagaggcctgactaaacgaagataatgaaataagcccacaaggcccaaataattaatatcttttattctttttggcaaaatgaaaaatctgacttatgggctttttaacatttacacatttaacttcatgacccaatgaagacccgacccgtctggtaatgacccgatccaacacatgagtaaaccttcactgaaacctcgaaactcctccagaagcctaaaaccttcaccaccaaatcggtgcctccttgaatagtcgccgccgtcgtctatcatcgccgcttgtgactccggtgagtattcttctgctctattgagtttattttggttgaagctctatgagatgtacgtgggtctggttttcatttctgtttcttaatcgctcgaattagcatttgatagctactgagattttgagttttctgatctgccgaataatcttcgccattgtagtgtagatgttgtgtgccttttgattagattacactgagaaattggattgttttcgtgtttgtagatgagaagctaggttattgaatcagagatt

SEQ ID NO: 10361 - DNA, 3000 bp, Unknown
  misc_feature (1)..( 3000): cDNA_ID_3036081_gDNA_ID_2213644_Annot_ID_181382 3000 nt of promoter + ATG
ataccgaccaaatacaactctatgtcggcttagtttttggatggacatcagacagtttttatcgatggtggactttccaccggtaccaatttttctctatataaattatattgtatataaccaacactaaaaataaaaattagataaaaacacactataaaaataaataatcagtttcagacttctagtgaatttatgtaataaatataaccaatattggtctaaataatttataataacataaactaatattcgagactatatggttcattcgtaactaaattgttttttgcatgcaatattgttacgttgtaaagtttgaatcatgattcttattgacatcatttcaaacatgattgtcttaataaaatttagaacgcttctgtatatcggttgcagtcactcaaatattagaaataactacttgtattatatgtttatctagttagttatattggttttctatgtcttctttgttgagttttcaatcattgaaacatcttagcatattatgatctaccgtacaaaagcaatgaaaggttattaactaatacaggttagtggagaaatatatatagagaataataataattaagtaataatgagaagcaaaaaagggtaatgagacacgacgcaatataatgctaaataaatttcaatgagattaggtcgtgactcgtgagggaccattttcgcattcataacctcaaaaggctttacgtttttttttgttttagtcttattattattcaaattaaatgccttaacgtggctgcccttttcacttctcttcgccacatcttttctcacttataaagtgtcattaaatacgagtgtgttagattttgctgtgttttttttctttctttaaactaatttttttttaggtttagataattaggttcataactttctaggtctgatgactacaaaaggttagtttagtcgtcctctccagtacttaacctttgctgatttgtattcaaatctagtaaaatgtacgtgtgaactataaatcattaatattgttttgtggtaatatagttcttgtgtcatcattcgaattcaaatccacatactaaatgttgttgatagaaaaaacactactcaacaaaattagtagtctaacagtttgttctagtgcatgttatccttctactaacatttgagttttatttcgatgaaatgtatatttccaaaaaaagaagaagttatatctcaactagacatacaaaaactaattctaaataggcatggacaaattatccaaattaaattggaccaaactcatctgattcgaaaacacttttttcattaccatttttgttttgggttaagaagtatcatctgactaactcgatctaccaaaactaaaaaattcaaatttgattaacaaattgacgccaactttaaaattttgactcttaagattttagtatttaatcaactttcattaaaagtaaaactgaaacttagtagaattaatcaaatttatatcgaaattgaactagctagtatctatactagttttctcaaaatagccataataactaaataatatataacctgaattattagaacaccataaaattgatatcctttatataattaaagagagttattatgcttatgtggcaagcctataagttttctcaagatttttatttatttaaatctactattacatttgtcaaacacattttcttatcctcattttctttaacccacttaccaaacacacctaaatttcttccaatatatagagttatcaaattttgaattttttttcaactttccttattattactaaattaattatttcaaatttctatatattaaatgcttagattttgtttaatgcacattaattagaatataaatcattcaattatatgacctaaattaacaaagtttaatactagaaaaaacagtagtctacttttttttttggtaagaacattagtttacttttaaaacattcttttatttttttcccttcaacaaacatccattctaaaacattacaaccaaaataaaatgtcatagtaaacaaaaagatataaacctaactataaacaaactattctggtaaaataattatcttttatatatatacttatatttatattttatatattttacaattgagaaaactatacttaaaattttataggttaagatcggcccatgcataacatttgctcttaccaagtattttggttttaattcggtcttctttaaaatacctgaaccaaaacaaacagaatttattttggtttaaattcggattcttattttaattatactttaaatccgaattatccaaaccgatcctttatgaatatcctaatggtaggcctaattcaattgttgtaaatacaatttggcatcagtccaaagctttagcttaatttgttcctctatcccaatcactcactctccagcagctattccattggctgtaacacatacacaacaacaccaaatcataataaaaataaaaatcattcattagttaccaaaaactatcaatatttttttattttatcccttcttcttctctcagcaacggttcttacttgaagtagatcgagagaacgaacttgtctttcccaaatttcttcactttcaaatttctgttatcaaagaatctttagagatttttccgggatctttctttttttttttctttctctgtcaaaattttcgttataaagtttttgtattgattcactcttttaactctccgattccatttctcttttttttttcccaatctgcaatctccattagattccccagtcacattatcttgtctttttcgaaattttctcgaggaaagtttgatactttcgaggaaagtcatgagcttttgaacaaaagaaactgtttggacttccgttactatctccggcggtttctgaaaaaacttcaatgattcgttgaataagtagcttactttaagggttttgtgttatcttcatctctctctcagtgatg

SEQ ID NO: 10362 - DNA, 3000 bp, Unknown; identical to SEQ ID NO: 10354
  misc_feature (1)..( 3000): cDNA_ID_3036085_gDNA_ID_2213644_Annot_ID_181380 3000 nt of promoter + ATG

SEQ ID NO: 10363 - DNA, 3000 bp, Unknown; identical to SEQ ID NO: 10353
  misc_feature (1)..( 3000): cDNA_ID_2704774_gDNA_ID_2213644_Annot_ID_181379 3000 nt of promoter + ATG

SEQ ID NO: 10364 - DNA, 3000 bp, Unknown
  misc_feature (1)..( 3000): cDNA_ID_3036089_gDNA_ID_2213644_Annot_ID_181378 3000 nt of promoter + ATG
gaaaaagaagcatgtcgattcagggcgtgatcgagttgatacctatatcaggtcttcgttgcgtatggcttttcaacaggttcgtttatatttctttttctgttgatctgatttcgtatctgcagccatttatgtagctttattgttttttgtttgtaatagacaaagaggatggtggaacatagcaagaaatcaaaatcccggcagagcacgaataatcttcctgctcttgcgattcttgcagaggatattggtcatttagcttttaatgagaaggcgatatttagtccaatcttgaagaattggcacccgcttgcagctggtgtggctgcagctacgcttcattcgtgctatggtaccgagttgaagaaattcgtctcgggtattactgagttgacgccagatgctattagagtactcactgctgcagataagcttgagaaggatctggtgcaaattgctgtacaagatgcagtagatagtgaagatggtggaaaatcggttataagagagatgcctccttttgaagcagaagtcgttattggtaaccttgtgaaatcgtggatcaagatccgagttgataggctaaaagagtggatcgaccggaatctccagcaagaggtatataacaactttaaagatctttcctggtttttgttccttttaagagttttattcatatattgattggttttgtaactttctattgtaggtatggaatccgagatcgaataaactcggtatcgctccttctgctgtggatgtactgaggatggtagatgagacattggaagcgtttttcttgttgccgattcttttgcatccagttttacttcctgagctaacgtcaggactagacaagtgtatgcagcattatgtatcaaaggcgaaatcatcctgcggtaagcagttgattgtttagtttttggaataaaaaagctcacgctttgttcatttcacttatggagtttctggttttgtttttatatggtttctattaggctcgcggaatacgtttctacccgttttgcctgctttaacaagatgcacggtcgggtccagactacatggtgtattcaagaaaaaggagaagccaatggtagcttctcacaggagaaaatcacagctggggacgggtaatgactcggcggaaatacttcagttctgttgcaggatcaacactctgcagtatatcaggacagagatcgaatcatctgggagaaaaacattgaatcgtctcccggaatccgaagttgcagctttggatgctaaaggtaaaatatttgaacagtcgattagttattgctcgaaaggaatacagcaattgtctgaagcaactgcttacaagatcgtcttccacgatctgagcaatgttctctgggatggtctgtacctcggggaagttccttcctcaaggattgagccgtttcttcaagagctcgaacggtgccttgagattatctcctcatcggttcatgacagagtccgaaccagagtcatttcggacatcatgagagcttctttcgacgggttcttattggtcctccttgcaggtggaccatcgcgtggcttcacaattcaagactctgctgccgtagaagaggatttcaagtttctatgcgatcttttctggtcaaacggagacggattgcctttggatttgatcgagaaggtttcgacgactgtcaagagtatacttccgctgctgcgcacggatacagattctttgattgaacggtttaaagcagtgtgtctggagaatcatggttctgacagagggaagcttccgttaccgccgacttctggtccgtggagtccgacagaaccaaacacacttttaagagtattgtgttaccgttacgatgaacctgcgactaagtttctgaaaaagacctataacttgccgaggaagctaacctgagagtgacctacttactacattggtacaaaacccggtttagtttgaagtgtggaatatattttggttaaagcggctagcgattggtatttggcaaattaaattacttgtacaagaaagtagaaacgttttagtgaaatattcttcttttgtactaatcaaaagcttgtgggctttgttatatgttgtcaactgttataaatttgtatatttaatacctttgtttttcatctttctttttcaaatttatcagatttctgattgataattcaagattgcaacgatggttcatgaaatggtcctttaaaaactcataatgtttatgtgatggataacatcagatatatgatgatatggttgaaacttgaagtattctaacttgaagtcatgattcatgatccgtttaacaacgtttgaaatgagtatcagaaaatgattatcgtagatatgaaacttttcctgcagacacgttctagtattttgctaaaataatagtttgttgcttattcaaccaaacaaaaacacttgttcaagtagcgcaatatcttcgatagttcgattcattattatgatacccttcttcgacttctttgatttcctcgagttcttctccatacgtcacatgactcacatcgtcagcgatttcatggcaatgttacatgtggtggacgacatggagtatccgcgaccgcgagatgatcttgaagaggtgtttgctttatgaatgacgatgaatcggctctgttttcctgtttccaacggttgtaatcacaccatcatcgttgtcttcatctatactaatattcaaatggtcaattataaagcccaataagctaactaagcccaaaaatgaaaacacacggactcagcccatacaaattttaacacttaaggctaatgggtctgtcacgtgcggaatagactgaaaacagagcatcgcacgtgccgcatcaaaatttgaaatcacgacgacttcaaaaaaatcccaaatggtaagaaaaaaataaaaagttgcagaaaaaacagaaaaccctcttttctctctcttctctctctctcgaggaagaaaggcaacaactatg

SEQ ID NO: 10365 - DNA, 3000 bp, Unknown; identical to SEQ ID NO: 10351
  misc_feature (1)..( 3000): cDNA_ID_2704766_gDNA_ID_2213644_Annot_ID_181376 3000 nt of promoter + ATG

SEQ ID NO: 10366 - DNA, 3000 bp, Unknown; identical to SEQ ID NO: 10350
  misc_feature (1)..( 3000): cDNA_ID_3036093_gDNA_ID_2213644_Annot_ID_181373 3000 nt of promoter + ATG

SEQ ID NO: 10367 - DNA, 3000 bp, Unknown; identical to SEQ ID NO: 10361
  misc_feature (1)..( 3000): cDNA_ID_2704784_gDNA_ID_2213644_Annot_ID_132346 3000 nt of promoter + ATG

SEQ ID NO: 10368 - DNA, 3000 bp, Unknown
  misc_feature (1)..( 3000): cDNA_ID_2704788_gDNA_ID_2213644_Annot_ID_132347 3000 nt of promoter + ATG
taagatgtttcaatgattgaaaactcaacaaagaagacatagaaaaccaatataactaactagataaacatataatacaagtagttatttctaatatttgagtgactgcaaccgatatacagaagcgttctaaattttattaagacaatcatgtttgaaatgatgtcaataagaatcatgattcaaactttacaacgtaacaatattgcatgcaaaaaacaatttagttacgaatgaaccatatagtctcgaatattagtttatgttattataaattatttagaccaatattggttatatttattacataaattcactagaagtctgaaactgattatttatttttatagtgtgtttttatctaatttttatttttagtgttggttatatacaatataatttatatagagaaaaattggtaccggtggaaagtccaccatcgataaaaactgtctgatgtccatccaaaaactaagccgacatagagttgtatttggtcggtatattagacgtacatgtatatttatctttccataaggtttcttttgaatataaagttgtgtatccaaatgcagattcttttatgctttatcttaagtcatcttcgcattttattttggtcaaaagaaagttagaagataagagaaagtttttgggtcacacatacgaaagaaacgtaaatggcttctcatgcctaatagcgctttctacgcttgtggggtatttgattggatatacgtcacaactcataatacgtagttgtttactagcttatctgtacatggactccacttctatatgatatatatagaaatgccactaatatacgtacgtatccacaataagagaattataatgaatgtgagattggtaagtagtatcacataatttaagggtgtgaaggttaattaacggtaggttgttctatattatatatggttactcacgtaaagtttttaacaaaatatacaaattttaaaatgtattacttaaccaatctctgttctcatgagagtagtttcgcttattcaaactgctaccaaatattatctagtagccttttctaattggtatacaaatacaaattacacgatgtgatagacactttattgtttgtgcatactacctttagagtaggcactagccaatcatgataaaaatggcaaatctaaaaaatattaagcaacatggtaaatataaaagatttaggtgacaaaactgaaaacagaagaaaaaacttacgttttaacaagtgttattaaatgctggttttggactaaaagaggatatgggtttaatgaaaaaacttaatttttaggaaaaaaaaaaaggtggaatttgagtagaatacaacaaaaagtcttagagtttgattggtaacacaaaactttagctgttacggaataatgtaaaactgtacaaaagagctgtaaaaaaaaattgtatcaaaaagctgagagtaaagcttttcgtaacgcttttgataaagtttttgtaaatggtaattgtcaaagctgtacaaactgtactgttttgataatgggttaccattcaaagctttaaattttaaatcgcatgataacctgtaaataattattttgaatatatgttagactttattattattggttaactatgttctcttgattgaaaaaaaaatagatttgtaactcattgctgttttttttttttaagaaacaaatagagaactatataaaaatataagaaaacgttggttttgtccaagaaaaaaattgttgggttttggtgggtggcaatagaagatgccatgtacatagtgggaacaagtagccttacgcccataacatgtcggaacatcaccaataaatttctatgttcaaaaatatcattgtaacaaaaagtttttcgaatttcttctcccaacccaccataaaaacccaatcaaatgcatgtgaatgttcttgttcatttgatgaggtcaagatcaagaagccatgtaatctagaatacaacagtacacatgtgacttgttacagttttgaactctcgttcacagttttgcaagttcttaccaaagctatagatgcctctcatcccatgagccttcatcacctgatgggcttattaggtttacaggcttgactaaactctagagcctatacgtatagaagaggcctgactaaacgaagataatgaaataagcccacaaggcccaaataattaatatcttttattctttttggcaaaatgaaaaatctgacttatgggctttttaacatttacacatttaacttcatgacccaatgaagacccgacccgtctggtaatgacccgatccaacacatgagtaaaccttcactgaaacctcgaaactcctccagaagcctaaaaccttcaccaccaaatcggtgcctccttgaatagtcgccgccgtcgtctatcatcgccgcttgtgactccggtgagtattcttctgctctattgagtttattttggttgaagctctatgagatgtacgtgggtctggttttcatttctgtttcttaatcgctcgaattagcatttgatagctactgagattttgagttttctgatctgccgaataatcttcgccattgtagtgtagatgttgtgtgccttttgattagattacactgagaaattggattgttttcgtgtttgtagatgagaagctaggttattgaatcagagattatggctgcttcaatttcaagaaggatttttcgcacttttggatccttttcagctctaggacgttcctcttcaccaagtattatctcattttccaagcttcttataaaatatgtttgtttcctggatctctgattgtttctctcaacagatttgtctgcgaatacatctggaaatggtttagcttctcttactaatgatctaaaggttggtgtgtttagttaatgtcactttctcctttccttcatctgcatattattgagttctacttactactacttgagtggtcatcttcctgattttgag

SEQ ID NO: 10369 - DNA, 3000 bp, Unknown; identical to SEQ ID NO: 10358
  misc_feature (1)..( 3000): cDNA_ID_2704802_gDNA_ID_2213644_Annot_ID_132352 3000 nt of promoter + ATG

SEQ ID NO: 10370 - DNA, 2285 bp, Unknown
  misc_feature (1)..( 2285): cDNA_ID_3036051_gDNA_ID_2213644_Annot_ID_132360 3000 nt of promoter + ATG
atgctatgagtgaggtaggtttctggtaccattttccataatacgagatgttgaagtagggtttatggttgcttgtttatatatgtggtaatgcagttattcggattcgatgcaacttttaatgaatgtatgttttgcatcaattgtaacaaatgatttgtatttactgtattgcccagctatctctctcccatgtgccattgaaaggttttaatatattgaataacaggtgcgggcaactgctagaatgtgctacagaatgtttgcaaaaacttggccggatcgttctcgccggttgttttcgtcctttgaccctgtcattcaaagggtaaggcttttcaactctctatattctgcttattatcatcaatgaggcttgataaagcattccatatgttctcagctaataaatgaagaagatggtggaattcataggagacacgcctcaccatctgtccgtgagagacattcccagccttcattttctcagacgtctgctccttctaacctacctggctatggaacatcagctatagtcgctatggatagaagttcaaatttatcatctggaggatctctttcttctgggttactcctttcgcaatcaaaggatgtcaataaaggttctgaacgtagtctggaaagtgtgttacaatcaagcaagcagaaggtcagtgcaattgaaagtatgctccgaggactgcatatatctgatagacaaaatcctgcagcccttcgttcaagtagtttggatctaggtattgagtttctttccttatgaaagtacagtttgtttttgaaacgtcctttaacatgagctaagatatccttgcgcagctaaattgtcttctttttcccctagtgcaggagttgaccctccatcgtctcgtgatcctcctttccatgctgttgctccagcatccaatagtcacacaagtagcgcagctgctgaatcaacacatagtatcaacaaaggcagtaatcgcaatggtggccttggtttgtcagatatcatcacccaaattcaagcttcaaaggactcaggaagatcatcttaccgtggcaatctgttgtccgagtctcatcctactttttcatccttgaccgctaaacggggctcagagagaaatgagagaagttctcttgaggaaagcaatgatgccagagaggtgaggcggtttatggctggtcattttgaccgacagcagatggatactgcttatagagatttgactttcagggaatcaaacgctagccatgttcccaatttccagaggccacttttgaggaagaatgtagggggaagaatgtctgcaggccggaggaggagttttgatgatagccaactgcaaattggtgacatatcaaattttgttgatggtccagcttccctgaacgaggcccttaacgacggactgaactcaagttctgattggtgtgccagagttgcagcttttaattttctccaaactctgctgcagcaaggcccaaaaggtgctcaagaagtaattcaaagttttgagaaagtaatgaaactatttctccggcatttggatgatcctcaccacaaggtcgcacaagcagcactgtcgacacttgcagatcttataccatcttgccgaaagccttttgagagctacatggaaagagtcctaccccatgtgttttcacggctaattgaccctaaagaagtagttagacaaccttgctcctcaaccttggaaattgtcagcaaaacctacagtgtggattcccttttacctgcattgcttcgttcactggatgaacagagatcaccaaaggctaaattagctgtgattgaatttgccatcaactccttcaacaggtacgctggtaaccctgaaatttcgggtaatagtggcatcttaaagttgtggctggcaaagttgacgccattaacccgcgacaaaaataccaagttgaaagaagcttccattacttgcatcatatctgtttacaatcattatgattctgcgggactgctaaattacattcttagtttgtcggttgaggagcaaaactctctgagaagagccctcaaacaatatactccccgcatcgaggtggacctgttaaactatatgcagagtaaaaaggaaaaacagagaattaagtcttatgacccatctgatgccattgggacatcatctgaggaaggatatgctggtgcctccaagaagaatatattccttggccggtattctgggggttctattgacagtgatagtggcaggaagtggagttcttcccaggagccaacaatg

SEQ ID NO: 10371 - DNA, 3000 bp, Unknown
  misc_feature (1)..( 3000): cDNA_ID_2704816_gDNA_ID_2213645_Annot_ID_132362 3000 nt of promoter + ATG
ccacctatagtttatgtaccatctaagttactagggatgtgtctatattcatttggtatatagcaaatgttttttccacaagaaacatagacgaaacaaattttcaataaatgttatgtgtgttctcacatggtatcaacgttacacattaagaaaaaaaaaatcaacgttacaaaactttgagtgtttgtttatttgtctttatttgaccatggacgagaatggcatcacatgaaatgtctctaccaatggttatgtgctatataccaccaatattcataaatatgatttatcagaactttacataaaattctgctatcagtattttttatttatttaatggtaataactatgctgattaaattttaaaatcagtatcaattaagaaaaacagtgattttgtggactgatatattggtcgacaaccgataaattgatcgttcgtgattgatgacatgtgaactattttgtatttttgttagtttcgtggatcatgaacacaaataatatgtttttcactacaaaatctcactcagtcggatttttctttttaaacttgtaaattgtacaaaccatacaataagaggctatctacggtccatcttcccgcagaactttcattatccttttgtaacatactggcagttacatttaaaaaaactgtcaagattacttgaaatcattcggtgtggtgccttctaaaaacctcccaatgctcaaattatatctttattttattttattgtggtcaaagtattacgatgttcttttagtgattcagtataatgttcatagtttttctgttaaaaatatcatagtaattatagatcgtttttatggggaaaaaaaaacttagtacatagtaaaagtagttaataatctattaaaaaataatatggtttggacctttttgcacccactaaaatatcagtatataactaagttaaatctttaaattagtaattacgaattgcttgatgttaaattaaagtgttaatgagtttttcagaatttaatttaacatgataaataataaaataatctaaatattaaagagtttattagaaaataggcatttgtcttggttatatatttattttaaggtatttccttacatgattttcgaaagaggtacttttctcttgtgaaaagtcatccttatcctcctctcatttgcattatcttttacccaattgaagcaataagtcgtgtctgtttcctatattcgatatttgcatcaccaattgaagcaataaatcgtgtgtgttccctatattcaattgaaacaatggcgatatatgcatcatcttctaaatcgccactcctgcaaagacaacaactcggattttcaagaatccaagtttttatatggaaaatcactgagagagagatcattgtgagggatttaaaccggtttcatcatttcaagaatggacttgtggtgattactggtaatttgaaaaagacaggtgagacgatattcaaaaaccggtttcaactcattgttatttgtgaaccgatttattcttggtataggaagactctgggtgggaaaagattccaactttgcttacgaaggttaagtcgcaacaaagaaagcttctttatttccgccatggacacagcctatcgtagtcatgtggacagaactgaaattctctaaaatcagaaccgaaattccacaaaatcagaactaaagttccataaaatctataaattttttcgattgggttccctatatattatcttagggtttagtattgtgtaattaaaaagaaaaattaagtttgcttgaaaaacaaagaagaaatcgatttaatcagattttgcaactatgttcgataaagaagaagaagaaagaagacgatgaagaagaagagaaggaaaaaaagacagggacaaaattgtcccgattgaagcaataaatcgacactgttgtattcaactgtggaaaatacctattttgaaataactttatttaaaatgcctattttaaatataagctcaatattaaacaccttgaacttatgtgtatttattatttgtgtgtacgggaagcaataccagaaaatgaaaatctcttttatttattgacaatccataatcctacaaatcctctaacttctagacttatgccgttattaaatattttaatatatatatatacatatatatttttaataattatatttaggaacgtcttttaatttatctccgagggtacactttttttctttatctcttttgtttttatctaaaaacaaacttttaggatattacctcacgaaaaaaacaataaattattcgtctagcaccatcggaaaaagacaaaagacttcgactaccccactcagtggcacaatcctgtaatttctactaaacattgataccctttctcgaattcatcgtgttctttgtttttaataagatggtactttttcctcatttttcaatctttttttcaccaagaagcagagaaaagaaacattaaagcagagaaaaaacaaagacaaataatctccatttgctttcttctccatcttcttctaattttcttcaagttttatcaatggctggtgttactggaatcttaaagcttgaagcttggagcatcttgtgaagaagattaactagtttcttgtatttttcttttctggggttttgagtttttttttctcttccttattaccggaagtaatggcatgtcggagtatgatcgcttttagtttagatcctgaaagaaaacaaagtggaggacttaggacaaaacaagctggaagaggatcttgccgtggaagttagtctttgttcaaatccattttcctcttaaagaatgtaataatgggtttttattgattgttgtagatttgttaaaaagttttgtttttagacctaaagtttcgatttttttcttctgggcagtttgaaattgcactgttgcaagtgaaaaagtttgttcttgttggagcttaaagaagagagaagagaaagagaaaagct

SEQ ID NO: 10372 - DNA, 3000 bp, Unknown
  misc_feature (1)..( 3000): cDNA_ID_2715566_gDNA_ID_2213645_Annot_ID_132368 3000 nt of promoter + ATG
catcttacgtgaacactaaaatttatatccatcacgtttagattaatcacccatctttcgaagcaaataagttccaatatgagcttagaggacataaaactagtttagagaaagttacacggatacaaatttggatatatagtttagttaggatatgattttattgattttattatatattttaaaaataactaaaacgttaatgatgacgtaagctaataaagtaatagattagaaattgcaataaaaaaatataatgtatttaataaaatagattcatcgacaaaaaaataataaaatagattcatataaaacttgtattacacaaaagaaaatatcttggcgcaagataataaaataattacaaagtgatttaaattcattttgattgccgtcaaaaacaaaaattcattttgataagttattacacccaaaaaaacaaaaacaaaaacttattggcatgcggggtacaaacaccgaggaagatatcgaaacacgtgtttaaaaatgaagagacgatttattaagcatcaatgagagaacttcagagctgggtttgagttctgtccaataatacataaccacgttatcatttttgtcctttactatctcattacactcttctgttattcgcccaattcttacagtcattgtccacgtcatcctttttccctctgaagccgccaaatatcaaaaaacacaaaacctttacccgaagcaaagtagctgcacacttgccatttataaggcatgtttcttcatctaaagcaaagtattttcgagttcctgagccaaaaagatcaaacaatgtctaaagaagctgagatgtcgatcgcggtgtcggctttgttccctggttttagattctctcctactgatgttgaacttatctcgtactatcttcgtcgtaaaatcgatggtgatgagaactctgttgctgtgattgctgaggtcgagatttacaagttcgagccgtgggacttgccaggttttacttcggttttctttctctttatgtttactttggttcactaatttgaatgtttgtgcctataaaacagaggaatcgaaactgaaatcggagaacgagtggttttacttctgcgcgagggggaggaagtacccgcacgggtcacaaagccggcgagccacacagctaggatattggaaagcgaccggtaaagagcggagtgttaaatccgggaaccaagttgttggaaccaagagaacgcttgtatttcatatcggtcgggctcctcgtggcgagagaacggagtggattatgcatgaatactgcatccatggagccccacaggttcttaaaactttcattttgaataggttgagttttaatgttttgagatatattgaaatttggatttcacaggatgcattagtggtgtgccggttaagaaaaaatgctgattttcgggctagttcgacccaaaaaatggaggatggtgttgtgcaagacgatggctacgttggccaaagaggtggtttggagaaggaggacaaatcctactatgaatctgagcatcagataccaaatggtgacatcgcagaatcatcaaatgttgttgaggtcagcttgcttttgaggaatgtgtcttttaacgatgtttaatactggtaaaattatccgctccaatcttaatcgaaaccacattaaattcaatatagttccgaaaacagaaccgattaagaaactaaaaccaaaccaacaccatagtaccatactataacggattcatagtacattagatttcactaaagttgttattttactaaagcagattctaaacttaaaacgtaacaaaccaatatatccaatgtttggtttttattttggctactaatattataactcaatagactaaaccaacacttgggctgaacatccttagttttcttgtactggtagagtttagagtttgtaactgaagttgatctctttctattgcgatgcaggatcaggccgataccgatgatgattgttacgccgagattctgaacgatgatataataaagctcgacgaagaagcgttgaaagctagccaagcgtttcgaccaactaatccaactcatcaagaaacaatatcaagcgagtcatcgagtaagaggtcaaaatgtggtataaaaaaagaatcaacggaaacaatgaattgttacgctttgttcaggatcaagaacgttgccggaaccgactccagctggagattcccgaacccgttcaaaatcaagaaagatgatagccagagattgatgaagaatgttctggccactactgttttcttggctatcttattttctttcttttggactgtattaatagctaggaactaaagctagttacgacatacatattatttatacataaataaatatagtatttggtctatggcaatatggcatgttgagctagtcttaacaattattcaaacttgtgtacaaaccaaaatttttatggaaaagagaatattttcggatagtaaacctttataatctgggtgaaagctttgggaaagagatgatagttccgtgaaaatagagacaacaaatttcacatatagtaaatgtgaataataccaccatttccttaagttttgctgtttgttgtattagagattgcaaagtgatattcttagttatatacaattgtaataaattatacaaaatccataagtaaaataaattattttagactatgtttagatatacaaaagtttcagttcaaaatataaacgcctgagaatcaaacaaatgttgtttgtagttttttatatttataaaatagtctaaaaatatttttcttacttatggattttttatactatattaaagttttatatatgtaaaagattactctggaacctctaatacaacaaatggtataccttcagaaaaaaataaaaaataattgtgtgtcatacaataaataaaaataataaggtgaaaagatttgctttctgttttttttggtggctgaaaaaaacaatg

SEQ ID NO: 10373 - DNA, 3000 bp, Unknown
  misc_feature (1)..( 3000): cDNA_ID_2704840_gDNA_ID_2213645_Annot_ID_132371 3000 nt of promoter + ATG
ggtaccacaaagggatgccattaacaagactgatacaatagctttgcttcccatctttcttcttttttcctttcgtttgtcttggctttggtttagactttagacttagattcttgggatggttttagatatggaagaaattttagaatttataggatcaggaaacaagattttaatcaatacatcgacaagtaacagatcagtctaaagttttgtttcaaaatgtaactcatgtttaggtccaccgtattaatttttattacattaagttaagttgactaatgtaaatgtattgtgtttactagttcaaattatgaaacagaagatgagtaagttataatattcttttgacccacttaattttttgggacttaatttactttctttatgtaaagattgatttgtctaacccctagtgaaggtagctaaacgtggttcaagttctatattgtggattggtataattacaactgcaaaattgattagcacatgtcatgtgcgttctatggaggcaattgaagtcaaatcacaattaaagatataaaaacttcctcgtccactacaaatgttaggctaatttcattgtcttacaaatataattctgtttgtcttctatgtacacttcatcttccatttcttttttcttaagagatataagtaactactggtttttgttaattgttacaaatttgggtctttggttggcaaatctggatcagttgaagtagaaaagactagcaacttggtatctttgaaaactttcgatacaaatgtttacatatcgtgagtgtataattccaattttatggaatcttcaaagataaaatgtgattgatccatatatagatgtatataaattacaatcatgctataacacagtcgataccctataagccgaatacacctaggtaagcttagattatgaatatgttcttcaagcgggccgactgttaaattatctaacaattggtgttttagttatgcaatgaaatgaagatattaaagacacgaagaaacttgtgaagagaacaatatgtcattgactcattatgtggagacaataagacgaagcctaatcgtccacaagagtcaaagattctcaagtcgcgtgacgtgcatatggtcaaagactcatgctaagtacgagtctctctctgccacgcaaaacaaatagaatgctccaggtcttcttgcctaacattatggaactccttccacatagtcaaatcaagagatttagcaaccggttcatgatgactcggctcaaatgcaaatcctctaatttagaataatgaatactcaagctcccaactctttcatatggcacaacaaactcagtgtgtagggtaaaaataactccccattttcagtaaccccaactagttttctcaaaaagtaaaatctaacaagttgcggaagacaaaagataagattaagaataacttgtgttatcatgagtcatgaccaacacttgatatagaatatttgttttgttgttcattcccaaaatagaacctttttattattaggactactgattcatattctcattttcggcactaaatgtggtggaatgcacctgacacctatgacttaatttaagaaagtgttaggtgcaatgctgaaaccgatgatgtggcgttcgtcgtcgaggatatcgagtctctcggtggagcttgcaccggggaggtcagagaagacttggaattgacggaggctaccaaaaaagttgctcattttgagtttttccgagtttgatccttcctggaaacaaaactcaaatgtgattttgttttatagtatgggtagatatatgagttttgaatattcaacatcagagccaaataccccaaaacttaaaagtgatataaccatatatctaatcacttgaaagatttgatgaacaagcagaaagagcaacttttttggatgaaaagtattgtattgcttttgcattgatatgatcttcaatatacaaagcgaaagtcggatccattttagtattttcatcacgaggatgatatgcatctttacatcatgtgatacatataaacatggagaaatttttattaaaatgtttgctaattgaagattgatggtgtcattagggattgataagcgggtcggggtaacgttgagtgcgaccattgtagggaaggaatgcccttctgaccaaactggatacatatcactttgcacaacttgaactactagcgaaagaatgaaattagttggaagatacatttctaatacaaaactacaattctgtcaagtaaatgacaatataaggggtttcggagaagcacaccttttgcttcctcattcctaatggtcatagagaagacggtagttttcattttttttggggatacacacaacatatatctctgaagaatatgattgcctcttagttcactgatcatatagaagcatataaagaaaaatcaagttgctttggtctagtggtaaaggagagaaaagcttctgccacctggatttgagtattattggccaccggagttcgaatataaacctttacgatcacctgagttataaaaaaaacacacacacaaggaaaaatgtatgaaaaaacaataatcactgagaaatgcatttaaaacttttacaaacaactgattcgatttattaaattaattttgtttcttacaatgttttggaataaaataatccttacaataattcgatttattaaagacaaaaaaaactagaatcaaagctaacatgatagagagaacttgcttcgagggatagccgagagaaatcccgatgaggccaaagatcatccgtactagtggcaaattaccatagattggtcaaaacaattattagtcaaaatagcaataagtttgactcttttggtttgatatgactagcaaaaaagatattagtcaaaatagcaacacattttttagtatttgactcaaatcagtatatatatagctatatttataagtggacaaaatgtaaataaatttaaca

SEQ ID NO: 10374 - DNA, 3000 bp, Unknown
  misc_feature (1)..( 3000): cDNA_ID_2710477_gDNA_ID_2213645_Annot_ID_181419 3000 nt of promoter + ATG
tcccaagttcttagacaatctaacaacactttctagtttgttgcaaattagatccaaaacattctccaaagacaacacctttactatctctacttaaccttctgatacaaaaacacaacaacgttctctgcattccgctagcaatcatcaagattcccaagttcttagacaatctaacaacactttctagtttgttgcaaattagatccaaaacattctccaaagacaacacctttactatctctacttaaccttctgatacaaaaacacaacaacgttctctgcattccgctagcaatcatcaagattcccaagttcttagacaatctaacaacactttctagtttgttgcaaattagatcggaaacatttcccaaagacaacacctttactatctctacttaaccttctgatacaaaaacacaacaacgttctctgcattccgctagcaatcatcaagatttttccaagttcttagacaatctaacaacactttctagtttctagcaaattagatccgaaacattccctaaagacaacacctttactatctctacttaaccaatatcgaaccaatatcgaaacacacatgaaaactgaaacaaagttgcagagtaatttagctcaaattcctctattttcttggaaacgataccgggaaaaaaaaagctataaacttgaccacataacacacaaaacccaaatcaatttgacatttttagcctaaaaatcaatcaaaagaaagggatcgaaatgaaataaaacgatcattaaatggcgataatcgaaaccctagaagttgaccacagtatggaaaagctcaccggagatttcagcagctgagaataccgattcgagatccgtcagagatagaacaagtttccggaagaatgtagcagaaatcgaaacaattagggtttggcgagaagaagaatgtaaaattgggagcgatgatttttttttgtttgattgaaaaaaaaattgagaggaaatgttttttttttttttaaaccgtcgttggggttggaagagacggcgaagatgctgacgtggactcagcgactatgtttcgtcagtgcgttgacacgtgttctcatcattgcggatattgtttttgtatgtgttttagattttatggattttcattttaatcgttgggttcaaaactttaaaagcccaaattcataaaatccatagttatatcattttaaactacataaatacaaaacaaatatttacatcttcgtgatatcattttgatcctctacacatctaagatattattatcatcttggttttctacaatttttaccttccttactttgagtctttgattgtatatcatcttcaaaaatatacgccaaattcgttttttggatctttttacaaagatttttttcgtcgactatcacaaactttgactctatgaaacaaattgaagaaaaatgaattccctaaaaatcttggaagaaacaaggaggctaatggtgctttaacaagtaggctagtggtgcactggtgcttttacctttgttgacatcccaccaaatttaagctcgatcaatgtgactctaattggccactaggtaacatgttaaaaataaaaagaaagttccctaaaaacttcaaactttttacttcaacaaagagaaaccaaaaaaaatctagtgttcatgagtttatcattcattttaattttaaacaccggttcttcgattcatctccaaaaaatcccttcaaaatctagaaaccctaagggggtcgtgtgcctccatttcttttctctttcattttgtgaaatccaaaacattatcgtctatcatatgtataaacaaaaatttgttgcattttttactaacaagataggttactttgcatacaatttaaagtgacgacattttgccaatcgataagtctctttctcaagagagaattaaaaatgcaaggcctgcagcctctggcagcaaaaataatacaagggtagtggaccgacaaaataataaatggggcactctataatcagaagacggccacgactcgagctggtaataagatactaattgacattgtaatgcatggcaaatgataattgcctatttaggacaagagcattaaaataattttcaattatttagagtaattacttctaaaatttaaaattttagcctcgactccaggtgtatgaaaacatggtaagtatggtcaaataataaaaaacaatactgaaaaaagaagttgttggcaatgatttaataataaaataatgtttttttaaaaaatcccaaaaaatcatatctacccgatcacatactaagtcaaatgtagttttaaatagattaggtagtctatttttagggtgtattttactgaatacttcttccgtttcacaaaaatgtcattttaatttattttattatacatattctccttcattataagagtttttaaagaaaatcacggatttaggatgctgatgtataagcattatactaataatacactaatttatatagaatattggaatcaatacactaatagtactattgaagtctatatataatgttttgtaaaaaattcttacacaaatcagtctagtaataacattttctttattatcttttggattggaacgaaaacaagtacaaaatacgatacataatctacaaataactcgcaaataaacaagtcaagaaacggtacaaagaatctgcaaacacatttttttttgagagtgtaaacaaataaaatacaaatacaaagttttattgtcccatacaaagtaaatttcctttgccccacctttacttaaggctcattaactcatatgactcattggcccatctctgccaattgtcacacgacttgatggttttctttgttttcgacgaagtgctaaaacatgtggctcaactttgggttccaaaacaaaagattttgaaaataatatatcataacacaaagaaaagaaagaaagatataaagtcagcttaaagctctcgc

SEQ ID NO: 10375 - DNA, 3000 bp, Unknown; identical to SEQ ID NO: 10372
  misc_feature (1)..( 3000): cDNA_ID_2715566_gDNA_ID_2213645_Annot_ID_181410 3000 nt of promoter + ATG

SEQ ID NO: 10376 - DNA, 3000 bp, Unknown
  misc_feature (1)..( 3000): cDNA_ID_1387126_gDNA_ID_2213645_Annot_ID_181409 3000 nt of promoter + ATG
tcaatagactaaaccaacacttgggctgaacatccttagttttcttgtactggtagagtttagagtttgtaactgaagttgatctctttctattgcgatgcaggatcaggccgataccgatgatgattgttacgccgagattctgaacgatgatataataaagctcgacgaagaagcgttgaaagctagccaagcgtttcgaccaactaatccaactcatcaagaaacaatatcaagcgagtcatcgagtaagaggtcaaaatgtggtataaaaaaagaatcaacggaaacaatgaattgttacgctttgttcaggatcaagaacgttgccggaaccgactccagctggagattcccgaacccgttcaaaatcaagaaagatgatagccagagattgatgaagaatgttctggccactactgttttcttggctatcttattttctttcttttggactgtattaatagctaggaactaaagctagttacgacatacatattatttatacataaataaatatagtatttggtctatggcaatatggcatgttgagctagtcttaacaattattcaaacttgtgtacaaaccaaaatttttatggaaaagagaatattttcggatagtaaacctttataatctgggtgaaagctttgggaaagagatgatagttccgtgaaaatagagacaacaaatttcacatatagtaaatgtgaataataccaccatttccttaagttttgctgtttgttgtattagagattgcaaagtgatattcttagttatatacaattgtaataaattatacaaaatccataagtaaaataaattattttagactatgtttagatatacaaaagtttcagttcaaaatataaacgcctgagaatcaaacaaatgttgtttgtagttttttatatttataaaatagtctaaaaatatttttcttacttatggattttttatactatattaaagttttatatatgtaaaagattactctggaacctctaatacaacaaatggtataccttcagaaaaaaataaaaaataattgtgtgtcatacaataaataaaaataataaggtgaaaagatttgctttctgttttttttggtggctgaaaaaaacaatggcgatgatgcttctgcaaattcctccttcgtcttccttgttgaacaccagaaaccttcaaatccgattcttccactcttcagtttcagcttcctcgaagaaattcagatgcagagccgtccgtgagaaggcggaggacattgataagaacatttcgccgccgtcttcttctcctcctcctccttccgccgaagaagttaccaagaaatatggccttgaagttggtctatggaaggtaaaatcaattcgattgcgcaatttctcgttttaattcgtaatctaaaattgatgattctatcgctatggaagctttaagtgtaagtaaaatagtgtttttggatgaacatgtgaggacatatgattgtttctgagctgaatgataggctaattcagagcaattttggtattagtagaagctattgaagctttaagtgtaactaaaatggtgttttgtatgattatgtgagcaattttgtagttgttgaagctatggaagcttctaagggtactaaaatggtgtttagatgattatgtgagtagatatgatcgttttcgtggtagttgtagaagttatgtaagcttttaactatgctaaaatggtgtttttttttatcaacaagtgagcatatgtgattggttagtttggagcatttttggaagttgtagaatctatggaagtttttgtgtagtaaaatggtgttttggatggacttgtgattagatattaagctctaaggatgatgaaggaagtgatggagacaataagaagaagaaatcaaaaacagatgaggctaaagagttacttgcaaagtatggtggtgcttatctcgctacatctattactctttctctcatttccttctcactctgctatgtccttgtgacttccggtgttgatgttcaagctcttcttctaaaggttactactttcacttcttgatcatactaagtttatgttttcttgatcttgggttgagtaaagctgattttgatgttttgtgtttaaggttgggatttcgacgaatgagacaggagagaaagtaggagcctttgctttggcttacgcagcgcataaagctgcatctccgataaggtttccgcctacagtggctttgactcctattgtagccaattggattgggaagaaagtggacaaggagaaggatgatgacaagtagcttactttggaggtattataatgtagatgttctatatattacttgataatcaacatacataatcctgtacaatcctcacttctctaccttgtatgtacaaaaaagattgaagcatatctgaatatgatgatgagttagaaagatacagaaccaaagagtggcagaatccaagttgtgatatagttttagacttgtctatttaatatgtggttggttggaaattacgacttcacgattcactaacctctagacatttggtaagtgggagaagtagttgtcaaatggttgggaatgatctctgtgatccagagcatatgacctcgatcgttttggtgatgcattttaacttgtactctagaacctcattatctcggcccatcaaaatatgaaaacattgggccgtaacaattgggccgtaatcatctataccatctatagttaattggatctttttatctcctcccttcctctttcactttcttccatggattactaaattccttaatcctgggaaaatcacaccaatcaacttttgtgaattgtaaccctaatcgattctacagcgaaatctacctatttcatgcttgggtttgattagtgtttttccagaatctgggacttcgcaggaattgcgctaattttcaatcgattttgcagaagtttgttgctcctggaatagaaatcgaagatg

SEQ ID NO: 10377 - DNA, 3000 bp, Unknown; identical to SEQ ID NO: 10371
  misc_feature (1)..( 3000): cDNA_ID_2704816_gDNA_ID_2213645_Annot_ID_181403 3000 nt of promoter + ATG

SEQ ID NO: 10378 - DNA, 3000 bp, Unknown; identical to SEQ ID NO: 10374
  misc_feature (1)..( 3000): cDNA_ID_2710477_gDNA_ID_2213645_Annot_ID_132375 3000 nt of promoter + ATG

SEQ ID NO: 10379 - DNA, 1853 bp, Unknown
  misc_feature (1)..( 1853): cDNA_ID_2709039_gDNA_ID_2213646_Annot_ID_132380 3000 nt of promoter + ATG
gtgactactctgccctgaaaccctctttctcgttcagaagcagagcgctccccattcctctatcagaaattttaacaacaatacaaactgaaacctttgattttcgtggttgaatggtcaaaacacacccaataaaaaaaaggttgtgatttttagtataatgcatttttcctaagatgatggttgcaccaaaaagagagaggcaattctgttatcctcctgcatgttagatcatttatccgaacaaaccataaaaatgaaaatattttgaaaaaattaaagtttgtttgttttcaaaaaacatattaatcccatgctcatgagtgtgacaaaaatggaccactagccgcatagaatcacaatgaagatttaacaaagcaaaaacaagatattgatattctaagatctacttgattaagacatgcaaatgcattaaaattaaaaagaagaatcgaccttttaatgcagtcatctaatgcgtgtggtaggaaatgctctgtaaacaaagtttttaaatgaagtcgaacaaaatttttagaaattgtaaaacatatcaaccaatagtttttggcagtaaaatttaaaagacttttaatttgtaatatctcagtagatgactggaaacaaaaaaaagtgggtctaagcccatgtagcaaaccacgttgcaaaaggaaatgtctttatcagacagaggttggcccaaatcaaattgagaggtgagacaagttgcctctgtaccaatgagattgttatgggtcccataagatctttaagtgaacccttcttaaaacgcttttacactttgtgtatcaattcgatatgacccggtttaactccggttatcttgcaaatacaaagctggttaagtaatggtaacgaactacatcaattttggtaaataaaggtttgtcatccatgctttggcagtgttgtcaatttaggcaacaaggcaaagaacaaagaataaaagcaaaagttttgtttcccccaacttgttcacatataacattatgtctctatgtggaagaatgcttttaaaaaaattcaaacataattgttacaaatagttattgtttgtcaatataatgactcatataaattcaaacatacccagcatgaaaaatgggaaattttatcaatatatattagctattcttgttgttgtcatcaatgatgaatggctggtctttagtatgccaaatcccattatgtgttttccctaataacattaacaataatagtgttaggtggtagtaccctggttggtgaaatgctaatggtgaaactgggtcaatataaagataacacttattactactgatctcgccagcttggtggttctcattcttgtcttcacaaacatataagaccctcctcacacgttgatgaactgattcttttccaattataaaaatcgtaatctttggtcacaaaatattaaatttggtcttcaagccttaaaaacggcagagattacatcagtcaagtaaaaacagcgacgcttttattgatcaaactcattctagcaaaaggtgttacaggcccatatgaggcccataatgtgaaaacaaggcttagtcaaaaacggcagggagtgtggtcaaaagttttgaaacggcaaagagtgttagtatgtgttttgtctttggttgatgatttatgaacggcaacgaatcaccttccgaagatttttcttcctttcttttttggattctcctccatgcaaaattggaaagccctaagacgaacaccaaccatacgccatcgtgcgacgtgaaaattggagaatctgattggctgaaggattattgaaattgaaagttattgtgatcgagttttgttttttcctgatg

SEQ ID NO: 10380 - DNA, 3000 bp, Unknown
  misc_feature (1)..( 3000): cDNA_ID_2991409_gDNA_ID_2213646_Annot_ID_132381 3000 nt of promoter + ATG
gaagaaattcataacaattgcacatacgatgttattagtgtgaccaccaacttcaagtctctaggaaaacaagtagaatatgtcgttgatgaagggcacatgggttaaatgtggttatttttttcctattatctattactataaatctcgaaatcatgaattagacatgttctttgtatctatgtccaacatgtaatgggtacattgtatgtttaagagtaaaactaggataggaagatgtaattgattgcttggtggcgtgggtttaggcctttgagccaacatttctctttagatttgaaccctctgctttcgcgagagactctctttgtcttgcgttttaaaaatcaaaacattatccttccttcgaagcaaaatctttaagattttggtgctatgccatctcttgcaagtcatctttcacatctgccaggtaagtgtcttttgagtattccaattctaacaagtccggacaaacaaaaaacaaaaaattggttcttcaatggaaaatgaatctaaatattaaatcatcagtgactatcaaattttggcccattctgttcatgccacaaaataatactagcagttctatcatctttgttatgccatgcaataagaacattttctgatatctctatactaatattgtaaaatgctaaagatgatttgattattctgatgaaatattggtaactttgaccagtagttgacgaaacattggtaatcgaattggaaccaaaagaggcaagttgggttcacagggcacatggttgcttcaaacaatcccattactccatccttttcattgtccctctattttaggctctttgtgctcatctctattttctttctttgatcaaaattattataccacaagacttttttttgtgcttaaattttagtcgtcatatacgacaattttttatatacgaagtttattattattaacatcaattgattattcatatatttttaatcaagtggcctttttaataactctctattcttttgacgtaagaacaaatagtaacttttatttgtagaatattcattctaagaaattaatacgtaaatacatatatttctcacccgtgaaacaccaccagtcgagtaacgtgattgaagatatgtttaaaaaaaaaaaaaacatgattgaagatatgagagagcaagagtcagtgaactattttggccgcacacatgtgacacatatatatatgtgtattattccttttggatttactacattcattctgatttctgaaccattagtaacccttgaaaagtaaaagctgataacgttttaggatttgcaaatttgaaaaaagatgaccctacattatttccaactgcaacatgcacgttcctgttatgttaaaagatattattatagtatatatattttgaaacataaaatgattgatgtaactgatccaacggctaattcctcttactagttagtgaattagccacctaataaagattacatgaatcattaaataacaaatataataactatacaacaaataattcatattgtcgtacattcaacaaccgaggtactccaaattaaaaaagaagtcaagcacactcatatatattttaatttttaactgataaccttgaaagaaaaagaaaaaggatatggaatagaatggtaaaatcaatcaatctgccatggttatgaatcaaaaaccatagaaaaatcgttatttactgtttagtattataaatagtgtcaagttaaaaagtttttaatattgtaaaatacactctacctaaacaaaacagcatatgtaagataacatcatcacgataaattgttttattctgacaccacatgtgagatagataggaaaatctttagtatttaaaaaatcaaaatgttggcagattaaccgataatcacgcagattaacacctactgagatagccgttaaataaattaatcgacatagcagaaacaaataattgagtatcaataaaaaaaaggaataatagagagagagagagactgactaatgagtcacatatgacgaatgagtccagtttggctgccagtctgtcagcccctaccattacaccacctctaaagatttgtattttatcataatccaaccaaacaatgcttacaaaaaaaagataatcacatcacatcacatggccttcttcgtcgctgtaacgtttaattaaactagccgccaatttcttttaaagatttttttgttttgtttttgggcttatgtttaaaccatataatccataacttcatttctattgctatttttgaatttaccctataaagctaccaatattgaatttttgtaattcatttaagtttattacataaataatttatttacttatatgattataattttttttatcggctatatgattgtaatttagatcagtacctaatcaagtttctatctttttctatccgttgacagaaaaaagaaaacaattttctatcaacaattcacaaatcaaattggattagagatacaacaactttagtcaaaattctaacacaacaattcatacttttgatcattcaaacatgattttattttttatttatctagaaacatagtaatgtcaattttgacaattattcattcaaaaaaaaatgtcaattttgacaagaaaactaggaaaaaaaagaacaatagaggaatggtcaaaaaagaataaaagaaaattcgaggaaaatcatgcttcttagaagttttttgtttaattagcttgactagtaaatagatttgaccggataaataaccggttgaaaccggtaacctttaaccggtcttcatactataagaacaccttaaacaagtcgtctccttccacttcttgctttattcctctcataccgttttctctctctcctccgtcgtctctgcagaatcactctctcgccggagtttttcacctgcagagctctcgattttttctctcgagcatcatcattttcgtcggatcaatcaccaagagatg

SEQ ID NO: 10381 - DNA, 3000 bp, Unknown
  misc_feature (1)..( 3000): cDNA_ID_2709024_gDNA_ID_2213646_Annot_ID_132382 3000 nt of promoter + ATG
cctctttatttaccatcctacccctatactcacacatatcgtttaaccagagaggaaaaacctgagtggcataatccgtaaataagaccaaaaaacaggaccatctctaaagctgatgtcactaatcaaaagattatgaacgtaatctcgtgtcataatccttttgacctcttacttaaacaaaacaagtataataattgggcagccaaaataaaaaatctttctctctttttgctataaagtaatgaaaaaattaaataaaataatgttcaaaaaattgtccgccagaataaagaaaatttgatatgtggcttcaaagcctaaattaatcattaaaataaaaaatcagaaaataaggaatgaagaacgaattgtgcaaaagtctatagagaaagagagattcatttgtgtttcttcgactatacacagaatacaaaagagatattatatgtaattatcaatagtatatgacaaatttatagcctcacctttcttcttcttcttcttcttcttctgtgtgtttttgaatttgctttcttcaagaggtttcttctccacaccgcttcggtgtatgatctgattgtgatctctctcgatatctgggatcttcggggtaagcgatttgatttttgtgtatttctcgtttctcgtaatcttcatgattggttttaatagtttgctgcgattttacataatcttcttctgttttgattagctactttagattacagctaatgatacgtttcgggattagtgattattgtatgtttaactagttttagaatctctacatgcatgaatttactaggtagggcttctttcttcttcttcttcttcttcttcttcattttgttggtttgattctgatttgtttttgtattgtatatgatttaaggtatggaggctgtagattattattattattacgtgtggtgctgatgcaatgagtgttgatgcctgttatggaaagagtagctgaagaaactgtggcgactaacaacatacaattgaaagcacgagtggatgatgttccttgtaataagcttgatgctcgtcataacgatatggtgattcaatcagaaactgcaaacagtgattgtcctggaagctcagctcacaggaatgttgatttgactaagccgccgcctcctgaggaagccgcaggagctaagctttctgttgaagagttgacattggggaactacaggattgttcaagggagtaataatactaatgtggatagtcctagggctggcaagtttgagcatctttatcgtttggctagagggtctgcttttagggcaggagatggggatcttgattctcaacctcgtgatatggatcaaatgttgtccagaatcagacaacagcttgctggagctccttctgagaggcaaaacttgaaaccttttatgtctaggaggagcgatcagaatcttgaagctttttctgaacgtctaagagcagctggtgagaatagtattatgaatgctcctgcattgatcagtgaaggtgtccaaatgaaaacgccggtgagttcttcgaatttttctcagttgttacttaaaagagctatgaaagggaaaggggtagtaggaaagaaccaggaaactcctcctgaatttgtctctgatcaagatttaggaagcaaggaaaaaaagttggatattagcaagtcgcctactcctcacgatgtgttacctctaaaatcaagtcccaaaggaaatggtatggtatcacatggtgatgggaatcatagtaaatcttctattggaatcagtttgagggagtttcttagatcaagttatgctaaaagagaaaaaagacatggcctttgtctatttaggcagctggtggaactggttgactcagcccattcaaaaagattattcttgctagacttgagaccatcccttttcactttagttccatcaaagaaacttagatatattggtaattttggaaagaacgatctagaatcagatgttgacgaagatttgaataggaggaggcctgttgttgaggaatcatctagtggaggtagggattcgaagaaaagaaaaatggacttgcatttgaattctccagggaatcaacttcaggccacttcaaccgggcgacctttcaaaaggaaaagccctgtgattgatttaaacatggttgatgcacgtaatccagacagttgcgagcttcaacagcaagactacataaaaaatttaagcgtgtcttcagtgtcgagaaaacagtctatgtccacatggctagaagagcaatggtatacttgtccagaggagataaatggagaagatattggagaaaaatcaaatatttatgcccttggtgttcttctgtttgaggtatggacgaatacccagttttattgttgtggatagatttttagtttgctttaataccaagaaggatgtaacatttccttgcatttgaacactatgtactgtcatatcctgcttatgtgggctttgggtagtttatattctttcattttcatgaaatttcttactctagtctgaactttgaatcccagagctagtattttccagtctgcagtatataacttgtcagtatttttgtttacttgtttgatactttcatgtgaagacgcctactgacatctagcttgaccaattgttgtttcagttgctatgccattgcgagtcaggcgagatgcatgctgcaatgatggcagatttacgccatcggattctcccaccaacatttctctcgaaatacccgaaggaagctggattttgtctttggcttctacatcctgaaccctcctcccgaccatcagctaggtatttagctgagtgctactcttttatgattcatgtgggcgagtatttactaggagtctaggagtggtacaaaggagaatctgtagaccttccattagcttaaatagtcgtatttaagatttctttgccggatatcttcaattttatttaatgttttcccgcttaattgtgaagaaaaaaaatg

SEQ ID NO: 10382 - DNA, 3000 bp, Unknown
  misc_feature (1)..( 3000): cDNA_ID_2704868_gDNA_ID_2213646_Annot_ID_132383 3000 nt of promoter + ATG
tccgtttccggccactttttatatcattcctttttatcactcttttgtttgttttcaagtcacatcttctcaacgaagaccggagccctcgtgtgaacatcttttcccttcgacggctagccgaaatttttaaagatataacactctgatctcaacaaattaaatttttcataataacacttcgtccaaaaactctaccattacatttaaacgtgttgtatataaatatgatatatcattgtagtattatgaatttacaattcagggtatattatggaatataggaccgaccaaatcaaatttttattcgaaatttaattttatagattatgctgattatcagtttgggttttatttccaagttcacatgttgagagaatacaaaaacaaaacaaagctaaagggattatatatggattaggttgtggatgtcaactagttattaaaataatgttagattaagggatagattaggtaaaggtaagtagctgttaatcatgttaaatattattattttaggttgtggttcgtctaaaaggaatctccctatgatttacgaatccgaaatagagagaggaggattttcatgttattgtggtggaggagctagggtcgtgtcaatgctgcttttggttcattgtttaagaacaatgatcataacacgataagattgatgaatgaaacgtttctatctgatataccacacaaatttaactaagcatcacaaatccgaattagagcagagaaaataatacaacatgttgctggttaggttgaaacattgaatttgcatctcttctatagttgatacaagattggatacatcttcgttacaaagcgaatacttgcttacatttaattacgccaaaaaatctcttcattttcatcttttacagttaattaataatgaaaagatctgttcatctttatatatagtgatcaataacaaaaaaatttgaatccaataaatataattgaactcaggttctgggggcaatcacaagtcagtcatgcgccttcacattttcctgtaatgcctgaattctttagccatgggctgaagcacgtgagtccttttctccatcaactttgtatccttcataaacctcttgtttgcacgtgctctagattcacgagcctcgtgtgcaacatggtctcttctctctttctccaaaccattctcatcttccttcttcgtagaaagctgagagagaagcaccaccatgagatttacctccatcagagaagttttctcgtcttctcttttctcctccgcatcatgtttacgattggcttcgcgagacgaatccataaacccaaaaagaagacccaaaaatgatacaattattgggagctattagtccctaaattagcccgtcttttggacaaaatttttatcttcttcttttttttttcttgtggtcattcatagtaactaattaaatcaatttgcaattttttgagtggtattggtatattttccatcttaaagactcgatggtagagaaataagattcctaaattcattagtcacaagatcgaccaatttttatttttatttttcttatctcaaatgtttcgttttgagaacaaccaaacatttaaccattgataaaattggccaatggctaaaatgaatgccttttcattgtttttttgacatcctaaaataaatgcttaactaatgggtttatggaaaacaaaagttgtgtccaagttataagcgaagcagcccataaaagtattaaaatgggctgagcccaataactgataggtggagtatattagtttaaattgtgtttgttgtacaaagtttcccaaatgggtttccaaaatgggctgagcccaaaaagtgttgttataggtgagggtatattagtttattcgcaaaaaaagcgtggcttaataatctccacatctttcacgtgacccccctcgaatggcgaatagattaagcgacgtcgacgtgttttaatctcctcctcttaacaaatatccctaaagattacttcccccatgcaacactcttaatacccacgcttttcctctttatttaccatcctacccctatactcacacatatcgtttaaccagagaggaaaaacctgagtggcataatccgtaaataagaccaaaaaacaggaccatctctaaagctgatgtcactaatcaaaagattatgaacgtaatctcgtgtcataatccttttgacctcttacttaaacaaaacaagtataataattgggcagccaaaataaaaaatctttctctctttttgctataaagtaatgaaaaaattaaataaaataatgttcaaaaaattgtccgccagaataaagaaaatttgatatgtggcttcaaagcctaaattaatcattaaaataaaaaatcagaaaataaggaatgaagaacgaattgtgcaaaagtctatagagaaagagagattcatttgtgtttcttcgactatacacagaatacaaaagagatattatatgtaattatcaatagtatatgacaaatttatagcctcacctttcttcttcttcttcttcttcttctgtgtgtttttgaatttgctttcttcaagaggtttcttctccacaccgcttcggtgtatgatctgattgtgatctctctcgatatctgggatcttcggggtaagcgatttgatttttgtgtatttctcgtttctcgtaatcttcatgattggttttaatagtttgctgcgattttacataatcttcttctgttttgattagctactttagattacagctaatgatacgtttcgggattagtgattattgtatgtttaactagttttagaatctctacatgcatgaatttactaggtagggcttctttcttcttcttcttcttcttcttcttcattttgttggtttgattctgatttgtttttgtattgtatatgatttaaggtatggaggctgtagattattattattattacgtgtggtgctgatgcaatgagtgttgatg

SEQ ID NO: 10383 - DNA, 3000 bp, Unknown
  misc_feature (1)..( 3000): cDNA_ID_1838273_gDNA_ID_2213646_Annot_ID_132385 3000 nt of promoter + ATG
tatgcttattgcagaaattgtgtgtcgtttactttttcgtcttatcataatcacttgtatcaagttgtacgttagcccctatggaacgtgaggacgcttacgtattcataatactaaaaagataaacagtgtctagttcttttgtagccatttttttgggtacttaaacactataaattctttaaataatatatcactgttttcttttgataaacgaaataagaaaccaatgttgtacataagttctgtgttatggttgacgtgataggtaaatgttgtcaagctaatcgtaagtaattaaactatatgattaagttattaatgcgtcactgatatggaatatttttgtgatctgttgatggacctgactttaattctcgattcttaggaattaggaaatggccaagttgaccaacaaaaaatgtggcgggtgtagtggaacccactcaaaaaaatcaggcaactttcgtaatttaatgaaacatttgggggcgaaaataaggaaaacgtaaaggatgtgaccgacaaattatttagagccgagacgtaattgaattggacggcactgccacgtgtaagcacgaaactcacttgggtcacagtacatgcggatccagaggatcttttatactaatccaattagactcatccacgtgtcaaattagttaaatttaagttttttttagtccgaaattaaagttagaatattaaattaatttccacacacaatcgtttttcttagttattttacaactagctagtataaacgataaccaaaatggatgacatcaaaataattaattaggccaaaaataataatatcagcagtcaataataaaattgtgtatgcatgtgtcatggtaccattgtttcttaagctcaaaacatttatgatgagcatggaggaatatgtgatttatgttgacttgtcatgcatgtatacaatttatagcttcttcagtcaacaaaaaaaattgaaaatgttaacttctctaaaaggagcttttccacagatttcaatcagttcatgattttctcgatataaagtaggcatgaaattgacgaatgaaaatgtatgaattgaagaaactatataatgaaaaacaagaatcatcaataaaaatcaaatgtttcttacatagtttttttttcttcttcaaggaaatcaactatgttttgtttttttatacaatcagatcattagattaatcgtatgtttttgtaacttaacttatgttgatcagcttcattaaaatgagagtttattcttgtaaacaaaaaagttagttgtgatgactaatatgcgtttccgaaacgaaaccctaaaccctgcaatagaaaagggattgttgaacttaatttgttttgtgcacgagaagatggatgaaacagaattgttaaccaaaaatcttatgaacctaattccaaaaatcttatgaacctcacagactttgagaatcgtttaaatgactaatgtaaagatgtgcaagcaactgatatgaagaattgttaaccatatattgtgatatctcatatttgtatatatatttgatatatacaaatatgtttgttccaaattttgttacaaactacacagccaaatataagaagctatcaaatattatttctttagcaagtttgaattaatcaaacgcaggtcattataaattaaatcataacaggtggtataaaaacaacgtattttgttaaatttaagtgattgtagtcttagaattatatataggtcttttgttagagatgaatagttgatttctgatgtatttcctagtattacatcattaacgcaatgaccatatataatgatatagacaacgatgacagagaggtgactaagttaacatgttatgatcctcgtctgaataaactagaagactagccgcatgaaaattcttagttaacaaaaaatgatgttgtctatatgtatatctactactaatatcatgaacccaaattactcaagaattaaagaaataatattcctaacacaagttggcttttcgtaaactaaacttacggtattgttttatgcatcgatcataatgaatattttaaaacactaaaacatggttaaaaaaaaaagtaatccacatgcgattgttttggattggtccttttaaataaactaaagttttggcagagaggaaccaagtaaaaatgggcattatctaagaatggtcctaattccaagaagatattacactcttttacagattggacccaaacactcatgtgaagatgaaaaaataaactaagaatacaaaaagaagaaaataaaagaaaaaatcagagatcccgtcggagaaagaaaaagagaagatagagagatacaagtaacggcttccactaatctttcgccttctacatttttgctgctccgtccaatttttgtgtctataaaataagacagcttctttctcttgactttccaaattcactcaactttctctcactccttttttctctctctctctctatcctctacagagctcgcagcaactagcgcaggtactctctctttctcactccttaatctagatactaaagctgatcattttcatatctctcagtaatccgtttcgtctgatcgggtaaaacacacttccaattactccggttccgacctcgttgactttttcttcagatagattccaaaaaagttctcatctttacttgttcaatctcatagattccgatttgggtctgattgttacctctccacaactattgggttcctctcaaaacccttcgatttcttgatccatccttccttaattttcgattctcgaaaaccgttttcacaacttttttttataaaaaaaaaaatctgcaaaaagatctctctgataagaatttttaaaaactttccctttatggatgctctgaaacataaaagagcttttaagtttataccttcccttatattctctgttttcaaatctgtcagaatctgatcactcttttctttttatctacttcagg

SEQ ID NO: 10384 - DNA, 3000 bp, Unknown
  misc_feature (1)..( 3000): cDNA_ID_2715592_gDNA_ID_2213646_Annot_ID_132386 3000 nt of promoter + ATG
aaattgtgtgaaatcaaagaaagtggtttttagttgtttatttccgtcgttgttgtctttatttgtcaatatagttttctttacgttatttaattgagcataaactttttttatctttatagaatttgtatcacagtggttttactttgctttttgtgcaattagtgtttgggaaataaatagatttctgatgtgacgttacctttattatacttggaacaaaaaaatcaagattcgaataattgattgtctgtatggagaataaaattcggataatctaatctatctcgatctgacctgaaccatattgtgaaaatattgttttatattacgatattcgaaacaataatgtacgtgttcgacaattgaattttggtgcttctctcaaaaacaagaagagatcataaacaattaaaaatttagagatcataaactctctaaatactttgccaaaacaaaaaaaaaactctctaaatatagatagtggtgtgattttgtgtgagaagctatacgtgactacgacattattagtgcgaccgatgtttatttagagagttctaattacgaaaaagtaatcatagatctacatatagtccactaattgaagtcattatcttatagtagaatttgataggatccatttgaatttccgagtaagtccactaattgtgtatacttcacgttataaaaaaaaaaaaaaaggaaatcactcaaacaaggttaaaaggaaagttaattccgtttacgtatgtgggctgcaaaaaaaatggaacctaatcataacggtaagagaatactaccgtttgtatatatattactgttacaacttacaacaataatatattctcttactgcgtaacaacaacatatgaagctaaattatttgagtgacttgacgttgtttagtctcattatactatagtttgttctcgagcagatccactaagtagtctgtagcgtaatctagtggttgttgtatggcttgtctcatgaaacatgaaatcaaggattatactacagtctcagggcaaattagaaagcaaataggaagtggaagttttttttttttcttctgcctattcaattttctgctttgtggatgacgacataattatggattaagtgccaaaggactgatgaagatgacgaaataattatggattaagggccaaagatatgtcttttgacttttgtgagacttgaaaagtaaaaatacaatcaatagacaaaatcgaaattgaaatatggcatgatgaaatattgctactttgaacaaattatagcaagaaaaaacagctggaaattattggtaacagtactgataagttgtcgtgaatttggtacaatatatctcgtgattttttactataatggtcacaatttatcgtttatactcactaacacacgcacacacacccacacccacacacacaattctatctatttggccctccctatataacaacaacaaacttcgatacataaacaaagcaaaacaaaaaacaccttaaaccacttgtagaaacaaaacttgaaattgtaagaaatcgactttgagagaaactctccagtccttgaataatgccaaacacaagactctgtggaagtagctcagaagagaagattagtgatggtcgtgatcctaaaatctgggactgtgatagtactctctatgattcctacgaactcgtctcctttgttcacatcatcgaacgtaaactaatgcctttctctcctctcgctcggcagcctggtttgactctacgagctttgatggataaagatagcgaccattgttcctgtgcgtcgactaagaggggaccttgtattcaccggaggaaatattggtggaatggaaagaagaaagacgaaatgaaggaacgaatcaataagaagaagatgtttgattttagtttttggtggaatttttgttgtaagaacttgttcttctaatatgtaagcaaatttctatgccgagttgtttatgtgatgaaagttgtgtgtaggagcttgtcttacttcaaaattaatcgaagaaagtgagttcactgtgctcccatatttgctataatttacaaagtgaattttgtgcctagtgggcttatggttaggcccatataggcccatctcttagggtccgacttgagtacgaaaaccttattgatctcttaacaacaataacataaaggaagctactactgtattctctagggtttctattctctatttgctttaccttttgtattttgtactttgtataaagtagatataggcaggtaaccttgggtcgaacgaccgtcttgtaatttttgtttgtagctttgtttctttctcaaatgaattggaataagtctgattccatatatttccctcgttcaatcttttgaaaattactaatgaacaaatatagcataaaaattcaaaatcagaacagttcaagttataaagaataaatgagaaatagacaactaaccactttcttccacaccctcatcaatttaatgtttcttttcttttattgttgtcccaaaaccagtttggcttttgaccttaaccttgacttttctccctctttgattgatgttttttttcagcgttaatttattccagtaatttcccttagttttaaacattacaacactaactactaaatgtaagtaaaaaagtaaaggtaaatctttaaattttattccttggctgaaaaagaaagaaagttacgagttacaaaaatgggcccactttgtagattggcccgcccaaaataaatcgatttgaaactcaattttgtatagtcagtctctctcttcttcatgtttggtttcagagaatgaaaggcttaacaagagcttcttcattgactccatcttctgcatctctttagagtttatagatctaataacagcaataaatctagcttcttaagtcttcttggtttttcttctttaattgaatgctgagtatctttcttgtcagctcagtgactattttcgtttgtttgta

SEQ ID NO: 10385 - DNA, 3000 bp, Unknown
  misc_feature (1)..( 3000): cDNA_ID_3036175_gDNA_ID_2213646_Annot_ID_132388 3000 nt of promoter + ATG
ttggccaacatactaaaacagtaaaaacaaaaaatagaaattttatcaaatacatgcattgaaacataaatgacagttaaacagcttaaaatgacactttttataaacatatttcaaattctgaaatgacgcttaaattgaaacagagaatatcaatcaagaccagtaatttcaacaaattcacatgtagatgtaacttactaaatacccttaattaaattctattaaggcgtaagagtttttattagtctcaaaagtaattttattgtacaaattaaatttaatcagcatatgaagtgacatgtgggtctctgtataaggagagttatatctttttcaacacgcacccaaagtccaaagacctttcgtggaaattaccagacagtttccaaaactaaatgtagatttttatttttgttcaaagaatatttcatcggtgtaggtttattttggtaaatattccaaaagtttcaataacgtttatccatcccatcgataagaagatattgtgtttgaaagttttctttccttacgataccataacatgtacggagttataattttgatgttttttttttgtattttgctctaaagcatttacaccacaatcctgttaatacaagataatcttattaaattatggttggacatgaaggtaataacaactgctctcatttgacagcattctgttaagtgttaatcgtctttcttgagtttttcgtcaagctatgatcttatcatttcgatgttgatatctagccgatgtaaataagttaaagaccattctggtaacggtggactaatgcatgcattaacaagggaatgttctttacataaacaaaagcagatgataagacatcatttgatttgagaagaagttgaaaacatattgttcaatttataatcgttagttgttatcaattcaaagcaagctaagagcagcccaaattaagataataaacccttatggcactaattaatcatagatagtccatacatgcttgaataattatttactaagtgtgattaaagctattatttttatcacaaaaggcatgtgcatgtatatacgccactcgggcattttactgaatttagttttagtcataaattattcccttgaccagacgcgttaaacaagcgacgcgtcgtagaataaatatttatcttcaaaagaatttatattatttttctactagtattaaggaattaattaagttcgactcagcacagcagcctctaaaatatattaatttggagtcagaaagctacaaagttgataactgagaaacataggatatagtactacagtaacgtggatatatcaatatattatctacgatattcacaatttttaaactgaagaattcagtacgatgaatatggcaaatgcataaggttagatttcatctaaattcacacaaaatttgtttgttcgacgaacaaaatttgaatacataatggccacgatgctctgccattaatcatggatgtaagcgccatgattaaaaatttcattttacgatttttaaggtaaatcgttatgatacggagtatatcattattaataaataataaaacagtttgtattcctttaaattcttttttttgtttactaattatgacttaatatagtattactttataaaatcactgttttaaattttattaaatgcatttattccgtattatatattaactgtgtttttgtttttttttttaatttttggtaaagtactaactgtgtttttttctgtatccttctgtagttctgttcgattctattaaaaacctatatacattggtgaatagaatactacaacatatatggatgatggatcatagtgattacgaatttaaatcatattaataattaatgataatacgtcactgtcaattgtgtgaatgaaaaagacacattggtatattttctcaaaactacacctgcatggtttgatacttttttgatttgatccatagattcttgatttgcttgttagggccactaaaatttgattaatttcgatctttgaccccctaaaaatataactaactacataatcaacatcctatataaaaaaatggttgataaaatatatgtaaatcgagtatagagtatatatatgcaaatacatgcaataaatgactatatattggtaatttaaaataaataactcttttgttgtaaataaaacccataatttagctaccttaaaactacaatttaaaattcgaaataacgcaataattgggcaatttatgacatcacgagtcttcacgtcagcgaaacaaaagaaagacattcaatttcaaccgaatctaacgcggcaggacgtctttgaagaatattgtttattggttcactcgtctgaataactataactttaattattatttgttagtttttgtagataaaataggattagcttaaccgacttagtgagactcaccatatatgggttctattaagattggggagttagttgacgatttatagataacttgatatgatcattagtctgtctaatatataaaaattatagaccgaaaataataagataagaattatagttgcttaataggtatggaattagcaactacattttttttttatcagaaacgagtaacccctagactaaaacattccaattttatttgtaatattttaagacaaatttagcagttttatactattttatatattctagcaatataaaaaaagagtgaaacactaatagtctcctttatgtcaatttctctccaagatccttctcttttccacacaacttctggtcgaagattgaaaccaataataaatacaaaaataaaaattaatacttattgtctaagcacaaggacgagtaccatcatagaatctccatcattcatgtctataaatacatctagatactcacagacgaaactcacatctcccaccaatctcactcaaaagaaaatctaagaaaagattcttaattttctgaagtgaatgcaaagatg

SEQ ID NO: 10386 - DNA, 3000 bp, Unknown
  misc_feature (1)..( 3000): cDNA_ID_3036189_gDNA_ID_2213646_Annot_ID_181448 3000 nt of promoter + ATG
tcggtttaagaagtgtttacgtggttatcaacattaacttttgaattgaattatacgaaacggcaaaaagattatcaaaagtgttgacttgtgagctaccgtttttgccccttaaaagtctcaaattccaaggcgataaatggtcaagcaccctccacgctcctcctgtcttttattgccacgtgtctaccaccgttcccgtctgaatttgtcagcatctgtatgccacgcggcggccagtttccccgacgttaatttctccggtaattatcacacgtgtcgtgtagtcaatggatattaacttcgagcttattttatggagtttttaattgttttcaattagcgtttttttctcattggtgggtccacagattaatggaactaacgaaatataattggtgaatgaaaatgtctgtttcattgaattcatgcgtttctattaaagaagtcacagtttttaaaatgggttcacgtggtcgagtacttagctcgtgagccggcttcagtgtccatagtgtattactcagctttgtaacaacattattagagagaataattcactttcattgtataaatgacaaaaacaattaataccaacttgttttgataattacaaagtaacaaaatagaagcattcagagttttgaagttatatattcatttgaaatgtcttgaaaaaagttatatgtctttctttgacaaaacaaaattcagtaaatttcaatcaattatatatttttaaaagtactatacgcacacaattctttatacaacgacaaaaagaaattttacatctaaaaatttcgtatatagataaattaacacgtttgtaaaatattgaataaatattattttgtcactatatacacagtaatcacatgtaataaattaaaatcaatcgatatgtttcgttagatctctcaatagataattattgatataaactagtacgaaaataacataacatacacagttacacatacataaacatataatatttgtaccaaaattattaagaaaaagaaatttaaagctctcaatcaagagattttgtatgatatgaaatattcttctgatttttgaaccattttgcattagagaaaagtaaataaaactaaagtggtcctggaaacataaaaaaataaaataaaaatagagaaagaaagagatgctattcctggagactgagagtacagtggaggtccatgacatctcgtaacacccaacaacactcaacaacttgccaaattagctttcactagctgttgttatacattcatttcttaatttaaattggaatatcataaataacaccttataacattataaccaaagcataaactacatgcatatattcttagaagacattaactttttaattaatttccgattatagtgtgattacgctccttgcaaatactctacaagctatgaaagtaaaaaggtattggctactttcaccgccgctactatatctcgtgagtcgtgagtgaagccaagccaggctattattaagttgtgtactactcattccgtaaaaaccaaactgaaacagaactattccttttatagttaaacaccgaatttaattctaaactcaatcgtattaaatgagaaacgtaccattactttaaaactcaaactgaaactaaactaaaaatccggtaaaagttcttttactcatatcattggaaatagtttttgaagcaaagtaaaaaacactagaatagtgtaactagaaggaactactaatataaattttggttgctggtgagattctttttcctccttccccagcggacgtctccgtctcttcttctgcttctaacttgctccaaattttcatttcaatttttttgataggacttaaaaattccaagctcgcttatgagagtaatggcgtagcaaaatctttatctaactcttggctcttgtctttttttgtttgtttctcaacctacgccggatcttgcttcttcgaacttctccgacgcatcttcttcagattccgcagaagtttgcgtcgttttcttgaatccactcaaaattttattggaagtttgtgttgtttttactagctctgaatctttagagggctcaaaaattcgtcgagaaaaccagtctttggaagtgtagcattttggattcgcttgtgacttgaatcttgaatattaggtgaaaccgccttggatcttctcgttgatctttgtcgtggacatttttttttgtaaagcttagtagattctctaatatttaattagagagtatctgttcgtgttattctttattgttagataatgattaatcactgcacacaatcttattgaattttcctgttgcttttctcggcttgaattctgaagaagtagttagagagatggctttgctatatactcttgctagatctgtttgatttcttagattcctgatttaacgatttccttctaatttgattatccaaaatctagaaatggtaaaagtttcttgagttaaggttcatttattttacatttgactgtagtttttttgtgtgatttagatgcagacaggaccatgttgtgttttggattacttgagagatttactatctcaatagttcatttcatcgtacataatttttttttgtgaacttgtttaataggaatgatgatgaactattcttgttttgtgtgtatagtttgaagatggtaactttatgaattaattatttattacttattagattctgcagttgcgtcttcttgattcctaataaacaatgttaaagaacacacttttcatgcttcctatcattagaagtgtcaaagatgctgctcttttttaatcatttttcttcttacctgctgtattaacaatttacgtatatccaggtttctatttggtcaacaacatcagaaacatgtgtgctcagatgttgagctctttagattcaattgttgtgaacattgtcaaggagaatagtgattattgaaggatgcaagatttttatattcagctcta

SEQ ID NO: 10387 - DNA, 3000 bp, Unknown
  misc_feature (1)..( 3000): cDNA_ID_1442431_gDNA_ID_2213646_Annot_ID_181447 3000 nt of promoter + ATG
ttaaattaagaaatgaatgtataacaacagctagtgaaagctaatttggcaagttgttgagtgttgttgggtgttacgagatgtcatggacctccactgtactctcagtctccaggaatagcatctctttctttctctatttttattttatttttttatgtttccaggaccactttagttttatttacttttctctaatgcaaaatggttcaaaaatcagaagaatatttcatatcatacaaaatctcttgattgagagctttaaatttctttttcttaataattttggtacaaatattatatgtttatgtatgtgtaactgtgtatgttatgttattttcgtactagtttatatcaataattatctattgagagatctaacgaaacatatcgattgattttaatttattacatgtgattactgtgtatatagtgacaaaataatatttattcaatattttacaaacgtgttaatttatctatatacgaaatttttagatgtaaaatttctttttgtcgttgtataaagaattgtgtgcgtatagtacttttaaaaatatataattgattgaaatttactgaattttgttttgtcaaagaaagacatataacttttttcaagacatttcaaatgaatatataacttcaaaactctgaatgcttctattttgttactttgtaattatcaaaacaagttggtattaattgtttttgtcatttatacaatgaaagtgaattattctctctaataatgttgttacaaagctgagtaatacactatggacactgaagccggctcacgagctaagtactcgaccacgtgaacccattttaaaaactgtgacttctttaatagaaacgcatgaattcaatgaaacagacattttcattcaccaattatatttcgttagttccattaatctgtggacccaccaatgagaaaaaaacgctaattgaaaacaattaaaaactccataaaataagctcgaagttaatatccattgactacacgacacgtgtgataattaccggagaaattaacgtcggggaaactggccgccgcgtggcatacagatgctgacaaattcagacgggaacggtggtagacacgtggcaataaaagacaggaggagcgtggagggtgcttgaccatttatcgccttggaatttgagacttttaaggggcaaaaacggtagctcacaagtcaacacttttgataatctttttgccgtttcgtataattcaattcaaaagttaatgttgataaccacgtaaacacttcttaaaccgaccaaataatataattaaagatttgattgattgataagcttttgtgttttctttttctgttgttgtgcgtgtcaacgtgttgtactctccgtaaacattcatgggccttttcaagtaactgctcaagctggccgatagcaatttaaaataatcaataagcccatattgtttttgaataggcccatggcttattagggcaacatataacgctttaaccacttcgtcatgaaaaaacccatacaacaacatgcagcaactaacattcaacataactgttttcattagcatataatgtacgaaaacatgcaacttatctctataaactgttagatcatgtacttaaaaatgcatagattaaacgttttcaatttatcataacatgtaccacacaaaaaaagtagctagagcagctattcatcttatagaatatatagacgtatctcaccttcgcactgcagatcttatacaaatctttttaagaaaatgaaaaaaggggggctaatctcatatattcttcgaagtctttttgggttattaaatagctttaaccaccacatgtcataaataattgttgttagatacttgtctgattcatgcctttttttttgcgagtcaaagctttgtatacaacaaatgtgcttctttgctctttcgtctcactccatttagtcaaaaattccatttgtgatataaaaatgaatagatgaaaccttgaaatatgtaatgaaaccggtctcgagatgtggttaaagcatatttgtaatcaaaaatatataattaatgaagaaaaacaagtacgttttcggaccacatcggaccagtagaggcacacaaccatacgggtgttgtgcccacttttgacgacattaccatcagaccaaaggaatatatgaaagatacatagagagagatatgttctcgaactaactatttctttttttaccctcttctgattataatattattttcccgttttgctgttctcttctaccaaactttcctcttatatcaaactttcaaatcgaattcctgaactttatatcacagtccttatttgttttctcttgcaacaaatgaatttttttgttattgttgaatagttatatttttaaataagtagctttgacagaatgtatatttaatgtagaatagcaaataaactagaaacaagaacacatataagggacatactggtcatttcgaaagtcaaagccagaggagaagctactatttctccaactgtctgtaaacgaggaatttttacaaccgcaagtcaaaggatttaaaataagtagttatggttgtatctgtcgttcttctttctctatgaactaaaggccgttggaagcaacacacacacacacacagtgaaacactacagtttacagattcgttttctttagctcaatcgaattatattatttcttaatcagtcaatatttaaataatggaggatgatgataagtattaaataaataattattctaggattaatcagacatgcgcagttatataataatcagtttgattttcttttccttttcgagcccctctctctctcactcttttcttttccgagaacccaacaaaaaaaaagctactattaatccttcccctcgtgaggaaatcatttcttcttgtttctcgagatttattctctttctctctctctttctctgtgtgtttcgtgtcttcagattagttcgatg

SEQ ID NO: 10388 - DNA, 3000 bp, Unknown; identical to SEQ ID NO: 10383
  misc_feature (1)..( 3000): cDNA_ID_1838273_gDNA_ID_2213646_Annot_ID_181442 3000 nt of promoter + ATG

SEQ ID NO: 10389 - DNA, 3000 bp, Unknown; identical to SEQ ID NO: 10382
  misc_feature (1)..( 3000): cDNA_ID_3036204_gDNA_ID_2213646_Annot_ID_181440 3000 nt of promoter + ATG

SEQ ID NO: 10390 - DNA, 3000 bp, Unknown; identical to SEQ ID NO: 10380
  misc_feature (1)..( 3000): cDNA_ID_2991409_gDNA_ID_2213646_Annot_ID_181439 3000 nt of promoter + ATG

SEQ ID NO: 10391 - DNA, 1853 bp, Unknown; identical to SEQ ID NO: 10379
  misc_feature (1)..( 1853): cDNA_ID_2709039_gDNA_ID_2213646_Annot_ID_181438 3000 nt of promoter + ATG

SEQ ID NO: 10392 - DNA, 3000 bp, Unknown; identical to SEQ ID NO: 10387
  misc_feature (1)..( 3000): cDNA_ID_1442431_gDNA_ID_2213646_Annot_ID_132389 3000 nt of promoter + ATG

SEQ ID NO: 10393 - DNA, 3000 bp, Unknown
  misc_feature (1)..( 3000): cDNA_ID_2715584_gDNA_ID_2213646_Annot_ID_132390 3000 nt of promoter + ATG
agtgtattactcagctttgtaacaacattattagagagaataattcactttcattgtataaatgacaaaaacaattaataccaacttgttttgataattacaaagtaacaaaatagaagcattcagagttttgaagttatatattcatttgaaatgtcttgaaaaaagttatatgtctttctttgacaaaacaaaattcagtaaatttcaatcaattatatatttttaaaagtactatacgcacacaattctttatacaacgacaaaaagaaattttacatctaaaaatttcgtatatagataaattaacacgtttgtaaaatattgaataaatattattttgtcactatatacacagtaatcacatgtaataaattaaaatcaatcgatatgtttcgttagatctctcaatagataattattgatataaactagtacgaaaataacataacatacacagttacacatacataaacatataatatttgtaccaaaattattaagaaaaagaaatttaaagctctcaatcaagagattttgtatgatatgaaatattcttctgatttttgaaccattttgcattagagaaaagtaaataaaactaaagtggtcctggaaacataaaaaaataaaataaaaatagagaaagaaagagatgctattcctggagactgagagtacagtggaggtccatgacatctcgtaacacccaacaacactcaacaacttgccaaattagctttcactagctgttgttatacattcatttcttaatttaaattggaatatcataaataacaccttataacattataaccaaagcataaactacatgcatatattcttagaagacattaactttttaattaatttccgattatagtgtgattacgctccttgcaaatactctacaagctatgaaagtaaaaaggtattggctactttcaccgccgctactatatctcgtgagtcgtgagtgaagccaagccaggctattattaagttgtgtactactcattccgtaaaaaccaaactgaaacagaactattccttttatagttaaacaccgaatttaattctaaactcaatcgtattaaatgagaaacgtaccattactttaaaactcaaactgaaactaaactaaaaatccggtaaaagttcttttactcatatcattggaaatagtttttgaagcaaagtaaaaaacactagaatagtgtaactagaaggaactactaatataaattttggttgctggtgagattctttttcctccttccccagcggacgtctccgtctcttcttctgcttctaacttgctccaaattttcatttcaatttttttgataggacttaaaaattccaagctcgcttatgagagtaatggcgtagcaaaatctttatctaactcttggctcttgtctttttttgtttgtttctcaacctacgccggatcttgcttcttcgaacttctccgacgcatcttcttcagattccgcagaagtttgcgtcgttttcttgaatccactcaaaattttattggaagtttgtgttgtttttactagctctgaatctttagagggctcaaaaattcgtcgagaaaaccagtctttggaagtgtagcattttggattcgcttgtgacttgaatcttgaatattaggtgaaaccgccttggatcttctcgttgatctttgtcgtggacatttttttttgtaaagcttagtagattctctaatatttaattagagagtatctgttcgtgttattctttattgttagataatgattaatcactgcacacaatcttattgaattttcctgttgcttttctcggcttgaattctgaagaagtagttagagagatggctttgctatatactcttgctagatctgtttgatttcttagattcctgatttaacgatttccttctaatttgattatccaaaatctagaaatggtaaaagtttcttgagttaaggttcatttattttacatttgactgtagtttttttgtgtgatttagatgcagacaggaccatgttgtgttttggattacttgagagatttactatctcaatagttcatttcatcgtacataatttttttttgtgaacttgtttaataggaatgatgatgaactattcttgttttgtgtgtatagtttgaagatggtaactttatgaattaattatttattacttattagattctgcagttgcgtcttcttgattcctaataaacaatgttaaagaacacacttttcatgcttcctatcattagaagtgtcaaagatgctgctcttttttaatcatttttcttcttacctgctgtattaacaatttacgtatatccaggtttctatttggtcaacaacatcagaaacatgtgtgctcagatgttgagctctttagattcaattgttgtgaacattgtcaaggagaatagtgattattgaaggatgcaagatttttatattcagctctaatgaagaacggacaggtttgtccctaacacatcctcaccaactttttccttattgttataatcttgctttcgtatacttagataagaagttgagccatgatagaaacttcattattaagaatacgtgatcctttagttattggtatgcttgattggaaagaaagttgtagctactttagcattgatatacttagatttaccaagaagtgaagaagtaaaagagagtttgtataacaggagttgcagtcttctacccaagtttcacatgagtcccaaggtgaacagaaagttaatttatcagtagaagctccaatacaagattctggttctgtatctgcctcaagtaatgacggtaggaaagtgtcaagacaagatattgaacttgtaagaacactttgccaccttcctatctttatagactttcttgtaagtttccaatcatctgataaaaaaacatattctaaatgactgatgcaggtccaaaatttgatagaaagatgtctccagttgtac

SEQ ID NO: 10394 - DNA, 3000 bp, Unknown
  misc_feature (1)..( 3000): cDNA_ID_2704860_gDNA_ID_2213646_Annot_ID_132391 3000 nt of promoter + ATG
tacaatcacttttgtttatttccatatcaaagtaacattgtgttagtaacttaccctttatgataacgttcttttgaattttagtatggcaaaaactggaagaagaaaacgcagagtttttcagggcatattacatcagactgaaactgaagaagcaaatagttgtattcaatcatttgcttgagcatcagtatcacctcacgaagtataatgtacattcaaaagttcctctggtcccaatgcagaacggtattcatcctatggcatctggtaagtctgactccttatatcacttgttggtgtagatggttcaatgatttgtttgtggtttcactattattataacactaaatgtttgcagcgcagtgaacaacatgcccatgggatacccagtactacaacatcctcagatgcatgctcaaggtcatccccatcttgatcctatgagctgtggaatgtcaagctgccatgtggttaatggagtccctgcacctgctaatttccaaccaatgaggatcaactcagggaatgagtaagaactaacttggattgagttttgtttttgcatttttggtgctttagacttaagaactaattcctactgttgtttccggtgcttggtgtagtatggtaatagatacaaccatggctgaaccaactccaatgattccaccaaatagtggtatgtcggatatgccagtaagtccagcttctgtggcgtcaagcggacactttccatttgctgcttcagacatgtcagggatgggaatggacacgtcagctcttgactctgctttcacatctgatgtcggaacttcagtagggttacaacttggatcagatggaggagctggaaattctagagaccctctcaggccatttgatcagataccttggaactttagtctctctgacctcactgcagatttgtcaaatcttggaggtaagctctttttatcaaatgccattgcgagtttagctcgaaaaactttataacatacgttggtagatgctccatgtacaggtgtactccatagaatgttgcatatcaatgatcttttactttgcagatttaggggctttaggaaactatcccggttctccttttctgccatctgattcagagattttacttgactctcccgaacaagaggacataggtaaacattagctctcactctccatctaaaaggtgcaatcttataagaatggtttgaacatggatgttatagatttaaaagtttcatgtcctatgatcactaaccaatatcttcgtttctgtatcccgtagatgaattctttgtggattcgattccaggacctccatgttctcagtcagaagaagacaagtcttaatcaagcttatgatatttgatcaatagaaacagtcttattatctagcaagcaagcattgtttgtgccgtttctctatattagagaaaacctcccaaaaggatttaaaatcttcttcttttttcctcttctaagggtaatgatcgatcatagattcatagacttagattaattgctcagttgtttgtttattgtacacctttattttgggactttgctaagcattgtataatatctcccaataatctattttcttgttggatagttcatcaatatgcatgggaatatctcatttttttccttctaataaatactccctattatagaaatctataaaagtgttcataattataactcgtggaaattaatttgagctttaaggaatgattgatatctttttgtgaaacaaaaaatcacaaaaagaaaatcattgatttttttttttttggttggaaaatgattgattcttttgtttttttgggtaggaaaatgattgattatttttgtagaggagaaaatgacgtactctaaaattcagaaaaaagaaatgacgtacgccaaaaaaagtatgaaagtctcttcaagactaaccactaaacaccaaacaagatataattttcttttttttttttgtatgtggagtagaaaaatcattgatttcgtatataggtagactaatcaacgtttgtggattcagaatttcaaatacaagtgtccgtgaattaaatccaagaccgtgaatgcataaaaaaaactaggtctataaagtgaaaaaaaatacaaatattaagggagtaactgagtcatcataactatgaaaaatatgattgtttgttatacataaaaaaattatgaccatacatatatattttctttttaaaaataatgaacatattgaggtaaataaataaacaacagattaaaatattatatatcatggtaagaaccacaacatatatatataagttgaattagtaaattaaaaatgttggatggaatttgctcattcactagaaaaattattttcatatttcgtctcaagaaaaaccaaattggaattgtaatttttttgggttgactgactcagtcttcgtcaaaagtcaactcaactttattccctttccaaaatttattattattgaaaacttgtctttttcatgtgtgttccaggctcgtttcttcttcacttagtttcaattcaaagttgtactaaatcactacttcgccaaaattagaacatcattatcttcgagggtctcttctctcttcatactacttcaagaaataattaaacctttttttcccttttaatctttcctgtcgggaagacttttaagtaccatttcttttccgggaaacaaattctcgaataatcacagaaaaataccttggttcactttttttactgtatagatcgtccattgaaatcaaggttttattctttaaaactttggtctttatttcacaacttctttgaacttcaaatagtttaaaatttactctgtttcatcaaattactctgtttcgtcaaattactctgttttgtcagcttgctcttttctaaaacgtggaagtaaataaaattttgacataagtatattttctcccacaggttcaagaatctgtggaagaaaacaatcagcgatg

SEQ ID NO: 10395 - DNA, 3000 bp, Unknown
  misc_feature (1)..( 3000): cDNA_ID_2715580_gDNA_ID_2213646_Annot_ID_132392 3000 nt of promoter + ATG
tgccaatatgttccgaggatagcgagaatctatccgcttttcaaggaagtaacaagaacttctggtttggtaactgaaactgcttgggctggtgctgctttaaacctattcctctacatgttagctagccatgtaagaaaagattattttatttgattctttgctccacttgattaggttatgtttgggcaaagataacggttttaaccattgcgaaaaatggacaggtttttgggtctttttggtacttgatttcgatagaaaggaaagatagatgttggcgtgaggcgtgtgctaagatacagaattgcactcatgcatacttatactgttcaccaacaggggaagacaataggttatttttaaacggttcttgtccgttgatcgatcccgaagaaatcacaaactcgacggttttcaactttggtatattcgctgatgcattgcagtctggagttgtggagtctagagatttccctaagaagtttttctactgtttctggtggggtctccgcaatcttaggtttgtaacatctaaaactcttacttattacggttcggttactttttgttatctaatcgatgaaatcttatctttctgtgtgtagtgctttgggccaaaacttgaagacgagtgcctttgaaggagagatcatttttgcaatagtcatttgtatttctggactagtcttgtttgctctcctcattggaaatatgcaggtaatcatttctcttctcctttgagctcttaaaacaaggaatatccatatatatagtcttaaagagttctgtgatttgtagaaatatttgcaatcaactactgtaagagttgaggaaatgagagtgaaaaggagagatgcagagcaatggatgtctcatcggatgttgccagacgatctgagaaaacgtatccgtaaatacgaacagtataaatggcaagaaaccaaaggagttgaggaagaagctcttctctctagtcttccaaaagatctcagaaaggacattaaacgccatctttgtctcaagttgctcaaaaaggtaaccttttattttgtcccatcataacttcttgaattcactgttttgttttgtttcaggtgccttggttccaagctatggatgatcggttactagatgctctatgtgctcgtctcaaaacggttctttatacagagaagagttacattgtgcgtgaaggtgaaccagtggaggatatgttgtttataatgagaggaaatttaatcagcaccactacttatggtggcagaactggtttcttcaattctgttgacttagttgctggtgatttctgtggagatcttctcacttgggcattagatcctctcagttcccaattccctatctctagtagaaccgttcaagctttgacagaagtcgaaggctttcttctctcagctgatgatctcaagtttgtcgctactcagtatcgtcgcctccatagcaagcaactccgacacatgttcaggtaatactttcaattgaaaaaatgcatgttgagttaattataaaagttaacatattggataatgaggacatatcgtatacctatctcgtttctcaagtttccttcaacataataaccctaaatctttttattacctaccttgtatcttgtttctcaagttacctttaatattataacctaaacaactttttgtctccaggttttattcagtgcaatggcagacatgggcagcatgttttatacaagcagcatggaagagacattgtagaaggaagctctcaaaggctttacgtgaagaagaaggcaaactacataacactcttcagaacgatgattcaggaggcaataaacttaacttaggtgctgcgatttatgcgtcgaggtttgcttctcatgctctgaggaatctaagagcaaatgcagcagcccgaaattctagattcccgcacatgttaactttgttgcctcagaaaccagccgatcctgagtttcctatggatgaaacctagttgtgtatatagttgttgactctatctctatgtaatgtgatcgctagtattttttgcaaatgattatgtaaccagtaaagagctttatgtgaaataatcaataggaaaaattcttatagagtttagttaaaaaataataattaatggagacattaattttagcgagaatctcaccaccacaaccactgtaaatgttttgctatccaaaaacactttctaagtcctaagctttaaaagcatctctcattaaacaatttttccacatagttaggagagtttactagctagagacggtagacttatctctctattggtggtccagcttggcttcactctctcgaattgacgagtttagtcttattacgacgactttcaattgggtctgtattgactaaaagatggccaactaaaataatgatttaagtatatatttgaagatggtacgaaatgggcatgttgtgaaaagaagacaggtagagaaattggattttgtgaatattattgtaagttgtagggcaaagagagtgagactgcagagcccccaccgtagacgactttactgtctcttcaagtccatttagcttaccactctgcatccacatacatgagtctgtgttaaagctggagaacatcgatttgcccaccatttctcactgccaaagccatacccatatttattctctctcggtctctcttctcggtctctcttctcagtctctcactcccacagcctttagttcgagaagaccgaaggggacttcattttcttgtacgggaattaaaatattgaagattgacagataaaaacatgaatcttcagaggagaaaatttgttaggtagcttcttggaatttttatgaacaagtttaacatagcttcaatctagtatttttatatttacttttggcagtagtgatcatatcttgttgatacaggcttgatagtacgggagttgatggaaaattgaaaagtgttagaggacgcttgaagaaggtttacgggaag

SEQ ID NO: 10396 - DNA, 3000 bp, Unknown
  misc_feature (1)..( 3000): cDNA_ID_2704856_gDNA_ID_2213646_Annot_ID_132393 3000 nt of promoter + ATG
caactgtgcatgatggatggctactatatgtatataggtgtgtggggctttttggtatttgagttcaatagaaaggaaaagcacatgttggcgtgccgcgtgtgctaggacatccgactgcaatctcacggtcacggatctgctttgtaaacgagctggtagtgacaacattcgttttctcaacacctcatgcccattaatcgaccctgcccaaatcacaaactccacagacttcgactttggtatgtatattgatgcgttgaagtcaggggtcctagaggtgaaaccaaaggattttcccaggaaattcgtctattgcttttggtggggtctccgtaatattaggtactaaattgtattatgctaaactctctgccgtgagacatatatcaatccacttgatagattaatccgctctacagtgctttgggccaaaacctggagacaagcaactctgcaggggagattttctttgctatcatcatatgtgtctctggtttactcttgtttgctgtgctcattggaaacgttcaggtaatgttcataccttagaactagagtttgatctcataaagctgattcttaatagatgtttgtttttggtgatcgcagaagtacttgcaatcatctacgactagagtagatgaaatggaagagaaaaagagagacacagaaaaatggatgtcctatcgggagataccagagtatttgaaggaacgcattaggagatttgaagattacaaatggagaagaaccaaaggcaccgaagaggaagctcttcttcgtagtcttccaaaagacctcagactcgaaaccaaacgctatctttttctcaagttgctcaaaaaggtaaccttttattttgtcccatcataacttaaccaactcctcttgaattcactgttttgttttgtttcaggtgcctttgctccaagctatggatgatcagttactagatgctctatgtgctcgtctcaaaacggttcattatacagagaagagttacattgtgcgtgaaggtgaaccagtggaggatatgttgtttataatgagaggaaatttaatcagcaccactacttatggtggcagaactggtttcttcaattctgttgacttaattgctggtgattcctgtggagatcttctcacttgggcattatattctcttagttcccagttccctatctctagtagaaccgttcaagcgttgacagaagtcgaaggctttgttatctcagctgatgatctcaagtttgtcgctactcagtatcgtcgcctccatagcaagcaactccaacacatgttcaggtaatattttcaattgaaaaaatgcatgttgagttaatcatattggataatgatgacatatcgtatacctatctcgtttctcaagttaccttcaacataataacccaaaatctttttatcacctaccttgtatcttgtttctcaagttacctttaatattataatctaaacaactttttgtctccaggttttattcattgcaatggcagacatgggcagcatgttttatacaagcagcatggaagagacattgtagaaggaagctctcaaaggctttacgtgaagaagaaggcaaactacataacactcttcagaacgatgattcaggaggcaataaacttaacttaggtgctgcgatttatgcgtagaggtttgcttctcatgctctgaggaatctaagagcaaatgcagcagcccgaaattctagattcccacacatgttaattttgttgcctcagaaaccagccgatccttagtttcctatggatgaaacctagttttgtatagttgttgactctatctctctgtaatgtgatcgctagtgatttcttgcaaataacttttgtgtaaaccagtaaagatatttttatgtgaaataataatcaataggaaaatttcttatagagtttagtaaaaaaacaattttaatggagacgttttagcgaatactcaccacctcaaccactgtaaatgttttgttatccaaaaacttctaattcctaagcttttaacttttaaagcatctctcgttaaacaatttgtatttttttgcaaaacaaaaataaaacgctgtatttttaaattagaatccttaaggttgggtatttttaagtgaatcaaaaattccaaccaaagtaatggaactaaataactgttttttattagaaaactgaatacgtacatataccaaagtacataataaaactagttctattattgatatatataaattaaacacagatttagattatatttaaacacatagctaagattgtttactagagagacttaattaggtctctctattggtggtctagcttggcttcactctcgaattgaagaggaacaacgtgtttgtttagtctttttaggacttacaattacgtctctgttgtttagtaacgatggcaaataaaaataatgatttagtatatttgaacatggtcccaaatgggcaagttgtaaaaagaagacaagtagagaaaattcaaaattggatttcgtggatattattgtaagttgcagggaaaaaagagtgagactgccccaccgtagactaaaatgatttagcttaccactctcactctgcatccacagtttaataattacccctttaatattttaatcattattttagtagaccaaaactgtttagtgttgaaacttgtgcatccacatgagtgttggttaaaggttgagaacatcgatttgccaaccatatctcacagccacagccatttttattctctctcggtctctcttctcagtctctcactaccacagccttaagttcgagaagaccgaagtggacttcattttcttgtacgggaattaaaatattgcagattgacgacatatactaacatgaatcatcggaggagtaaatttgccaggtacttcttcgaagttttgattaactactatttcatatttggttgtgatagtgatcattgttgatacaggatagatagt

SEQ ID NO: 10397 - DNA, 3000 bp, Unknown
  misc_feature (1)..( 3000): cDNA_ID_1808176_gDNA_ID_2213647_Annot_ID_132396 3000 nt of promoter + ATG
ctgttccaataccactcaccggaattccacagaataaaagattccgatcataaattctacaatcatcgaattataatagtgatatcgatacaaacataccaaagcttagaactttacaaaattgaaaactcgccggaaaaaaagatgcaaaggggacctctgattaaacgacgtttcttcttgtttgtcctctcgcatcaactgtactgggcctaataaataaacggttctggattattgggcctaaagtagtgaggaatcatggcccctttatataacgtgtgcgttactaaaaacacacactgagaaactctcaatctgagcagatatttacccaatcagggattcaggaagagaagcagagaaagaaatggagataacactgaacagtggcttcaagatgccgatcgtcggcttaggagtatggagaatggagaaggaagggattcgagaccttatcctcaatgccatcaagatcggctatcgccatctcgactgtgctggtattcacttgttctctcaaaaccttctctttctgatctttgttgcttctggtttgtctaaatatgtgatttgaatactgggtttgttttaactttttgatagttggaatctttcttggaaaatatgtctttaagatttgttttttttttcatagtctctataaacttgttatctaaagtaaatgctctctgtacatctttatttgcatctgattctgaagttctaagtatttggaatcatagaatgatctagattctattgctgtattgatgacagattgttctataatagcttttaacttgttacttattatagacagagttcagctttgttttaattctattgtgtgatttgcgttgttttaagtcttgattttggtgtgttcgttttccttggtgcagctgattataggaatgagaccgaagttggtgatgctcttacagaagcattcaagactggtctggttaagagggaggatctcttcattacaaccaaggtccaatcgaaaactatacagctatgatctcaatttaatgtgagcaagctctgatctgtgatctgaattggttttttgcagctatggaattcagaccatggccatgtcattgaggcctgcaaagacagtctcaagaaacttcaacttgattacctcgatctcttcctcgttcattttcccgtagcaacgaaacacaccggtgaggcctctgcctcattagcgttttattagtctagagtcagagaccattgcatttcgttttattacaagtcctcctttttcactgactgagatcaagttttcttaagtgtcttctatatatgctttgcaggagtagggacaaccgatagtgctttgggcgatgacggggtattggacatagacacgaccatctctctggaaactacatggcacgacatggaaaagcttgtttctatgggtttagtccgcagcattggaatcaggttcaacttctctcactatcattacaagttctcttgtttagtcgccaatatatgaattttttgaccattaggttttttgcagtaactatgatgtctttctaacgagagattgcttggcttactccaagatcaaacctgctgtgaatcagatcgagacacatccttacttccaacgtgattctcttgtcaaattctgccagaaacatggtatctgtgtcactgctcatactcctctcggaggtgccacagccaatgccgagtggtttggcaccgtgtcatgcctggatgatccagttctcaaagtaagccccatcctctaaaccttaaaagtttggattgaacctttgacaattaaaaaaggactgcgtttatctgaattcttaggatgtggccgagaagtacaaaaagacagtggcacaagttgtcctgaggtggggaatccagagaaaaacggtggtgataccaaagacatcaaagcctgcgagattggaagagaactttcaggttttcgacttcgaactatcgaaagaggacatggaagtgatcaaaagcatggagaggaaataccgcacgaaccaaccagccaagttttggaacattgatctctacgcttgatcacactctctctatctacatgaataaatgaagcttaagaagataaacaacgagaagaagccatagctttacctgaaacattctcaaatgtttgtgagcctatctttcatacataaactcatgttgttaaacagattatgatttcttaagtactacaatatcacacattgatggaaagtgatatagatttctctcttctctatttatatgcttaaatccacaatgaatcattattgtaactgaaagaggatatttaaaaagacgagtatacccttgatttctcttgtttagtagtagagaagagggtaatttggtaaatgacgaagtaagtacattgagcttcttcgcggacagagacactatctctctctctctctaccctttggatctttcttctcgatcaattatccattttgcccagattttttccagaagctcatcgaattcgtaagctttcgcgccttttcctctctttaatttatttgttaatcaattttgaatgtgttgtatctctagggtttataatttcagtttcacccttgttttctattgtttcgcggaataatctcttgtcatggaaggtttagattgattcgacctttttgatcttgacctaatttattccaattttcgtaaaattgttccttaagacctgtttctctgactagctcagattgattttggtatctgaatcaattgcggaaccctaactggcagatcaattcgagaagttttgattttgtttgaagatagtgaattgcgagttcagtgtgctaatatctgcttgtaattcttactcttcaattgttttcatagatcgaatcacaatgtttgaaatttggtttcactgttgctgagtgtgtttggaggagaagcttgattggttcggtgtttcactgtttgaagattataagagttatg

SEQ ID NO: 10398 - DNA, 3000 bp, Unknown
  misc_feature (1)..( 3000): cDNA_ID_3036229_gDNA_ID_2213647_Annot_ID_132399 3000 nt of promoter + ATG
tcactactttaggcccaataatccagaaccgtttatttattaggcccagtacagttgatgcgagaggacaaacaagaagaaacgtcgtttaatcagaggtcccctttgcatctttttttccggcgagttttcaattttgtaaagttctaagctttggtatgtttgtatcgatatcactattataattcgatgattgtagaatttatgatcggaatcttttattctgtggaattccggtgagtggtattggaacaggtttcctaggatcttaatgggcttgtttcaaaaggtgtgatattgaaacttggagatggttcttcgtatttctaggtttcttttcttctgctcagattcgaaattggagtcttaggttttcttaaaaaagttgaagttatctgatattatattcttaagcttcatttattcatatagatagatagagagagagagtgtgtgtgtgatcaagcgtagagctcaatgccccaaaacttggctgtttggtgcgtgcggtaattcctctccatgcttttgatcacttccatgtcctctttcgatagttggaagtcgaaaacctgaaaattctcttccaatctttcaggcttcgatgtctttggtatcaccaccgtgttcctctgaattccccacctcaggacaatctgtgccactgtctgtttgtacttctcggccacatcctatgaattcagacagacaaaaggtttaattatttaactgtttcagtccaaacttttaaggtttagaggatggggcttactttgagaactgggtcatccagacatgacacggtgccaaaccattcggcattggctgtggcacctcccagaggagtatgagcagtgacacagataccatgtttctggcagaatttgactagagaatcgcgttggaagtaaggatgtgtctcgatctgattcacagcaggtttgatcttggagtaagccaagcaatctctcgttagaaagacatcatagttactgcaaaaaacctaatggtcaaataattcatatattggcgactaaacaagagaacttgtaatgatagtgagagaagttgaacctgattccaatgctgcggactaaacccatagaaacaagcttttccatgtcgtgccatgtagtttccagagagattgttgtatctatgtccaataccccatcatcccccaaagcactatcggttgttcctattcctgcacaaggcttacatgttacagcttattactctgtgtgccaattgctagagacttgagaaaacttaattttccagccagtaacaaggctgaaatgcaatggtctctactcgaaactgataatattcatgaacaaggctgaagcctaacccgtgtgttttgtagctatgggtatatgaacgaggaaaaggtcgaggtaatcaagttgaagtttcttgagactgtctttgcatgcctcaataacatggccatggtctgaactccatagctgcaaaaccaagacagagagcattcgatctgaaatgaactgatatcaaaggtatgtagtagtttaacttaaagccgtttggaccttagtcgtaatgaagagatcctccctcttgacaagacctgtcgtgaatgcttctgtaagagcctcaccaacttcagcttcgttcttataattagctgaaccaagtaaccccaaaagatactcataaatcaggatacagaacaaagcaactcactcacatgcaaagaaacaaaaacaattgtctgtgatacagcaaagacttaagatcattctacgattccaaatttccaaatacttaaaaacccaaatcttaagacataatttccaagtaagattccaactttcaacaaattaaaacaaaacctaatattttattcacatatcctgacaaacccgaagcaacaaagatcagaaagaaaaggttttaagcagtgttaagttataccagcacagtcgagatgacgataaccgatcttgatggcatcgatgataaggtctcgaagctcttctttctccattctccaaactcctaagccgatgatcggcattttgaagccactgttcagtgtaatctccatttcttcttcttgcttctctcctcaatccgtgattgggtagatatctgctcagaattgagagtttcccagtatggtaagttggtaacgcacacgtcaatataaagtggtcatgattcctcactattcgaggcccaatgggctagtaccgttttttgtgaagcccaaactgttttacaaagacatgaatcaatacgcaccgtatgggtatatatatatacaagcaacgttatcacaggtcctcaaagtttgcatctttacttgggttgtgtctggaatcaattacttcctaaaggtaattttattggtcgggcagctcaatcggtggtttctgagttcttattcttctctgataatctcaagacgagcttttaattttgtaaagtttttagctttggtattgtttgtatcgatcccactctcaacttttgatcggaatcttctgttctggggatttccggtgaattgtttaggaataggtttccaaggatcttacttgggtttgtttcaaaaggtgggattttgcaagttgtagatggttcttcgattttgtaggtttctattcttctgctgagattcgaaattgaggtcttaggtttttgataatagcttgtttagttatctgttaaagtcactaactttgatgttccttccggtcggaattgttggccacaattgattattgaaacccttaaattaaagagtgccctctttttctcttttatgatttggatctcttgtaattgacttgtgtgaggtttctttttctgtaggttgccatttgttaacttactctgttagtctactaccaccaataactatggtaagtgtattcaaagctttcctttttaaccgttagtcttcactctagcttttatatctcgcacccttggtttgtttgtctaaacctttggaatttaaactcg

SEQ ID NO: 10399 - DNA, 3000 bp, Unknown
  misc_feature (1)..( 3000): cDNA_ID_3036249_gDNA_ID_2213647_Annot_ID_181501 3000 nt of promoter + ATG
ggaagaagaaaaagtgatggtcgagtgagttctgtatccattgaggatgtgagggatgtcgaggagctacaagctgttgatgcgtttcgacagtcgttgttaatggacgagttgcttcctgatagacacgatgattatcatatgatgttgaggttcttgaaagcgaggaaatttgatgttgagaaagctaaacaaatgtgggctgatatgattcaatggaggaaagagtttggtactgacactattattcaggtatgctattaaatagaagatagtagtttaaaccattgttgtctgtttttgtaacgttttatttctctcgttaggattttgatttcgaagagattaatgaagttttgaaacattacccacaatgttatcacggtgttgacaaagaaggtagacctatttacattgaaaggctagggaaagttgatcctaacagactcatgcaagttacaagcatggatcgatatgtaagatatcatgtaaaggagtttgagaggagctttatgatcaagtttccttcctgcactatttctgcaaagaggcatattgattcaagtacaactattcttgatgttcaaggagtggtaagtattttctacagttcatgatattagttgtgaaatgagtttttttctcatgtgtttatataacttcatattcagggattgaaaaactttaacaagtctgctcgagatcttatcacacgattacaaaagattgatggagacaattatcctgaggtattagttaattggagcttctaatacttgatctcaggtatcaaatgctaatcttggctttgtggtatttcatgcagactctccaccaaatgtttattatcaatgcagggcctggatttaggctactctggaacactgtcaagagctttcttgaccctaagacatctgctaaaattcatgtatgagagatctaagttatatctctatttaaaagtcttgtctttgattatatagaattcaatatggactattctattgtttatgtaggtactcggatacaagtatctaagcaaattgcttgaagtcattgatgtcaagtatgtgaaccttgacccacccttatttgatctgttctatcgaaagctgcacgtttttttgtttttgcttatgttcaaaatggtctgcacttttttatagcgagttgcctgagttcttgggaggtgcatgtacttgcgcagatcaaggcggttgcatgctttctgacaagggaccttggaaaaacccggaaattgtgaaggtcatttacttagactaatctctttttggattctatttgtatcatccaagttggaatctgagacatttggttttcttctcattatttcagatggtgcttcatggaggagcacatcgagcgaggcaggtggtgaaagtgttgaacagcgaagggaaagtcattgcttatgcaaaaccttcatatacatgggtacgtagttattaaatcctataactagtcaatctttaacttgtggctgaccatattgtgcctaaactctgctctgtcataaacatagataaagggaagtgacacatccactgcagagtcaggatctgacgctgaagatatcggttctccgaaggctataaagagtttctctcatctccgcttgacacctgttcgtgaggaggtaacttttttctctttctttctatcttctagttggggaagtagtagatgtttatcctgaggctttgcaggcaaagatagctggtgaaacaagcttggctggtagttttccgggttatgacgagtatgtacctatggtggacaaagccgttgacgccacctggaaggtgaaacccgccatccagagagttgcctcaagaggttagttagttagctgctatatgctttacgtaccagtaggctccggtttagaaccaaatactgaaggaaaagaatttaacctaatccttgtttacataggatttattttcttattaggattgttttggagttggttataaaaacagagtttttttggtctttctttgtttggtgatcttaactcttatctgtttccttcaggagctttaatgtctcccaccgttccaaaagatcatgaaggcatcaaggctcgagtcctagtaatgttcatggcattcttgatggcggttttcacattcttccgcactgtaacaaagaaacttccagcgactactacttcttccccagcagaaacccaaggaaacgcaatagaacttggttctaacggtgaaggagttaaagaggagtgtcgtcctccttctcctgtaccagacctcacggaaactgatctactaaactgtgtgacgaagaaactgacagagctggaaggtaaaatcggaacgctccaatcaaagccaaatgagatgccatacgagaaagaagaactgttaaacgcagccgtctgcagagtagacgcacttgaagcagagctcatagctactaaaaaggccctttacgaagctttgatgagacaggaagagttacttgcttacattgatcgtcaagaagaagctcagttccagaagatgaagaagaagaagaagaaacatctcttttgcttctgaagcaaagccaagaaaaaccagcaccaggcatcaaaatctccctctttcgtaattcgctgttcttaagtataaacaacaaaacaaaacaaaaactcttatatctgatttgatgttaaagctaatacagagagctctgtttccttctgtgattatgagccactttatattatatgttttatttttataatcataaaaaaatctgtaactgtaaacttgttaatgcaaaacgaaaaaagagtatcgaaattattaatcaggattctgtttttttttaggattttgtttttatccagatacaagatattgtagccacatatcccatatagtgattatctcttaacgtatctcaaaagtttttgcatttttctttacttcatattttgtttttgtaagatcaatcagtttttatgaagagaaa

SEQ ID NO: 10400 - DNA, 3000 bp, Unknown
  misc_feature (1)..( 3000): cDNA_ID_3036252_gDNA_ID_2213647_Annot_ID_181500 3000 nt of promoter + ATG
aaacgtactgatgatcgtgcagaaatgtaaatgggggcaacaatatctctcgattctacttcaggtttgttgttttatacgacgcgcaagagtttacggttttggtttttgataccagcatcacaacgaagtagatttgatagagatagtcgaaacgtgtgaccgtgtccgtgacgtacacatctctctatataattaatacacacgtgtccgagaatgttacgactcaaccgtgttcgagggaagaaaaaaaatatatatatctttttagggagcgagtccatggagtatcgaaccctgctcttcagagccaaaagaatagtgtctgaaccactaggctgtgagtaactttttgcaatttaaaaatcaactctttgcttagatctgatctcttcgaccatcggaagttgaaaccctagtttctttgcgagggtaaacccagaatacatctaagagccaaggaaggtaatgtattcatttttcaacttatcttgtttgtatttggaagaaaagtgagagttctagtcttctagatgttttatattgttcttcatttactcaattttttcacgcagtgcaaacattattctcaagatgacacagagaacttcgagtcagatgagtacagagaaaaccaagaaagtagcagagttaaaccagactcaccggttaactatcaaacctacttgcagtattgtttgtttgaaaagctgcatgcgatcattcatcttaattgttcggtttcttactcctctgcaaatcatacttattaccataacgtgatctagaagtttcaacaagaggctgatgcatagaaagctgatgaagaagctgaaactgcgggtaatgtaagaagtcactgctttgctcattttatcatatgctttagtgatgaacctcctttttgtaaaatcatatttgtttgtccggttctgtttgtgcatgtatattcagcaactacgatttgtcgatttaacctgaaaatttgattttttggcctggttttgtttcaaccaactggattagtttactcaaaattcatttcagaaaatgatcatttaaatgttgtggttcttgcaggcgaaatgcgaggaaacgcaggtgcgaggtgtgttgctcaagtagaaaccgagaacggtccaagatcagaccgtacagagttccaacggtggattatttagcaagacaaattctgggcttctttttgattatttagcaagacaaattctgattttcaagacttgatctagaatgtaattactattttttgtccaactggatgcattttgtgggttacattattgtattgaaataaaatatagtgtggttatgttgaaaaatgattagagcaatgattgattaaaaattctactaccagaacgaacgtactaaccaatcataacacaactgatcattacgaagtctaaaccgaaagtcaatatttcgtgctgttcagattcaattaatgaaacttgtctaattttcttttgtcaaaattcactatctgttgatttctgtaatataaaaatggatatatattgtgaaagtaaaacaaattaagtaataaatatattcgaactagaaatgggaaggcctaacgaccgttgaccctccctttaattgctccgtatttaattgatttttcttctaatcttgttatcatcctccgctatccgccacgtgttgtatgggtcccacggtacgggcaatgagagaaactacactttgctccctattttaattaataattcacattttgctacacaacatcttctaattgtcaaaactcaaaactaacaatcatggtcatttaaaacaagctatatacatttttcaaatctgtatttcaaaaaatcaaataaaaatcatcttaagtcactaacctatgtgattaatcaaagtggagtaaaattttccgaaataacatttgcaaaaaattgttgaaatctaaattgacaatagttataataaaatatccaaaattaagtggggtcatattgtaaagaatatttcattttccacctcctgttttgacgtttctcttcttttttttccaacaaaaaaaacaaaagcaattaaatagtgtttgtcgtttagttggcggaattctctcagttgaattttgttataaaaatcttacaggtatacaggtctactgtccatagatccgttaaaagttttacctacggccattaatgaccgtccgatcttcctttgttgatgatgacgaggaccaactatctctgcactttctcggtttctccttatttaactacttttaatattactccaaattcacaccccataattatgcttctttttgcatatttgatcaaaaactagttctagtgacagaattaacctcaatttccgtaaaccaagttttaatatatatcaaatgcaatactcgatatcacacattattcactaaatgtgggagactttcatattttttgttttgtcacacactataatatgaagaatgaaagtaacatgatatttttgttctaggtgtaatttaatttccaaaacattaaaaattcctgacacaaaatactgtaccaccgtcaatttggggggtagattgaaagaaaataaagtgtggggctcacagataaaaacgaatgtaacagttggggtctcattaaatagcggtgcaaatacaaacttctctataacaaaaatctactactattaaaaaataattaaattcgagaggcagtttaggtgagaagaaactgagaaagttcggtccgaattctaatcccacttttgtctctcaatttgtttcccctttctctctctctctctccttcaaatttttttagcgatttttctgggtttcatgtaaatgtgagaagtagatagattctcaacaagaaaaaaaggttttttttttttttttttttggattcgtggatcagccatcttctcgaaagatttgggaaagatccaaagaatcacaatattttttcgatatttagtcgaaaggaatttaac

SEQ ID NO: 10401 - DNA, 3000 bp, Unknown
  misc_feature (1)..( 3000): cDNA_ID_3036259_gDNA_ID_2213647_Annot_ID_181497 3000 nt of promoter + ATG
gctttaagttataatgtaaattttatattgtgaatatcctttctttgcttgctcttcaggcaaggaaagttcatccagacaagaaccctggagaccctcaagctgctaaaaactttcaggtgttttgtcatattgttactgtttctttccagggtctttatatgttgttttactggaatcacatcaaattgctgatgacgtctctcatttgttgattttcatgaatgaaaaaggttttaggtgaggcttatcaggttctaagcaatccggataagcgagcagcttatgacaaatatggcaaagaaggggtccaacagtatgttttgtcctctctgtttacaactttgcatctccaacttcggtttgtgattgatttttcatttgcagggatgcaatggttgatcctgcagctgtatttggtatgcttttcggaagcgaagtctttgaagaatacgttggccagcttgcacttgcttatttggcatctatcgaagctgacttagaatcacatgaccctgaaatcagaaagcaaatgcttcaagacaagatcaaagtacattgtttatttatcgttctattttaacacatgtcgatgttttttagctacttttctccatatattaacgtgggatttgtgtgcaggctcttcaaaaggagagggaagacaagctcgccgctacattgaaaaacaaacttgaaccctttgtggaaagacaaacagatgaatttatcgaatgggcaaacgaagaggcaaagcggctttcttctgccggtaagttttgcatttaagctatagaggaaagtctttcaatgtatatatataaactagaaagatttacatcttcttgctctggatgtttaaggttttggcgaggcaatgatgcatactattggttacatttacacaagaaaagctgctaaagaaatcgggaaagacaagcgatatatgaaagtaccattcttagctgaatgggtgcgtgacaaaggccaccatatgaaatctcaagtgatggctgcttctggtatgaaacaaagctaaatataaaccaaaatgttttggttttctaacttaaacaaaatccttactaattgctttggatgattttgttttggatctgtaggtgcggtttcgttacttcagttgcaggatgaagtaaacaagttgaatgaacaccaaggagagaacaaagaggaacatattcagaaagctattgaagctaaaatggatgctttgcttcaatctctttggcaaatcaatgttctcgacatcgaatccacgctatctcgtgtttgccaatctgtaagatactatgcttcatcatacattatatgaccatttcttttgtagcaacaatcgacgaattaatcttgttgttaattatatatgtatctttctctcacaggtgcttaaagatccaagtgtttcgaaggatgttcttcgagctcgtgccataggactgaagaaacttggaacgatcttccaggtgagcaagaagaacaaaagggttcgtatcataacataaaagaaacactcattgtgtttagatttaagatgtcgagagccaaaaaaaaaactttttgaaaaaaacatgtaactcaaaaccttagtgaatttctctgttctttttctttgaagggtgctaagaagccgtacacgagaggaagcagcttgcgtcgggaagccaccaccgtgaaaatggacaccggaggttcttcaaaggcgacgtcttgaaactccggaacttaaaatgctgtttcttttattggttgaagttggatttgtccttcgttttttactttccccagttttgtagagattgctttctatgttaacttttttttcgtgtagatgttacatttaaggtggtgcattactgcattctcattaaaatcttttcgtcacattattcaaatttcttatacattcagagctagtgatgaaatgatctaaggaacaaaatttacaatttactttcggtaaagaaaaaataatagtgaatagtaatattgtatgtatttgggcgtgtttgaatcgcgtttttattccctttccatctttccgcgttgtgatcgttttaacatgacgtgccatcgttagcctaattccgctaaaactaacgacaacagaccaaaacaagttaaaatgcagtgtttggttctattaaaccgaatactaatcaaaccggtctgctgacactcgacatttcatttggtacggtttatgggtcctcaacctaaaccacacgccaatcggaacggtttatgggtctttaaccggtacaagccaatgggagtctaacggcgttaaacaaaaccggtcagagaagacttttattcgtctctttccttcacaaggaaaaaaaaagagagagagaacgaagcaaaaaacctcgctcgctagctatgtgaagaaactatcttcgttataaaactttccggcgacgttttccgacttccgagagcaggttcggtgttcatcacttgtcctctcacatgcttaattcttttcgattttgttatttagttttttttttagtttctattttgggtaatctcgacttggtttgcaagtcccttggccataatatcggatctgtttaatgttagttatgtagatattgcccgattcaatttctatttttagtgcctttgagaagatttttcattttggattttcttagtgaagaatagtcatcacagttcactcacctacatgttagtcagcaatggattactggatttgattctctctttattttcattctactttgaacttcatttatcttggccatggccagtttaagttattgtgtagattaatggtaagctcttttttttagtgttattgttgaggttatagtcataattgattctgattgagttcttaaaattgtgtttttttttgttggaaggttttgaggtggttttatgcgccaaaacatctaaccggagtgtcgttgtacggtgcttagtagttttcaataacacgcttcagttatg

SEQ ID NO: 10402 - DNA, 3000 bp, Unknown
  misc_feature (1)..( 3000): cDNA_ID_3036266_gDNA_ID_2213647_Annot_ID_181494 3000 nt of promoter + ATG
ggcttgaattccagatatattcaccaacagcgtgcctataaaatgcaaacatataccacattttatttagtctcttagattgatttaatcaatatatatatagagagagagagagaagctaacatgaaagacaaagaacgaaaacgatgaagattgtagtttttgatgcggccatgtctttagcttgaaatatttggatatgaggattatttatggtttagagtttataaaacacgttatgatatctgtatgtggtggtttggatgcttatatattgtgccttggagcatgaaattggtaatttaattaatacataatagaactttgacaaataagattttggcaattaatttattagtgaagactgaagactacgaaggagaaagttaggaataatttactttcctatgatcttatactatttaaaataatattttatgtaattccttctcattcataatttgttataccatttggaagtaatatttgatatatatgagatttacataatttatccacctcatttggaatcatatcacaaaaatatttttcaccaaatttgacaaggaacaaaaagaaacaatattctttccttttataaaaaatgtaatattaatttatttaacaaaatggattatttacaagaaaatatacaaatttcacgaaataaaagaaatatttcttataaattccatgaaatttgtttttttttgtaaataaaccattttgtaaaattaattaatattacattttttaaaaagtaacaaaggttttattccctgtagtttgttctatttcatttctcttcattctttcttctttttgttcctattattttaggagttattattaaaaataggcatttgttgggttggaaattagagattaggaaattttgtaatgctttacagaattaaacatttctggttttgtgtcttgacaattttacccttcattccactagagcgaataatgaaaatttaacttagctttctaatgactgaagtgaatgccaataattgtagatcgattatgtgctaggatttgttgctgttgggattagtggacaagattaattttcatttacaatggatatgtttaagctacgaagttgttgtgtacaattgtagatttttgaaactgtaaaacaagattagaaaagaagaacatcacaggagaaacctgattgaggtcacaatattacaaaatttacaacttttgcagaaacgaatattggtttgggtgtatacaccaccgagacattagtagtatttggttcatgaaatgaaatcatttttttttttttttgaataccagagattctgggtcaaagtccgtaatcctcccaaatctgaaaccacagcatataatattagtttagtctcaagcgtcactcgaaccggcaacctctaagcttcacctagggtttttaccaattaagctaacgatatttggtataaatgaattcttttttagttacactcagatggatactaggctttacagacaaagaagtcgagagtgcacaagcaccaatcctactaaatccattttgatcacttcacaacatgatatcaagtgaaatggatattatttatgaggaagtgtaatttaataatctaggttacacctatgtgtatataatgcaacaaacaatcaattagtaaaactacaccccaaagcgaattacaagatcaacacaaagagtcacataaatgtgcattcaagaaatgacaataaacactaaggtcttgaatatgggagaacccaattagacgagataaaatgcaagccaataacaggtaattaggactacaaaacaaagagataaaatgcataacatgattcaaaattggaaactaaattgaacaatcaatgagctaactagggctattagagtaatcaacacaagagaatgcatcaaggtaaagaaggagaatcaagcacatacattagtcgtatgtgactaacgaccaatgaattagtgaaactaaaccctaaagtcaattacaagtatcatcccgagggaattacataaacacctattgaagaaaggaaatactaaagaccagagaacccaatgggcatgataaaacacaaggcaaagagctctaagtatcatgacagagaagaagaggtaacacaccgaattcaacacacaatgaagaaagaacattacaccatgagagacgtacgatgcttccattcagtatccattgtaggaattcatcaaaccagagaaagcattacttgaatatacattccatcaaccaagcaaaaagtcgtgactgaaataaactacaaattcaacaaaacaaacgtgttttgtttttatcaaaacgtcattgtctagatttattgaattaagctttaactcttagcaaatgattgagatagtttaaacaaatatcaagaacttaacctaacgtaagctataaactctatataaaaaaatccatcagtagagatagtttataaaatttgaaaagaaaaaaattaaaaggcttgagtccgatcaaactactaattaaaagccatcactaaattgagcaagaaggtgtaaagacatttatatgaaaaaaaatatatatctttttaattaatgtttttcaaacataagtttacataaaaaataaaaattcactcgaatcaaaattttgttttgactcgaatcgaattgaattaaaaaagtcaactacactaaatattcgaaagaggaaactaacaagtttacacacaaaaaagcccacgtgactcttttttctccaagagacgtctcttttcctcttctctcctttgttctttcttccaaatttcccaaatccctccacaataaaccctagaaaatcaaaattcgctactatttctctgttccctaatttctttcgatttcaattcattagtcctaaaaagctttaatttttctaatcccccagttctccttcttctgcttctgaatcgtcgtttaacgtattgctccgtcttttcactttctccgcc

SEQ ID NO: 10403 - DNA, 3000 bp, Unknown
  misc_feature (1)..( 3000): cDNA_ID_3036280_gDNA_ID_2213647_Annot_ID_181490 3000 nt of promoter + ATG
ggtaaagtaattgcatttttagttccttttttatgatataaataaatgagtcaagaacatcattttctatatcaaaaagtttttgttttctctgattcttgataacaaacacattccaaacaaaactaagaaaaatttctgaatcttctgcttgattcaatggatgctaatcaacaaaatccacaaaagaaaggtatggatcattgttatccaatgttatatgaattcatacacaacacacacacacacacacattgtttgctgcaaatgcagatctgattttgtttcttctttatagatatatttatgatcttgtgtctacatacaatattctccattctttttaaagaatgtcctttttcttattattgtttttcaaaaagtattagaaataaagagatgttcttatttgtataatccccttcttttttgtttttcatcaccaatgtgaatcttaattagactcttattcataaatcatctatacaatatggatcttaaatttttatattggaagagtagaagggataacatgaaaaaaaaaatagtacttgtagatgtgtaagagcccatctcaattgatttgaagaagaagcatgtttcatgttctttctttttgtacatcatgtttatggtctttcgaaattgaccatagttcatgttatacaaattatcgaataatatgttagatgatacaaacataacggtattttaaatattcccgcgaaaaccaatctacttaaggtcttctatattttctttttttggatttgtttgaataaatgaaaaaaatatttttggtgtaaatgtttgattccttttgtttatgcttctaatttttactcgtgattgatgatgaacagcttggcctccaaatccacttagcaagagcattactcaaggagatcttgccaagcgccttgacccattctatctacctaatctctttgatgggtttgaagatagtaaatacggattgcttgttgatgatgttgtgagactttgtaagctgaaacgtgactactcgagtggttatatctcgctggcagatattgaagctagagaagagaaaaaaccagccaagtctgctaatattattattagcgaaccaaccaagtctactaatattattatcagcgaaccagccaagtctgctgatattattatcatcgattcagatgatgtgttgcctcaagaatcagttattgtaagcttttaacgtttgttgattaatttgatttcatcttttgtttagtaaatacttataatcacgttttgcattatttttcagcctccagatgataaacgatcgaagaagctcaaggaagtgattgttgtggatgatgatgagccttggttttatgctaatgataagttgactataggctcggcttctactagtaatgctgttcgaaacagttcttatgatgttgtgatgtatggaaatagctcaggatgtcttcaagaaggttgtgttggggagggttcatcgaggaattctattgataatgacaatcaaactcctctatatgtagaggcaaaaaaataagaagaacattagaggcagatggattttgctcaagaatcaattatggttacttcttttacattttaattcagtcaatcacatagctctctttgcatatatagattagagttcttgaatatctggttagagtttccggctgactttttttgcatatgttcttggttaggtaacagtggaggatttaccaagtaatgatcacaaacaagttgaagaatgaagaagtttttttttttttggttgttgtcgtctgatgcactttcttaatattatttcctataattaaatataatttgaatatatttgtattcaacgagcaattcttgctttattaaataaaagtataattttaattttatactagctgttgaaaaaataaaatagtattaccatattgacgagtctatattaggtaaataagtatgaaaattggaaaatgactagtgatgtttgaataatttgccaaaacaatttcaaaacttaataggattgagtgtttgactaagggtgttttttttgggttaaaatttgactaaggttaaatttgatatgtataattaaaaaatatataatctatgtgaaggtgaagaacatatctaaccagatattaaggacatatatgtgaaggtgaaactatttgtcactttatgtgaaaatattccaaaattgaccataaacatgattcaaatatatcaaataaaaataattaatatgctaggttatatatatacataacggtattttaaatcttcccacaaaaactaattatttaaaggcgttcattttttttttttattagctttttatagagatcgaaacggttagttagtttcttctttaccgtcaaaatttaaaactttttgatttagggaatccctaatacaccaattgaagtattagcacataatcattttttttattggatgtccccgaaagaacgacactgaatcatgtaacaccaatttgtaaaaagattagcacatgtatgtatatagatcattttttttgtccaaggtatatagctcatttctattcaaacatagaaaaatatgtaagagagatagacataaccatgtgtccaccaaaatatgagtacactaagcataagtttgaagaacacattcatatatatcttacacacaaagatacagtagagtagagagcaagttgaagtgtatagatattatagatgtagatatatagttttgtcttattgactttccgaaaccgtcattgttcttgtctctctcctttgccactttgccaccatgactaattactattatgggaaacaaaaagacgcttcagtttttccagaaaaaaagtagatctatttgtcttctttgcttgaaatctctctgattcatgcataaagcttgcatctttctagtctttaacatgtttggagtcgtagttttgatttaaggagctctgtttagcgaagatcaaacatg

SEQ ID NO: 10404 - DNA, 3000 bp, Unknown
  misc_feature (1)..( 3000): cDNA_ID_1808761_gDNA_ID_2213647_Annot_ID_181488 3000 nt of promoter + ATG
gcattttcaggcaattaaaaagttcaatgggcacatgtttggtaaaaggcctatagctgtagactgggcggtacctaaaaatatttacaatggtgctgctgatgccactactgcttcagcagatggtatgttaccgtattgtttttccttttatcactggagtttttaaaaacttgttaattataaacaatttttttactcaacttgtaaatgagggaaacagatacagtcagtggccgaagttttgttttatctcctcctaacagatcgtcatactttttgacgcgatccttggcaggtgacaaagaaggaagtgatggggacagtgaaaacagtagtgttgatttggaggaggttgatgaagctgtagaaagccaccctcctccaggagatgatactgatgatgatgaggacggcagtaacaaactgactgaatcagatgcactggacaaagatgttgggaccgatatgaactttgaagatgaagcagatgttgccagaaaggttcttaagaacttgcttgcttcttcaaaaggttctactgctacacctgagggagagacagaggaatcggataaaagtaaactgaaaagttcatcaactaagccagttgctgactcttctggtgtatctgaacctttgaaatccggtaaaactaaagtggtggctcctaaagagacgcaggataatgatgattttgagagaactttatttataagaaacctcccatttgatgttactaaggaagaagtcaaacagaggtttacagtatttggggaagttgaatctttatccctggttctccacaaggtcacaaagtatgtatccttatatactttgaaattcattcaatcatcaaaaaatttccaagctcccaaagctttacattttttctccctgtgttttctttctcagacggccagaagggactgcttttgtcaagttcaaaacagcagatgcatcagttgcagccatttcagctgccgatactgcctcaggtgtcggtgtccttcttaaaggcaggcaactaaacgttatgagagctgtgggtaagaaagctgcaaaggacatagaactcaaaaagacagaggagaagaatgttgaccatcggaatctttatcttgctaaagtacacacttctccctctccctcacaaatactgggaaattgtattatctgcctgcttttcaaatacgaactaatatatcatcctgttttgacttccacaggaaggtcagatccttgatgatacacctgctgctgagggtgtgtctgcggaagatatggacaagcgacgaaggtaaacttttcttactttctcagatatgcatgttactgtctagtgctttgggatgagagaagagtgagcatgtgattgtcctcgcagattgcatgaaaacaagatgaaaatgcttcagtctcctaacttccatgtatctcggacaaggcttgtgatttataatttgcccaagtccatgaatccaaagcaactaaacaggctcttagttgatgctgttacctcacgagctacaaagcagaagccgtgtattcgacaggtcagctattcgcctttgtgctacaattcaaacatagttctattatctgaacctagtttctttgttttctacgcagatcaagttcttacaaaatgagaagaaaggtaaagttgatactaagaactactcccgtggagttgcctttgttgagttcacggagcatgaacatgctcttgtagccctgagagtacttaacaacaatcctggtaattgatcttgctgaaagctaaatttccttcgaaattcaagtacttttttccaaatgatatgctatttgatgattttatggttatctcaccaatcggatgagacatgtatcactttagcttacgatttaggatgcaatgtccaagaataataattttcatgttatggtaatcgttttggttatctctgcagagacatttggtcctcaacaccgccctgtcatagaatttgctgttgataatgtccagaagctgaagatacgagaagctaagcagcagcagtttcagcaacgcgagaaacacaatgaatctgatcagcagcaggcgaacggcgaagcacaggcacctgacaataaatacaaacgaaaaacgagggaaggggataacactggtccaaggaaagagaatgcagccaggtttaagaagggaccacgtgaagagagtaaagaagaagcaaaatccaatatagcagtaaaagataatgcagcagagaagaagagacctatacgcacacaggaaaaaccgtcttcaaacaagaaaggccaattgatgagacagaaagagacaactgagaaaccagatccgaaaatttccaaagatttgagcgaaccaaggaagaggaagttcggggaggatagaggtgaagagaatagaaatgggcagaggaagaggaagaagcaaggtcaaggtcaaggtggtgcagaagttgtggacaaacttgatctgttgattgagaaatacaggtctaagttctcgcagagctcagccaaaaccggcccacaaaaacagagttccggtcaagtcaggaggtggttcgaatcttgagacttgaatcaaacaaatgtaagttttgatatttttaagtttccttgtatctgttttttgattctgtctgaaaaatctccgaagtagtgaatgctgcgaacacaaccttgttttgtatttgtatcgtcaaaactagaccgaacttgaaccttaacaaaacagaatttattgttttgaaccgaaccggttttgtcgacatagttagataaagcctataacggttatttacctaactaccgaagactccgtaggcgtgtgccaactaaacatcacaactacaggtcatacatttccacgtgtcaaattatcattggttccaaaccgtccgattttttcgatttcgtcttcgaatatttttttatttaatccctcagctctgttttcttctctccataattttttaaaaagtcatg

SEQ ID NO: 10405 - DNA, 3000 bp, Unknown
  misc_feature (1)..( 3000): cDNA_ID_3036307_gDNA_ID_2213647_Annot_ID_181481 3000 nt of promoter + ATG
ttttgttgttttcagaaagttatgagattgatgacacaatgcaatgagaagagctttgagctggaggtaaaatgtctctctagaatgaaatgtcttcttctatagcgaatatggaagatttctcaagtcaatatatatatttaaatgtgttctacctatggatcagattatatcagcagataatcgtattctccaagaacaactacagacaaaggtcacttctaagtcacggactccttttattcttttattcttttttatttttcatatacagcattttcttgtggctattatctcagtcatccttacttatatacacatgctctaacaactgcagtgtaccgagaacaatgaattgcacgaaaaggtgcatcttctagagcaacgattatcgagtcagaaggccacactgtcttgttgtgatgttgtgactgaagagtatgtagatgagctgaaaaagaaagtacagtctcaggtaatttctcaaaatctcaaccaattttgtcaaatttgcgaccatgcattctcacaagtatgcctgaatcctgataaatatcttcactggttgcgaggagattgtgaaaacacatataatgatatatatgtttaatggacctctcattgtatttacatgagcgtttgatgttttcatacttcaggagattgagaacgaaaagttgaagctagagcatgtgcagagtgtggaggagaagagtggattacgagtgcaaaatcaaaaattagctgaagaagcttcatatgcaaaagaattggcctctgcagctgctattgagctgaagaatctagctgatgaagttacaaagctctcgcttcaaaacgcaaagctagaaaaagaattagtagctgcaagagacttggcagcggcagctcagaagcgtaacaacaactccatgaacagcgcagcgaaccgtaatggaacaaggccagggagaaaggcaaggatctcagactcatggaacctcaaccaagaaaatctcacaatggaattgcaggcaaggaaacagcgagaagcagtacttgaggctgcactagctgagaaagaatacatagaagaagagtttaggaaaaaagctgaagaagcaaagagaagagaagaggcccttgaaaacgatttagccaacatgtgggtgcttgttgccaagttgaagaaagccaatagtggcgccttgtcaatacaaaagagtgacgaagcagagcctgcaaaggaagatgaagtgacagagttagataataagaatgaacaaaatgcaatcttgaaagagaggcaactcgtgaatggacatgaagaagtaatagttgccaaggctgaagagacaccaaaggaggaacctcttgttgctcgtcttaaggtaaaccttttacaaatttgctttctattttctttcagcattcttagttttctataagcctactccacagtctagcggtaggcaaatctagatatccattacctgttcgctccatatcctttatgccatgaccttcggatcaggcaacatatattaaaaccttcaaaacacccagaatatatggttcaaaatatgtaaatagctttacctgatccaatatattctaatatcatgtcctcctatctataatacaagtgactgttacggataattaagtcaagctacttgtgggtattgaatatttatctggtttttcggggacatggaacttgtgtacccatgtgtgagcttctatcttgtacgggtaatgaaaatcatgaatcatcatctcacacgttcaaacaatatgagctttaataaataaaaaaactacttgttttcttgttctgcatttgatgctttatatacataacaggcaagaatgcaagagatgaaagagaaagagatgaaatctcaggcggctgcagcagctaatgctgatgcaaactcacatatatgtaaagtctgttttgagtcgccgaccgccacaattctcctcccttgccgtcatttctgccgtaagtctcactctcacattacctgaggatccttcattaagtactaagtaatcctaaaacgatcacaatctctccttttatgcagtctgtaaatcttgttcacttgcctgctctgagtgcccaatctgccgaaccaagatctctgatcgcctgttcgccttcccgtcttgacctgcggcaagtatagtcactctcctacacacagtataaggtaattccaatatttcccaccttcacaaaatctttaaaatccaaattctttagttcaaaaacattaggcaatctttttattgaaagacaattgtatgtgattttgcaggtataaagaactatatggaagtctgtttgtttgctaacattttccagaacggcaggctcgaattcttttattacaagttgttttttgttttcttgtatgtaatgtctttgttatatctttctgttcaaaatgtggtaaagaaagaggaaacataacatgctaacagaaaaataggaaacatatcatagccgtttcatagtaagttcaaaatttgaagtaagtaattaaaaattattttgctaattcatgaaatttgtgtacagttttttagaaaaaacatacagttgtacaatggagaatagtgtacgaatgcaacagtgatacacaagaacaccaaactacaccaattatcatcgatgaattactgcaaaccacacaaacctttgatctcttctaacttatattgtaatttttaattttaataataatttttacttagttatatctatgctaaattcttatttttttttaagaaatttaatacataccgaatttaatacaccaataacacatgtaaatatttttggatcagagtggttgttacggcccaatggatctagtgagcctaaatgatacgaccatatattgtttttttttcggttttcgccaacgaggatttggttaccgagagtttgtttgaacggtcctcagaaattcggagcttgtagcttctcggtgcggtgccttcacttta

SEQ ID NO: 10406 - DNA, 3000 bp, Unknown
  misc_feature (1)..( 3000): cDNA_ID_3036311_gDNA_ID_2213647_Annot_ID_181480 3000 nt of promoter + ATG
gccttgtaaagctttctttcagattgcctattgatgttccaggagcttgcaccttaggtaataactgagaataaggctgacctagcaaccatgatggatatgattcactctcaggatcatagcccacctgcactcaaatccaaaataggaaagcactttgatgagtcacatttccttgtttagcagcctattaatctacactttctgcctaaatgcagtaaatacttcatggtgtgttaccttcaaggcattgttgtaatctgacactccgagtctaccgtgaagtaaccacaacaaccagtctgcctgatgcagcaataccgctgattctctgtttggcacctcagtgttccaccatgagacaagtttgcacaaggtagaagtaccagagcagactgtatggtttgctggcgctatagacttgacctctggcagagcatcagggcagctctggttgtagagataaggttgacacagaacttctccactctcactgcaacacataattgaataagcaaaggagatttaaacaacacattactgaaacatcaaatcctctaatgtaaatggaatacagaaacagaaaagagaagtgatccggtgaattacatgcctgtttaagatgagagtagttgcagaagttccatcaagcgaaatggatgagacgagggagcgaactgtgacgggaatgtcctctagcaacgaaaaaagagttgctttccatgagcttgcccaacccatgctttcttctttctatctagatttcaaaacaaatgtctcagtccatagctttctcttgattttgttcataaagcagctcagaaattgtatatgatatatatacaaggatacttaatgcaaaagttttaccatgaaaggaggatattctcttttgccttgtgctttaatctctccttgctcatcaataactgtaaatcgacctccagaagtaccaaaatccatacccagataaagtttttcatagttcgttcctttattgccactcataactctgaaatcggagtaaaatctagttctgggtagaggaacactccttgaactagagtaaaaccctgagattaacattatcataaatgattcagctcctaaaacccctaataaacgccattatatcgaaaaatcttcatgtttacctgtttgttttggagattggaagagctcaaatgaagatatctgaaattgacgaagaatcagcatctctcttttccttctgaggctgctttcttctaaactccatagataagggagctagcaagttcgtgaccgttggatttctcgattttttcctcttgatttgaatttaccattttagccttccatattatttttatttattttactccactcaacaccaagcagttgggctgcacgttctctggtcatctaacggctcagattatgggtgcggatcttcatatttggacccttgtaggcccacgaccaataatgatgacaacaatccctctctcctggcaccatattttgttccacacaagttttctttaaaaaatttacatgtaaatgctatatataccaagcaatttttgtctaattaaaaatttacagaatattgaaatcatagcactaagacgcaaaactaaaaataacaacattccatttgcatatgaaccaaatgggtcgtggtctagtggtaattcatgaagatgaaggttggttttggtgtgtcccaagtactgttgatatccttattcattaaatcggaacgtctaaaaatctgtctttggatacttgggaaaactacaaatgattttttgctgaaaacatgacttggatttcattgtgaaaagcatgcacgtgtgagccagatgtgcggtggagctcaagaagtgggagatatgacaacttctttgccactgctactttaccttcgagaagcaatcacactctatatacgtaaactacttggtattagggaataaggacccacatattcaatgtgtgtgtaacataagtgtttaatattatagaagcaagatatacgtgctcgtaataactccattttattggattactttctattttatttttatttaggttataattttgtcttttgcaatttgcaggatttattagtacaccatctatttaaggataatgtttcctttcatttagccattattaaattcagtactgaatctattcgacatgttgcagttaagtagaatctaacataatgtcgcaaatcatgttccattggaattgacgttttttaacattttgagtgacccttaagagaaattactttaaatctgttcattatttttagatttggtgttggatacaattcctaatttattttttaactgattcggttaaaaacttaaaattgaacatatttcactaggatttcattttctttggtttaggttgaaccggaacaaaaacattgaacgaattaaagggcagaaaggacaaaaacattgaaatcctccatttttactaacccatcgttcttcccgctcgttcggttcattcaatttgtttcgaaaaccttttaacccggttcgcggttattttattttaatcctcaaccacgttcgaatctattagcgacacagtaaaaacaaatatattttattaatcaaaaattcaaaatctgaaaaaaagacgctttcaccaaaaaaaaatatctccaatcgatttctctctatctctctcttcaccaccgtcgcgtgaagaagacgaaacaatcgctctctccttgtgtggtctcactatctttttctcaccttcgcgtagcttaaccatggaaaagtagagaagaagaagaaagagagaagtgagagaaagacgaagaagatgaagagcatattgctttttctgtccccagccatgtgagtttccactgacacattctctccatcttcacatttggtgtttttttcttttgcttgattctttctatcttcattttcagatttttaccgagtccgtaaccgagtttgaacgagttagtgg

SEQ ID NO: 10407 - DNA, 3000 bp, Unknown
  misc_feature (1)..( 3000): cDNA_ID_3036315_gDNA_ID_2213647_Annot_ID_181479 3000 nt of promoter + ATG
atagctgaatctctgattgtttgatggaaatccaagatgcatatgatcacgtgatgatttaagaagagatcattttggtcaatcttaatcaagatcttctctactttttatcaacacaagcatgtcaatcaaacatttatcagcaactataatcacccagtgtgtgtatgatatcgtatatctttcacatcacagtaaacgttgtataacgaaatggtgtatagcgtgtatttttccaaaacacttacatgcattgtatgtgtctttccactgcttgtaacaccataagcaaaaacggttcctgtcaaattgcaaacacagagtcagaatacttccctgcaagtaatgctactagcaaatgagttggctaaaagtatttcaatgacaaacacaactcttgtttaatcgataacacagctataagccttaccgttaacaccttccatagcagccttgactacaggtttagcagctacgtcatatacttctggagttgttgactgtggtccaaaaactttatctggcatcaacaaatatggaagaacattcattgaacaaacggaggcgaccaaatctataatcaatgaacagtaaattgaaattatctccggcaataaattgatctcaataccaaatgcgtaagctgtgaggggattgtattcattcctgaccatcttatctgcgtcaggataccaaacaatctcatctcctcgttgatactccctctcactgcaatcaaacaaataacacgggagattttcaaaattgactaagtatcaattcacatttcataaatattaaacttctaaagaagaataatcgtgaaattgtatcaaatggatctgatattccgcttccagatctaccgtacctcatcggacgaaatcgaacggtgacggagatgctatctcgctcagaggtaatcgtctgcccagactcgccaatgagcccctccgatgggtacgattgggctccataagtcccggagccgccgatgggaccggaatcggaaatggtgcgagtaatcgacatagatcgggacccggttacaccgccggaattgtaaacggtagaagtaggtgtggaagaagaacgaggtaatagacgattatttataagagacgaagaagtagacgaagccgaagagtaaggactcggaggtctacggtgcgagaaaggagaacgactcctagttctagacgacgatgaagccatccactaactcgttcaaactcggttacggactcggtaaaaatctgaaaatgaagatagaaagaatcaagcaaaagaaaaaaacaccaaatgtgaagatggagagaatgtgtcagtggaaactcacatggctggggacagaaaaagcaatatgctcttcatcttcttcgtctttctctcacttctctctttcttcttcttctctacttttccatggttaagctacgcgaaggtgagaaaaagatagtgagaccacacaaggagagagcgattgtttcgtcttcttcacgcgacggtggtgaagagagagatagagagaaatcgattggagatatttttttttggtgaaagcgtctttttttcagattttgaatttttgattaataaaatatatttgtttttactgtgtcgctaatagattcgaacgtggttgaggattaaaataaaataaccgcgaaccgggttaaaaggttttcgaaacaaattgaatgaaccgaacgagcgggaagaacgatgggttagtaaaaatggaggatttcaatgtttttgtcctttctgccctttaattcgttcaatgtttttgttccggttcaacctaaaccaaagaaaatgaaatcctagtgaaatatgttcaattttaagtttttaaccgaatcagttaaaaaataaattaggaattgtatccaacaccaaatctaaaaataatgaacagatttaaagtaatttctcttaagggtcactcaaaatgttaaaaaacgtcaattccaatggaacatgatttgcgacattatgttagattctacttaactgcaacatgtcgaatagattcagtactgaatttaataatggctaaatgaaaggaaacattatccttaaatagatggtgtactaataaatcctgcaaattgcaaaagacaaaattataacctaaataaaaataaaatagaaagtaatccaataaaatggagttattacgagcacgtatatcttgcttctataatattaaacacttatgttacacacacattgaatatgtgggtccttattccctaataccaagtagtttacgtatatagagtgtgattgcttctcgaaggtaaagtagcagtggcaaagaagttgtcatatctcccacttcttgagctccaccgcacatctggctcacacgtgcatgcttttcacaatgaaatccaagtcatgttttcagcaaaaaatcatttgtagttttcccaagtatccaaagacagatttttagacgttccgatttaatgaataaggatatcaacagtacttgggacacaccaaaaccaaccttcatcttcatgaattaccactagaccacgacccatttggttcatatgcaaatggaatgttgttatttttagttttgcgtcttagtgctatgatttcaatattctgtaaatttttaattagacaaaaattgcttggtatatatagcatttacatgtaaattttttaaagaaaacttgtgtggaacaaaatatggtgccaggagagagggattgttgtcatcattattggtcgtgggcctacaagggtccaaatatgaagatccgcacccataatctgagccgttagatgaccagagaacgtgcagcccaactgcttggtgttgagtggagtaaaataaataaaaataatatggaaggctaaaatggtaaattcaaatcaagaggaaaaaatcgagaaatccaacggtcacgaacttgctagctcccttatctatggagtttagaagaaagcagcctcagaaggaaaagagagatg

SEQ ID NO: 10408 - DNA, 3000 bp, Unknown
  misc_feature (1)..( 3000): cDNA_ID_3036327_gDNA_ID_2213647_Annot_ID_181476 3000 nt of promoter + ATG
agaaccaacaatttatgaaatcaagtcaagcaaaactcagattctatggtatatacctaaagcagcgagttcgagtgagcttccttgaccaatcaccgccgtatcaatgagactcatcaacggcccacatagccacaatcccgcggcaggtccggtaaacatgacgatctctttcatctgtccccaaatgctctgagtcgccaaatcatctaccttcacttcttctacttctgcttccacttccaccggcgaaatcgaaccatttgctgcatctccttggagctccgaaatcgacccatttccggtttctccatcaacaacaagctcctgattcgtacttgcacagtttcttaaaaacctgttcagcttcagtgatgactttggtccggaaacagcggagctcctgaaactcgggaatgaaggattccatgaccgtaaagtgagggaagatgggaatggtagctttgggttaaaggaatcgaagaaactgtaaaagttagggttttgcattgaatttgcattgtttcttgatccacaaattcaacgcaccaaacccctgaaaaagcttctcggcgttgcgttgattaactgatagaaaacaacacaactcaagtttcctgtgaactcatttactcatgtaagcattcggtctaatgattggtacacctaaccggttagtcaaattgagattttaaaagcaaagagaaccaaaataattaagaaacagaaagtgggaaaattggtaaggcaatgtgtgactgtaaaagcgttgttttcatgttggagacaaaggacaagaagatcttaatatgcatcgagtcacatatgaccctactttgtatgtttctgactaaaagtcttaaaactgtacgcaaattgcaagcaacggtttgtattcgctttcgacacttcataatttataaaccatactgaacgactctaatatgccttctcaagattagcttccaaagatatgtataagacgcattctccatttaagatgttcaaattgatgaaggaacaatgcatggtaagaatatttgccacttgatcatttagtccgcagtccgcacatgaattgcatctttagaagcagcactttgtccaacctttcaatggtgtagtaataaatatctcataataatgcaaagaatctctaaataaattaataatatctttcagtttctttcatactatgtattaaattttttatcatctcgatataatatttgtatattcaaattaaaattgattttctttttataatttagatttaaaactaatataaattattcttaaaactaaaataaatataataggttcggttattgaatttgagagacaattttgctacaatctttgtcccatctctatggatatgagaaaagttcccccctctaggaaaactgttcagtcacattccatctattcgctttgagttcatactttttcgctatattacaacacaattagtccaaattaaattcatataaaaagtgatgtcatcaaaactatattaataagttgcttcatcaaaatctagtagtatctaagagaatccccatcagtggaatgactcaaaaagttttttatcagaattatattaataatttattatataataaaatttatttattttaaaagaactaaatcattaatcatgtgacccttgtttggagaggttctagaggtatctcatttaagagagtctctctcactctctctacaactttttttcttttcaaatttttattagcttagatatccatctaaaacctatcgatagaagtgctctaataaagacttccgaattgaaataccaagctctaaactataaagctaaaatatatttgatgtatcatcatcaacttgtcttcacttatgacttgtcttgacttgtaaacttgagtttaggagtgcgcattccgagttactatttggtttttatagttttctagttttaaaatagtatgtagtagttaagtttggcagttgcacccaaaaaaaaaatagtttccttagcttatggtttatgggtttttacaaaaaaaaatgaaatcattttaaaacaatgtaattcggtttgattttggttttttcggtttattcctttcattttacaaagaaaaaaaaacaattttgatgcattacaaaaacacacattcactttaaagatgtaagacaattcgcaagtattgaaagaaaaataagaaacaacatatattcttgttacggacaaaatatttaacgagatcaaaagaagtaatagataactatgccaaggcgtaaaacaactaaaaattgagagaaatctatcacaaattcaaattcaaagagtaaatgaatatatttttttctcacgagtgtgtagaaaatctctccctaaaactcgagagtctccgttagtcaaatagctagtttgaacgccattataaatgtgatatctccaagttactttgaatgaataacgtacacctaagaaatgatagtaccacatcttcgccataaggcacaagaattaacgtgggagttgacatggcatgccttgaaccgttgatgtagacttcacaatatctgatgataatctccaaacataacctcagccttaaaaacctgtgagaactcctcaccacctcacaaactaatctctcattgtaatttttgttatctatagttttttagatgaattttgttgggaattgtcgatttctcttatgctcggattgctaaataattttttttattttttttaatggtttgattctataattctgagaggtttttatcatatggtttagtcttttttggcattttatctgaaaatattatcatcatccacgtggcaaatcctcgtcagccggctcacgagaacctcaattatccaatctttgtatgtcacttgagtctctatatatcaaaccaccgaaaagcacgattgtttatcgtagtgcgttacaagcgttttaagctctcactagcaagcaagtactagcaacaatg

SEQ ID NO: 10409 - DNA, 3000 bp, Unknown
  misc_feature (1)..( 3000): cDNA_ID_3036331_gDNA_ID_2213647_Annot_ID_181475 3000 nt of promoter + ATG
tcaaaagatgaatcaaagatatggcacagcagattatgccatatgagtcagagaaatattgatgtgttgatcaagaaaggatgccttcaagctgaaaagataaatggtctcgagttttgtgaagactgtgtgtacgggaaaacacatagagttggttttgggtctgcaaaacatgtcacaagagagaaacttgagtacattcactcggatctttggggagcgccatcagtaccaaactcactaggtaattgtcagtactttatcacgtttattgatgaccttacaagaaaagtatggatttattttctgaagaagaaagaacatttcttctcttgtatgttgatgatatgttgatcatatcaaagaacaaggaaacagtcaaggaattaaaggaaagactgagttcagagtttgaaatgaaggatttggggcctgcaaggaaaattctgggaatggagataacaagaaaccgagaagaaaatattttggagttatctcagagaagttatctgcaaaaggtgttaaagacattcagaatggatgaatgcaagcctgttaaaacaccattggcaccacatatgaagtttgtagcagcaacagagactgaagcagaggagcaagctgatcaaatgaagtctataccttatgcaaatgcagtgggaagcataatgtattctatgatcgggtcaaggcctgaccttgctcatcctgttggagtcataagtaggtttatgagtaaaccattgatgaatcattggctaggtgtgaaatgggttctccgttacattaaggggtctattgattcaaggctgcagtacaagagagaaggtgattttgtggtgacagggtactgtgattcagatcactctggagatcgtgatcgaagtagatcgaccacagggtacacattcactgtaggagggaacatagtaagctggaggtcatgcttgcagccagttgttgcactgtcatcaacagaggctgagtatatagccttaacagaggctgcaaaagaagcatattggctaaaagacttgatgaatgagctgggatttaaacaaggagcggtagatatccattgtgattctcagagtgctatagctttagcaaagaatgcagttcatcatgaaaggacaaagcatatccagagaaggtttcattacatcagagatgcaatcactgatggagaagtgaaagtgctgaaaatatccacagttcataatccatcggatattttcacaaaggtggtaccggttaacaagttcctgagcgcgttgaagaagctcagggttacaagtgcctgataagggatcatggtccgagatggaaatcaagttacactagaagggaagcaaaggaaaggttgacactaaggcaaggtgaagttttgtggaagtattgcctaaagtgtcataaagactctaatccaaagagaaggtctcagcttgtgaaagaaacgaagtcacgagaggcgcacgtgctttgtcatacagctcatcaaggctagagacgtaattaacctcttgccaatggttcaaccattttgtctctttgtctctgcatttgaaacagagtacggaagaagagagaggagcgtggcggtgagtagagttgtataaaggagaagataagtgagacattagggttaagagagtaagtgcaagagaggcagctgaaagtttattcagtcttgtttctaagggtttgtgtaaccaaggctttctagtggatttccgggtaatctcggtccagacgtagcgttcatcactgaacgtgaactgggttaacatttgcttgtgtctgttttactttctttgtctaaacacacgagtgatcgaacaaagagagatttagtgagagcttccgcataaaacagttaaagattcaagctttttttttttacatcaacatttactaataaaaatgtatagttgaattttcaatattatatgctccaattgatacttcagaatgtgttaagattttcagcttagcaaaagtacacaaaaactatagtagaatagttcaaaaaaaattacaataacaattaatgataaattttgagaccatttttgacactgcaatttccttttaaaataattaataacaaattaacaatcaaaatggtgtatacactcacctaccattcaaacccataatttcatatagaacatattcctaaaaatgtgaaaaaattttaaaagattaaaaaatatttgacaaagagtcaaatacaaaaaaaaaaaaaaaaaatcctatctatgtttaattttggccatcagaagggaaatcaaataaaggggagatagagcgagtatacatatacaagctactcgcagcgtctgcaaattcatctatccatcatatttctctgctgctctctgctttcttcttcttcttcttcttcttcttcttcttcttcttcttcttcttagtttgattcaaaaaatctccttcctcttcttactttatctcgtattatccattaatcctaaaccctttagtctctccatcttccgcttcaacaatcagaatttgggtttggcgaaagatgctaactttgaaagtgagactaatcgtttgagtaaaaaacatgcgaattttgtgtgatgcttgtgagagcgccgccgctatcgtcttttgcgccgccgacgaagctgccctctgttgctcctgcgacgaaaaagtaaccacctttacctgaaaaaaatctcatttttcttaaagtaacacttttatctcaacaaatgcaaaaatttggaatttttgagacaatatctagttgaagtgctaaatttatagattttgaggttattataactcgaacatggccaaagtagtaccaaaagttgtgttttgattgttaaagaaacattctagtgattttagcttgtcataatttgaactttgcatatagcagttctctggtgatacactttatttacagttacagtcactctattgaagctggaagagctatgagactttttgttatctgca

SEQ ID NO: 10410 - DNA, 3000 bp, Unknown
  misc_feature (1)..( 3000): cDNA_ID_3036346_gDNA_ID_2213647_Annot_ID_181469 3000 nt of promoter + ATG
tagagggttcaatagatttttttagaccttgattgaccatttgcatttattagttttggctctcttcttatcagttttttttctttgtttctatgtaaaaagtataagcaaccacatatctatatcgttttcctcctaattttgcaatattgttttcatcaataaataccactaaatgctagcaatttggtcagccaaacaatattttttagagttaggttttctaaaacattgttactttgttagtacttagtagaaactatattcttaaaattgaaactatataagtatataacagaagttggtctgattcatactcgtgtacaaaatttcaagaatacaaaattttaagcccataaaacaaatcaatgagtactgagcaagtattagtataatgggctttatgtgtgaggccattgaagatttaagcgtaattttttcttttcttcgatagtattcgtgtcaggcttttgtgatatccaaaaactatgggcatgactgcacgaggatgacagtttttttttttttttaccagcaaattagtcacttttttgttctcacttaccaacttagaccatgagatttcaggtcaaagtttacgtaaatgttaccaattatacattggatctaaatttaacggtttaggtaaaaaaaacattgaatctaaggactaaatttttatgtagacatgttaccaatttactttttgtacattgttttcaagaggctaattgtaaaaatgtgttattaatatgtaaattgggcttgctgataaaataggaatgttagttatgttactatttagcacatggagcattaattacagttgattagggtttatgacttgtgggaaaaaaatgagaggttatagaatcatggttaatgacttttgacttcattttttcttccttgtttattttattatatactttctagtttctataataagtggaccgacaaaactaaaaaagtgatccgtgaatttcgctatttaactaatttcacgtttgtttggtaaaatgctatgtcagtgcatgagcaaaaaaggttgtaaaataaagctgaagttgtaaaataaaatgttatttttattttaatttattcgagagcctctggatggatgagagagtttagaaacacttgggctccgtacctttcaacggctataaaggagcggtcctcttgccacgtgtcaaaggcgtaactgagaagaattatcgcaataaatttaaaaaaccgaaaagccaacgtggcagggctttctcagatacccgacaacgttcccaggggtaatttaggtatttcaaaaggtatcttccttccaccgcattctctcggttcaacaaatacaaaggagagagagagagaagaggcgcttcgctacgagatttgcgggaccaaatcaatgcccattggtccctcctccttcacactgagagagccattggccaatttccagatatagacgacgacgacgacgaagcagcagcatgatgatggagtaactagacgaagacgaagaaggtaatgtactgtgattctctctctttctctccggatttttcgcactatgtgtaatgtgtgatagagatcctgggttcttctttgagcttccgattccactgtttcatagattagatagagagaccttgatttctcaaatttctcctctgatttctgattttcttaatttgggtgaagtgttgtttctttatctgatttttttgaccagcttgattctaggaattattttgggtcaagtgttccctattttttagatcgagattgctatttttggaaattttagtggagaacacttggcgtttttatttggatgcgctttatagattcagaaatttctatctagggtttattatatttcctattccactttcaaaatcagtcttgtgtgtgttttaatgctgatatctgtggtggatgtttcagattagaggagcttctgaagaatcactttgaggaagaagacaacatatctcacaaggtataaagcctctctcactcatattcaacatctaacacacaaaatattgtacacattgtacatgaacaagagaagatttagagtttcttagttatcaagatgtggggtattttgcattcaagtcaaaatctattattatattgaattagtcatgatttctttttatgttaacttagacttttgtttttcctttgtttcattattatgattaactcaagtgcgctgttgagaaagacttatgagtatacaacaacttctatatattaaattcctttctcttttttttttgttctgtctgcttttgcgtgtgtaagattacaatcaaagtactttgaatatgatgataactttttctttttcagttctttctttgccattataatatagagatacgtttaaacagagaaggtatggttttgtgggtccttttgttacttatattttctttaaagaaactttagattgatgatacatgacttcgttttcaagcatagttagtgggtgaccactaaagataaaaaaaagtcggtagtctttttgttgtttgttcttcagtttaaaggttgatcaccttctaagtaagctctcttttgttattctaattacaacatccctccctattaataagtaataagtcatctctctttcggtttctttttctttctgtttaagcagtgtgttgaagaaattcttaattctagtgtttaaatacagtgtaatcgacatacgtactatgagcttgctttgttgaactgttcaagtttcctctgtttttaaggaacactactaagagattttttaggcatgtttcttgtttttggtttggtaagttgagatttctgagctttatcatttctttatggttgtgttagttggaaagtaagtactcttttggtctctcctcagatctattctgttcttgatagctttcaacattccttaaaatatgaatgaaatgagctcattgtgcatcattgtgatttgaccagtgagcaatg

SEQ ID NO: 10411 - DNA, 3000 bp, Unknown
  misc_feature (1)..( 3000): cDNA_ID_3036350_gDNA_ID_2213647_Annot_ID_181467 3000 nt of promoter + ATG
gaggaggaaatgtcgcccaggcattcaggagatcaatcagaagaatactgcaaagaggtacaatgcattgagatggaagaatcgaccagagacattaataacgacagtgaagaaaggacagacgcagaaacacttttgggacacaatgcagaggcaaacggtgaaacaggtagtgctcaacacaggatcccgtcaagtgttagaagtgtcaggaggaggaagagttggagccgtggagataccatgacaggcacaagcactcctcctgatgccctggagacagactaccgtggaagaccggagggtcatggatttgcgtttcctgatttggagtttggttctggtgggaaattgttgaggaacgattcaatgacttctcgtggaagtgattcaactgaggctcacagcattggaacaccgttggtgggagaagagggaggtatcaccagcatacggtcatttgttgaagggctgaaggagatggtaaaaaccgttaaaaacactctcgatatatatatcttttgctacaaaaggtgcaacttcttatgtggagctttgtattcaggtttcggatccggagaattcagggaaaatgaggaaggacattggtgtggatgctatggaggaagaggtgtctgggacaatgacaaactggtcggaggaattcgagagacagagagaacaaattctggggctgtggcagacatgtcatgtctcgttggtgcatagaacgtacttcttcttgctcttcacgggagatcaagcggattcgatatacatcggagtagagctaagaagactctcctttatgaaagaaagtttctctcaaggaaaccatgcctttgaaagaggacagacactcacaatagcttcaaggtaagtacttttagcgtttgcatttgtatccgcagcaaacaactaatgttttgttaactgcttttccggttttgctgtagcctgaaggcgcttcatagggagagacggatgctaagcaagcttgtcgggaagaggtttactggagaggaaaggaagagactttaccagaagtttgggattgctgtgaactcgaaacgtcggcggttgcagctagcgaaccagctctggagtaaacccaatgacataactcatgcggttgaaagcgcagccgttgtagcgaaactggttaggtttgtggagcaaggtagagctatgaaggagatgtttggtctgagcttcacgcctccgctaccgacaacgcggagatcactaaactggaggaaaagcatggccacactgttctaattttaatagtcaaccacgttcatataatggtttcaaggtttgtacgtgtaaatcttctaggcttctagctaatgggtgtttgatgaaaaagattcttagatgttaccgcagccgaagagaaccttttctgtttcttttgcgttgatgggtttttaatattggaaacagacattatctgattctgatgttcgtttttcttaactggcaagtcgtctgggtaatatgatattgatccttgtcctatttaagcgcaacgaaacatctcttgaaatgagtgacactggtccaacaatgttgcttacgggttggaactactgttctcaagcacaaggagcccaaaagaatgatcgtttctaaacactcgtttatctatacacaatttataactatggtatcaattacatacttccaaagcatggcctcagtttcggaattgggtaaaaacaacagaagatggaatccaaagcccgactcaagaaaacagaacaaacctatgaatgatgatcatcattatcagcggctaaaaaggaaaaagtaaaatatctgtcgaatttgttagaatccaatttcagagagcaatctatgatcatcgtcactgattttacttaattcaaacatcttggaactagatattcaaccaagataatagcaaactagataataaaactttctattaatctaagttgcatgtaaaacatccaatgaaatcaaactagttgtaaccattatccaatgtgatatgccaggtgcgttttcaaacatgtcatataaatacacaaaatctgagagtcaaaactagtctctcaagccatatcttgcttatcctacattcaaccatcgattcatccaagcgattcagcaaaaacattcataccaaagcatcagattagttcagttctataatcttcctacaaccaactaattagacaaccacctgaaaggtctaaggtcactgaatctctaatcgcagaaagaaggaaaagccaatcaaacaattcacagtgttgctatctatatagcttatgacctcacactctctacatttctgatcccaagtgaagctacttcaccagtaaaagaggaaatattgatgaccaatttcaatttcaaacaagttcaatgattcataacaaaaagtatacagagagaaccgccactaaaggcgacatttttgttgttggcaaaagaggagaaaacccctaacaagagattcagatgagcttgaaaggaagaggccaaggagtagacctgggaagctcaagcttgtctttgattctctcaatcatcttctgtttcttccctctcgaattcccgtacgatcctttgaatcttttccctttcttcgtcttcttatctcctctcccacacaaatccatttccgataccgccggagctgcacacgccggagataacgatgaatacctcgccgaacaattcagagctgcagatgttcgctgcgtcatcataatccgtcgtgtcatcgcgccgcaccactgcatcgccgccatctcctctttctcacacactctcgtcctcctcctctccgtctctcagacttcaatcaaagattaaacacatggaccagaaataagactaaatgggccttaataatgaatatcaacaaagcccaataagggcctttaagttgtctccgtgcaaaatacgacgtatatgtgtctccaccactcactgttaacgatcagtttcagcgaaacgatg

SEQ ID NO: 10412 - DNA, 3000 bp, Unknown
  misc_feature (1)..( 3000): cDNA_ID_2704895_gDNA_ID_2213647_Annot_ID_132400 3000 nt of promoter + ATG
gttctggtgggaaattgttgaggaacgattcaatgacttctcgtggaagtgattcaactgaggctcacagcattggaacaccgttggtgggagaagagggaggtatcaccagcatacggtcatttgttgaagggctgaaggagatggtaaaaaccgttaaaaacactctcgatatatatatcttttgctacaaaaggtgcaacttcttatgtggagctttgtattcaggtttcggatccggagaattcagggaaaatgaggaaggacattggtgtggatgctatggaggaagaggtgtctgggacaatgacaaactggtcggaggaattcgagagacagagagaacaaattctggggctgtggcagacatgtcatgtctcgttggtgcatagaacgtacttcttcttgctcttcacgggagatcaagcggattcgatatacatcggagtagagctaagaagactctcctttatgaaagaaagtttctctcaaggaaaccatgcctttgaaagaggacagacactcacaatagcttcaaggtaagtacttttagcgtttgcatttgtatccgcagcaaacaactaatgttttgttaactgcttttccggttttgctgtagcctgaaggcgcttcatagggagagacggatgctaagcaagcttgtcgggaagaggtttactggagaggaaaggaagagactttaccagaagtttgggattgctgtgaactcgaaacgtcggcggttgcagctagcgaaccagctctggagtaaacccaatgacataactcatgcggttgaaagcgcagccgttgtagcgaaactggttaggtttgtggagcaaggtagagctatgaaggagatgtttggtctgagcttcacgcctccgctaccgacaacgcggagatcactaaactggaggaaaagcatggccacactgttctaattttaatagtcaaccacgttcatataatggtttcaaggtttgtacgtgtaaatcttctaggcttctagctaatgggtgtttgatgaaaaagattcttagatgttaccgcagccgaagagaaccttttctgtttcttttgcgttgatgggtttttaatattggaaacagacattatctgattctgatgttcgtttttcttaactggcaagtcgtctgggtaatatgatattgatccttgtcctatttaagcgcaacgaaacatctcttgaaatgagtgacactggtccaacaatgttgcttacgggttggaactactgttctcaagcacaaggagcccaaaagaatgatcgtttctaaacactcgtttatctatacacaatttataactatggtatcaattacatacttccaaagcatggcctcagtttcggaattgggtaaaaacaacagaagatggaatccaaagcccgactcaagaaaacagaacaaacctatgaatgatgatcatcattatcagcggctaaaaaggaaaaagtaaaatatctgtcgaatttgttagaatccaatttcagagagcaatctatgatcatcgtcactgattttacttaattcaaacatcttggaactagatattcaaccaagataatagcaaactagataataaaactttctattaatctaagttgcatgtaaaacatccaatgaaatcaaactagttgtaaccattatccaatgtgatatgccaggtgcgttttcaaacatgtcatataaatacacaaaatctgagagtcaaaactagtctctcaagccatatcttgcttatcctacattcaaccatcgattcatccaagcgattcagcaaaaacattcataccaaagcatcagattagttcagttctataatcttcctacaaccaactaattagacaaccacctgaaaggtctaaggtcactgaatctctaatcgcagaaagaaggaaaagccaatcaaacaattcacagtgttgctatctatatagcttatgacctcacactctctacatttctgatcccaagtgaagctacttcaccagtaaaagaggaaatattgatgaccaatttcaatttcaaacaagttcaatgattcataacaaaaagtatacagagagaaccgccactaaaggcgacatttttgttgttggcaaaagaggagaaaacccctaacaagagattcagatgagcttgaaaggaagaggccaaggagtagacctgggaagctcaagcttgtctttgattctctcaatcatcttctgtttcttccctctcgaattcccgtacgatcctttgaatcttttccctttcttcgtcttcttatctcctctcccacacaaatccatttccgataccgccggagctgcacacgccggagataacgatgaatacctcgccgaacaattcagagctgcagatgttcgctgcgtcatcataatccgtcgtgtcatcgcgccgcaccactgcatcgccgccatctcctctttctcacacactctcgtcctcctcctctccgtctctcagacttcaatcaaagattaaacacatggaccagaaataagactaaatgggccttaataatgaatatcaacaaagcccaataagggcctttaagttgtctccgtgcaaaatacgacgtatatgtgtctccaccactcactgttaacgatcagtttcagcgaaacgatggagcttctctgctcaccaacgtctctttcctcctccttcgctctctcttctgctcttttagtccctcgttcgttctccgtatgcaaattttgttttttttatgttaacattcatttaatttgttgcgtgattgattactcatgaatgatcaaattttggatttttacttggtttttagatgccagggacaaggagattcatggttctgtgtagttcccagaaggtatttcatttcaatctcttcacccggaagacttgtattgtagtatctttttaagctacaagtatgaaaatagttaagagtttgagaattaaaatgtttagttgatagagaatg

SEQ ID NO: 10413 - DNA, 3000 bp, Unknown; identical to SEQ ID NO: 10410
  misc_feature (1)..( 3000): cDNA_ID_2704891_gDNA_ID_2213647_Annot_ID_132402 3000 nt of promoter + ATG

SEQ ID NO: 10414 - DNA, 3000 bp, Unknown
  misc_feature (1)..( 3000): cDNA_ID_2715659_gDNA_ID_2213647_Annot_ID_132404 3000 nt of promoter + ATG
cgaatgcagacaatcaagaagttgacaacgagtggataatggacacagggtgctcatttcatatgacaccaagaagggactggtttgttgagtttgatgagtcacaaaccggaagagtgaagatggcaaatcaaacatattctgagatcaaaggcattggaagcataaggattcagaatgatgataatacaaccgttcttctcaagaatgtgagatatgtcccaagtatgtccaagaacttgatctcgatgggaacattagaagatcaaggttgctggttccagtctaaggctgggacattaaaggttgtcaaaggctgcatgacactacttaaaggaaagaaagttggtactttgtacctcttgcaaggagttgttgtaacaggaaatgcaaacgcagttacaagctcaaaagatgaatcaaagatatggcacagcagattatgccatatgagtcagagaaatattgatgtgttgatcaagaaaggatgccttcaagctgaaaagataaatggtctcgagttttgtgaagactgtgtgtacgggaaaacacatagagttggttttgggtctgcaaaacatgtcacaagagagaaacttgagtacattcactcggatctttggggagcgccatcagtaccaaactcactaggtaattgtcagtactttatcacgtttattgatgaccttacaagaaaagtatggatttattttctgaagaagaaagaacatttcttctcttgtatgttgatgatatgttgatcatatcaaagaacaaggaaacagtcaaggaattaaaggaaagactgagttcagagtttgaaatgaaggatttggggcctgcaaggaaaattctgggaatggagataacaagaaaccgagaagaaaatattttggagttatctcagagaagttatctgcaaaaggtgttaaagacattcagaatggatgaatgcaagcctgttaaaacaccattggcaccacatatgaagtttgtagcagcaacagagactgaagcagaggagcaagctgatcaaatgaagtctataccttatgcaaatgcagtgggaagcataatgtattctatgatcgggtcaaggcctgaccttgctcatcctgttggagtcataagtaggtttatgagtaaaccattgatgaatcattggctaggtgtgaaatgggttctccgttacattaaggggtctattgattcaaggctgcagtacaagagagaaggtgattttgtggtgacagggtactgtgattcagatcactctggagatcgtgatcgaagtagatcgaccacagggtacacattcactgtaggagggaacatagtaagctggaggtcatgcttgcagccagttgttgcactgtcatcaacagaggctgagtatatagccttaacagaggctgcaaaagaagcatattggctaaaagacttgatgaatgagctgggatttaaacaaggagcggtagatatccattgtgattctcagagtgctatagctttagcaaagaatgcagttcatcatgaaaggacaaagcatatccagagaaggtttcattacatcagagatgcaatcactgatggagaagtgaaagtgctgaaaatatccacagttcataatccatcggatattttcacaaaggtggtaccggttaacaagttcctgagcgcgttgaagaagctcagggttacaagtgcctgataagggatcatggtccgagatggaaatcaagttacactagaagggaagcaaaggaaaggttgacactaaggcaaggtgaagttttgtggaagtattgcctaaagtgtcataaagactctaatccaaagagaaggtctcagcttgtgaaagaaacgaagtcacgagaggcgcacgtgctttgtcatacagctcatcaaggctagagacgtaattaacctcttgccaatggttcaaccattttgtctctttgtctctgcatttgaaacagagtacggaagaagagagaggagcgtggcggtgagtagagttgtataaaggagaagataagtgagacattagggttaagagagtaagtgcaagagaggcagctgaaagtttattcagtcttgtttctaagggtttgtgtaaccaaggctttctagtggatttccgggtaatctcggtccagacgtagcgttcatcactgaacgtgaactgggttaacatttgcttgtgtctgttttactttctttgtctaaacacacgagtgatcgaacaaagagagatttagtgagagcttccgcataaaacagttaaagattcaagctttttttttttacatcaacatttactaataaaaatgtatagttgaattttcaatattatatgctccaattgatacttcagaatgtgttaagattttcagcttagcaaaagtacacaaaaactatagtagaatagttcaaaaaaaattacaataacaattaatgataaattttgagaccatttttgacactgcaatttccttttaaaataattaataacaaattaacaatcaaaatggtgtatacactcacctaccattcaaacccataatttcatatagaacatattcctaaaaatgtgaaaaaattttaaaagattaaaaaatatttgacaaagagtcaaatacaaaaaaaaaaaaaaaaaatcctatctatgtttaattttggccatcagaagggaaatcaaataaaggggagatagagcgagtatacatatacaagctactcgcagcgtctgcaaattcatctatccatcatatttctctgctgctctctgctttcttcttcttcttcttcttcttcttcttcttcttcttcttcttcttagtttgattcaaaaaatctccttcctcttcttactttatctcgtattatccattaatcctaaaccctttagtctctccatcttccgcttcaacaatcagaatttgggtttggcgaaagatgctaactttgaaagtgagactaatcgtttgagtaaaaaac

SEQ ID NO: 10415 - DNA, 3000 bp, Unknown; identical to SEQ ID NO: 10408
  misc_feature (1)..( 3000): cDNA_ID_2704876_gDNA_ID_2213647_Annot_ID_132405 3000 nt of promoter + ATG

SEQ ID NO: 10416 - DNA, 3000 bp, Unknown
  misc_feature (1)..( 3000): cDNA_ID_2715655_gDNA_ID_2213647_Annot_ID_132406 3000 nt of promoter + ATG
ggacgatgttctgctcgacgagaacatcaaccattttcttgccatcagtggtggattggtacagagtctcctcgaacaggatagctccggagatgtactgtccaagtcctggagccgacacaagcaacgtcctgtaagcttgacggttagcctccgtgttctctagcccaattgacgccaaacgctttccacaagtcgcgttggactcatccatcgccataattccgtgtcccggagacgcgattgttttctgcaacccatatcttaatcattaaccattgaaatgaaaatgaaaatgataatgaaatatacttggattatagagttaattacagcggttttgacgagctcatcggcgtaagcagaagcggctcggacggtgagagcggaaggtgccacgtggctgcgaatagctgagacagaggaaggttgacggaggagaagactctgtcccttaacccaatcagatttcaccggtgaggctttgagcatagtcgcagtgcttgacgccattgttgctagtacttgcttgctagtgagagcttaaaacgcttgtaacgcactacgataaacaatcgtgcttttcggtggtttgatatatagagactcaagtgacatacaaagattggataattgaggttctcgtgagccggctgacgaggatttgccacgtggatgatgataatattttcagataaaatgccaaaaaagactaaaccatatgataaaaacctctcagaattatagaatcaaaccattaaaaaaaataaaaaaaattatttagcaatccgagcataagagaaatcgacaattcccaacaaaattcatctaaaaaactatagataacaaaaattacaatgagagattagtttgtgaggtggtgaggagttctcacaggtttttaaggctgaggttatgtttggagattatcatcagatattgtgaagtctacatcaacggttcaaggcatgccatgtcaactcccacgttaattcttgtgccttatggcgaagatgtggtactatcatttcttaggtgtacgttattcattcaaagtaacttggagatatcacatttataatggcgttcaaactagctatttgactaacggagactctcgagttttagggagagattttctacacactcgtgagaaaaaaatatattcatttactctttgaatttgaatttgtgatagatttctctcaatttttagttgttttacgccttggcatagttatctattacttcttttgatctcgttaaatattttgtccgtaacaagaatatatgttgtttcttatttttctttcaatacttgcgaattgtcttacatctttaaagtgaatgtgtgtttttgtaatgcatcaaaattgtttttttttctttgtaaaatgaaaggaataaaccgaaaaaaccaaaatcaaaccgaattacattgttttaaaatgatttcatttttttttgtaaaaacccataaaccataagctaaggaaactattttttttttgggtgcaactgccaaacttaactactacatactattttaaaactagaaaactataaaaaccaaatagtaactcggaatgcgcactcctaaactcaagtttacaagtcaagacaagtcataagtgaagacaagttgatgatgatacatcaaatatattttagctttatagtttagagcttggtatttcaattcggaagtctttattagagcacttctatcgataggttttagatggatatctaagctaataaaaatttgaaaagaaaaaaagttgtagagagagtgagagagactctcttaaatgagatacctctagaacctctccaaacaagggtcacatgattaatgatttagttcttttaaaataaataaattttattatataataaattattaatataattctgataaaaaactttttgagtcattccactgatggggattctcttagatactactagattttgatgaagcaacttattaatatagttttgatgacatcactttttatatgaatttaatttggactaattgtgttgtaatatagcgaaaaagtatgaactcaaagcgaatagatggaatgtgactgaacagttttcctagaggggggaacttttctcatatccatagagatgggacaaagattgtagcaaaattgtctctcaaattcaataaccgaacctattatatttattttagttttaagaataatttatattagttttaaatctaaattataaaaagaaaatcaattttaatttgaatatacaaatattatatcgagatgataaaaaatttaatacatagtatgaaagaaactgaaagatattattaatttatttagagattctttgcattattatgagatatttattactacaccattgaaaggttggacaaagtgctgcttctaaagatgcaattcatgtgcggactgcggactaaatgatcaagtggcaaatattcttaccatgcattgttccttcatcaatttgaacatcttaaatggagaatgcgtcttatacatatctttggaagctaatcttgagaaggcatattagagtcgttcagtatggtttataaattatgaagtgtcgaaagcgaatacaaaccgttgcttgcaatttgcgtacagttttaagacttttagtcagaaacatacaaagtagggtcatatgtgactcgatgcatattaagatcttcttgtcctttgtctccaacatgaaaacaacgcttttacagtcacacattgccttaccaattttcccactttctgtttcttaattattttggttctctttgcttttaaaatctcaatttgactaaccggttaggtgtaccaatcattagaccgaatgcttacatgagtaaatgagttcacaggaaacttgagttgtgttgttttctatcagttaatcaacgcaacgccgagaagctttttcaggggtttggtgcgttgaatttgtggatcaagaaacaatgcaaattca

SEQ ID NO: 10417 - DNA, 3000 bp, Unknown
  misc_feature (1)..( 3000): cDNA_ID_3036315_gDNA_ID_2213647_Annot_ID_132408 3000 nt of promoter + ATG
gtatgtgtctttccactgcttgtaacaccataagcaaaaacggttcctgtcaaattgcaaacacagagtcagaatacttccctgcaagtaatgctactagcaaatgagttggctaaaagtatttcaatgacaaacacaactcttgtttaatcgataacacagctataagccttaccgttaacaccttccatagcagccttgactacaggtttagcagctacgtcatatacttctggagttgttgactgtggtccaaaaactttatctggcatcaacaaatatggaagaacattcattgaacaaacggaggcgaccaaatctataatcaatgaacagtaaattgaaattatctccggcaataaattgatctcaataccaaatgcgtaagctgtgaggggattgtattcattcctgaccatcttatctgcgtcaggataccaaacaatctcatctcctcgttgatactccctctcactgcaatcaaacaaataacacgggagattttcaaaattgactaagtatcaattcacatttcataaatattaaacttctaaagaagaataatcgtgaaattgtatcaaatggatctgatattccgcttccagatctaccgtacctcatcggacgaaatcgaacggtgacggagatgctatctcgctcagaggtaatcgtctgcccagactcgccaatgagcccctccgatgggtacgattgggctccataagtcccggagccgccgatgggaccggaatcggaaatggtgcgagtaatcgacatagatcgggacccggttacaccgccggaattgtaaacggtagaagtaggtgtggaagaagaacgaggtaatagacgattatttataagagacgaagaagtagacgaagccgaagagtaaggactcggaggtctacggtgcgagaaaggagaacgactcctagttctagacgacgatgaagccatccactaactcgttcaaactcggttacggactcggtaaaaatctgaaaatgaagatagaaagaatcaagcaaaagaaaaaaacaccaaatgtgaagatggagagaatgtgtcagtggaaactcacatggctggggacagaaaaagcaatatgctcttcatcttcttcgtctttctctcacttctctctttcttcttcttctctacttttccatggttaagctacgcgaaggtgagaaaaagatagtgagaccacacaaggagagagcgattgtttcgtcttcttcacgcgacggtggtgaagagagagatagagagaaatcgattggagatatttttttttggtgaaagcgtctttttttcagattttgaatttttgattaataaaatatatttgtttttactgtgtcgctaatagattcgaacgtggttgaggattaaaataaaataaccgcgaaccgggttaaaaggttttcgaaacaaattgaatgaaccgaacgagcgggaagaacgatgggttagtaaaaatggaggatttcaatgtttttgtcctttctgccctttaattcgttcaatgtttttgttccggttcaacctaaaccaaagaaaatgaaatcctagtgaaatatgttcaattttaagtttttaaccgaatcagttaaaaaataaattaggaattgtatccaacaccaaatctaaaaataatgaacagatttaaagtaatttctcttaagggtcactcaaaatgttaaaaaacgtcaattccaatggaacatgatttgcgacattatgttagattctacttaactgcaacatgtcgaatagattcagtactgaatttaataatggctaaatgaaaggaaacattatccttaaatagatggtgtactaataaatcctgcaaattgcaaaagacaaaattataacctaaataaaaataaaatagaaagtaatccaataaaatggagttattacgagcacgtatatcttgcttctataatattaaacacttatgttacacacacattgaatatgtgggtccttattccctaataccaagtagtttacgtatatagagtgtgattgcttctcgaaggtaaagtagcagtggcaaagaagttgtcatatctcccacttcttgagctccaccgcacatctggctcacacgtgcatgcttttcacaatgaaatccaagtcatgttttcagcaaaaaatcatttgtagttttcccaagtatccaaagacagatttttagacgttccgatttaatgaataaggatatcaacagtacttgggacacaccaaaaccaaccttcatcttcatgaattaccactagaccacgacccatttggttcatatgcaaatggaatgttgttatttttagttttgcgtcttagtgctatgatttcaatattctgtaaatttttaattagacaaaaattgcttggtatatatagcatttacatgtaaattttttaaagaaaacttgtgtggaacaaaatatggtgccaggagagagggattgttgtcatcattattggtcgtgggcctacaagggtccaaatatgaagatccgcacccataatctgagccgttagatgaccagagaacgtgcagcccaactgcttggtgttgagtggagtaaaataaataaaaataatatggaaggctaaaatggtaaattcaaatcaagaggaaaaaatcgagaaatccaacggtcacgaacttgctagctcccttatctatggagtttagaagaaagcagcctcagaaggaaaagagagatgctgattcttcgtcaatttcagatatcttcatttgagctcttccaatctccaaaacaaacaggtaaacatgaagatttttcgatataatggcgtttattaggggttttaggagctgaatcatttatgataatgttaatctcagggttttactctagttcaaggagtgttcctctacccagaactagattttactccgatttcagagttatgagtggcaataaaggaacgaactatgaaaaactttatctgggtatg

SEQ ID NO: 10418 - DNA, 3000 bp, Unknown
  misc_feature (1)..( 3000): cDNA_ID_2715643_gDNA_ID_2213647_Annot_ID_132409 3000 nt of promoter + ATG
accttcaaggcattgttgtaatctgacactccgagtctaccgtgaagtaaccacaacaaccagtctgcctgatgcagcaataccgctgattctctgtttggcacctcagtgttccaccatgagacaagtttgcacaaggtagaagtaccagagcagactgtatggtttgctggcgctatagacttgacctctggcagagcatcagggcagctctggttgtagagataaggttgacacagaacttctccactctcactgcaacacataattgaataagcaaaggagatttaaacaacacattactgaaacatcaaatcctctaatgtaaatggaatacagaaacagaaaagagaagtgatccggtgaattacatgcctgtttaagatgagagtagttgcagaagttccatcaagcgaaatggatgagacgagggagcgaactgtgacgggaatgtcctctagcaacgaaaaaagagttgctttccatgagcttgcccaacccatgctttcttctttctatctagatttcaaaacaaatgtctcagtccatagctttctcttgattttgttcataaagcagctcagaaattgtatatgatatatatacaaggatacttaatgcaaaagttttaccatgaaaggaggatattctcttttgccttgtgctttaatctctccttgctcatcaataactgtaaatcgacctccagaagtaccaaaatccatacccagataaagtttttcatagttcgttcctttattgccactcataactctgaaatcggagtaaaatctagttctgggtagaggaacactccttgaactagagtaaaaccctgagattaacattatcataaatgattcagctcctaaaacccctaataaacgccattatatcgaaaaatcttcatgtttacctgtttgttttggagattggaagagctcaaatgaagatatctgaaattgacgaagaatcagcatctctcttttccttctgaggctgctttcttctaaactccatagataagggagctagcaagttcgtgaccgttggatttctcgattttttcctcttgatttgaatttaccattttagccttccatattatttttatttattttactccactcaacaccaagcagttgggctgcacgttctctggtcatctaacggctcagattatgggtgcggatcttcatatttggacccttgtaggcccacgaccaataatgatgacaacaatccctctctcctggcaccatattttgttccacacaagttttctttaaaaaatttacatgtaaatgctatatataccaagcaatttttgtctaattaaaaatttacagaatattgaaatcatagcactaagacgcaaaactaaaaataacaacattccatttgcatatgaaccaaatgggtcgtggtctagtggtaattcatgaagatgaaggttggttttggtgtgtcccaagtactgttgatatccttattcattaaatcggaacgtctaaaaatctgtctttggatacttgggaaaactacaaatgattttttgctgaaaacatgacttggatttcattgtgaaaagcatgcacgtgtgagccagatgtgcggtggagctcaagaagtgggagatatgacaacttctttgccactgctactttaccttcgagaagcaatcacactctatatacgtaaactacttggtattagggaataaggacccacatattcaatgtgtgtgtaacataagtgtttaatattatagaagcaagatatacgtgctcgtaataactccattttattggattactttctattttatttttatttaggttataattttgtcttttgcaatttgcaggatttattagtacaccatctatttaaggataatgtttcctttcatttagccattattaaattcagtactgaatctattcgacatgttgcagttaagtagaatctaacataatgtcgcaaatcatgttccattggaattgacgttttttaacattttgagtgacccttaagagaaattactttaaatctgttcattatttttagatttggtgttggatacaattcctaatttattttttaactgattcggttaaaaacttaaaattgaacatatttcactaggatttcattttctttggtttaggttgaaccggaacaaaaacattgaacgaattaaagggcagaaaggacaaaaacattgaaatcctccatttttactaacccatcgttcttcccgctcgttcggttcattcaatttgtttcgaaaaccttttaacccggttcgcggttattttattttaatcctcaaccacgttcgaatctattagcgacacagtaaaaacaaatatattttattaatcaaaaattcaaaatctgaaaaaaagacgctttcaccaaaaaaaaatatctccaatcgatttctctctatctctctcttcaccaccgtcgcgtgaagaagacgaaacaatcgctctctccttgtgtggtctcactatctttttctcaccttcgcgtagcttaaccatggaaaagtagagaagaagaagaaagagagaagtgagagaaagacgaagaagatgaagagcatattgctttttctgtccccagccatgtgagtttccactgacacattctctccatcttcacatttggtgtttttttcttttgcttgattctttctatcttcattttcagatttttaccgagtccgtaaccgagtttgaacgagttagtggatggcttcatcgtcgtctagaactaggagtcgttctcctttctcgcaccgtagacctccgagtccttactcttcggcttcgtctacttcttcgtctcttataaataatcgtctattacctcgttcttcttccacacctacttctaccgtttacaattccggcggtgtaaccgggtcccgatctatgtcgattactcgcaccatttccgattccggtcccatcggcggctccgggactt

SEQ ID NO: 10419 - DNA, 3000 bp, Unknown
  misc_feature (1)..( 3000): cDNA_ID_2715639_gDNA_ID_2213647_Annot_ID_132410 3000 nt of promoter + ATG
acttatattgtaatttttaattttaataataatttttacttagttatatctatgctaaattcttatttttttttaagaaatttaatacataccgaatttaatacaccaataacacatgtaaatatttttggatcagagtggttgttacggcccaatggatctagtgagcctaaatgatacgaccatatattgtttttttttcggttttcgccaacgaggatttggttaccgagagtttgtttgaacggtcctcagaaattcggagcttgtagcttctcggtgcggtgccttcactttaatggcggcaatatcccctgttcaatgcttattctcttgcaattctcatcatcatcatcaacaacgcgagcaggtgaatctctctgttcttatttcttcataattagcgagaactaccttcttcttgttatgacttcattcctccgtttttttcaagtagagtgggtcgctttggagattgggttctagggttttagtatcttcgagtctatggaagctttctctgttctctggactccatttgaaccgaaggtgattatgttctagttaacgatttcagtaggatttggcccttgaagcgatgattctgtgtaatgcagttggatatgagataattgattgcaatcttttgggtctaataaaacaggagaactttgatctgtgcagtcaagggagatccagaagatgcctttaagaagactgtcgaaatcgatcggatgattgatgctcttagagatgcaaaccctagacaagtaaggaaacatgtcatatgcatcgtataaatgttgtgtttttgctctattatcttgagtaaattgagttttgttttgttgttgttgccattttcattgaacaggttgagaagattgttgttgaaaatatccttgcttttgatgaggttttttggataagactagcagctaggtcggatacttgtaaatcagaagatgacaaggcatgagtttatattgtttatgtcaatgatagagcagacttttgatctcttttgtttccgctaatgctttgaatacggtttgtttcttacagaaggactatgaggagttagctacaactgtgatgactatagttgactgtgttgtgaataagactcgggtttctctttcttctgtggttttattgtctcttcttcttcagcgtttacttaaacagggataactgagagttcattatatccctttaggaaaagatagagacgtctactgatattctgaaagggattttaagacctgctatagatggagtggaagagatttcatggccgccaagagatcctgaagccatcaatctaatgaaaaaggtttatactagttgttcttcactttctactacatctacacattttttatatatacaacctatattcagaagggttatctggtcttagattctgtgatttgatatcgtcatggttactgagatcagtgtattaacaggaaattatacaacgggaaaaagaagggcaattagatgaaggatttctttcagaagttaatgctcagctccggcaggtaagtgctacaatttgttttgtttcacttctgaggtctttcctttacagtgaatagatgtattcttttgaatgtttgaggctgacgattgttttcaggcaaaagaagataaagacaaaccagggttattggctatgctgcaaaaagttcttcaactctattctgctactatcctctccaagcgtagctacgcaaagaaaggtgatttgcccaattttgaaaactatgccaagtcactctaaaccattttctacgaacataatctcatccactatagctattgtcacagggaacgaagttgtaaaagccgagcattttcttgaaactctgatcaaaggtctgttctgcaaccacttttccatgtactatagaccccagccagacttcacatcggtttattatgtgtgtttcagctcctgaggaacaatggaacaagcttttcgtagacgggttaacaatcggaaaaggagatatcacacctgatgagctatctgctgttatcaagaaacgaatcgagcgcacactgattcgaactgtaagtaacataccatgacacatttgcttgcattgttattattctcttcaggagtgaatgcgaggctaaccgggttttgggttggggttttaaccagatattgttttctaaaattcatcattctaaccacaactattctgatcataccaggaagggggttcataccagcagcgaattttgaccgagtatctcaaaggaatcgagtccagggctaatgaaattatgaaattactccagggttaatgtcgtaaatcatgtatttatctatacatttttgtgtaatatcagttcaataaccccaattaatatattgttttctctcatgtaataattttttgattgagcatttgaagtgttatctgatttaaaaatatgaagctctgtagtcaaaattttacagattttaattatcttggaataaaaaatgtaaagttgatgcttccatataaaataaaagtaaaaatgagtaattcatgccaattaaattagcgagacgcaaattggagacagagataactgagcggagggattcagatctatacgacgaaactgaatctcaccgtcttcttcttcttcttcttcttctagacgatccttgtgtttctcttgctctcgcatccacgcttctctggtaatgctactgatcgtcaccgtgaagctgagcttgatcgcttccccttgtgaactgatctgatctgaggtgaatctctatttcttctccttcttcattgtacgaatctcgatttctcggatcttgctgcttcttatcgttagatctgttttcaatttcacgtggattacgttttttttcttccttttgcgggtttttcgatttctttgaactgatctttctccatgattttcattctctgttgatctggtttttgtagagttgtttctgtttcgtaatctgtgaat

SEQ ID NO: 10420 - DNA, 3000 bp, Unknown; identical to SEQ ID NO: 10397
  misc_feature (1)..( 3000): cDNA_ID_1808176_gDNA_ID_2213647_Annot_ID_181463 3000 nt of promoter + ATG

SEQ ID NO: 10421 - DNA, 3000 bp, Unknown
  misc_feature (1)..( 3000): cDNA_ID_2715631_gDNA_ID_2213647_Annot_ID_132412 3000 nt of promoter + ATG
cttctctttggaaacactactcatcccaagaaagatcaagataggggtacaatggaagtaacttcaagtgctaaccactaacctaccacacttttgtaaggatcgagctacaaaaatagagaagtagtacatataaagagtttagtattagtttatggatggtgatgataaatttagagcatctttcaaagtctgaactatatgatttaatttgtgtccataatattatagacaaatgagtatgtttaacaggtggcccatgagggtatcggattaactttcgtctttacctactagcctactttatttactcaatttcattattgtcctaactatagatatatagttaagtatttttgtttttaatggttacataatcaaattaaactgatctacatgttaataatctaactagctatcaccaataactaacatatccaaaataacaaaacaattcataatcgtaccacgtaccgtgaagaatcataagttttcagctaaaattaagtatgagtaaatagattaacaaaatgtatacacatctttggtaaagtatcttatgttttttttaactcgtcttatgtcaatttcataagtgagatttctaacacgtttagtcgataataattttccttactgttagtcagtcacaattttcattttgactttaaacatttattgtaatattcttttcttatgattaagtacatctctatttattatactttgctataaaatttaaaataagaaagaagattatcattaatcatgtaatgttaaaataaaaagtacatatgttcgtcttgttaaatgtgatatttaaaaaacagtcgtgttaattatgtgatatttatcatcaagagtttccaaaggcaaaagtggagaaaaaacattcaatcttgttttgcataaaaaggctacgtacgtatatgtttgtttgcaagtaaagttaggtgtgtctttagtctttacttatattagtgtcttagtgaatcattctttagcaaatcttaattaagtttccttaaacaggtgtcgagatcgtacattatgtggtgcgatttccatttagcattagctttttggaattattccctcccataaaaaaaagtgttgtattattgtagcaacaaaacttttaaggtttttaaatttggcttagttaaaggcgttaatgggaatcacaccctatatgatgtagcctatgcatgtaaagctaagctatagattaatatatataacccacaagtttaatagattactacttcttggttatttttaaaaagacagattaagaataggaattaaaaccaaaaatatccaccccggatgtgtatgcttgagatatagatgacatccaataacaaaaagagaggggttctctataatgttgaaagtcaaaaatgaaatttgtgactgactaattgtggttaattcgatatttagtgaggttagaatggatcggagttttgtaggagactagtgcggttgggagattgtttcccaccatagtttttttgtaagaaacgaacgtaatctccgacttcatttttgatacatattttctatgtaacgagagaacgttctattaacggggttaatcggcgagttaacattttgggattttggccaggtcaacgtttaaaggaaattctttacttcttctttacttgcagttttgtagtgaccacctcttctttacttgcagtttcacttctgcaatttgggtagatttagcgagaggaattttcaaaacacagtacacttcacactgacaatcgataattgaagccattacaaactctcagcatcaccgtgtggaatggtttctccgccgctatgttttccaagccacaatctacattgtgtggagggagcggaatggtaggcgtcacggcgagcctccgaacacagcatctcaactcgttggttggatagataaacaaattagaaatcagctgtcctctatctgtctcaagggggacaagcgttatgatggaagtctccaagtttggtttcagtcaagaagttaatctcttagctctgtttctttcttttgttcaaaactattctcagctctaattctcaaaaccaagctgcacttgttgtaaaaacgtttttctttggaatataatttaacattatttttaaaaaaaaaaacaaaatggctgatcaacgtttttatcatgtttaatttggccgacctcagaattcacgtatggaatgagcactttttgaaagttcacgtataaaacaacatttttcccgatctttatgatatcatttttattgatatgtttctttttttctttttgttaaaggatttgttcttattttgtgacaataatatataataagagttcttgattatgatcaaagtaaactttttttgtagaacccatgacataacatacatgatacaaccaattattcccactttgaggttcctttcactaatattcaactaatattagattattattttattagcttctatacttttaaaaagtttacaataaaaaagtgaacataatctttaaaacagttatttatcgtgaattattttgaaaatagcatttattaacacacattttctcttaaatatctttaatttcgtatttatttcatcaaaataacaatatttaatcgtaattacgaaaattcaaaattggaataaattgttttgctaatcgttatttattgggccataaccagtagagaaagcccgaactaaatatgggccgatacagagagaccctaactcaaatctggaaacaaggacaaaatggtaattcagacaactagtaatgatttatcataattgattcatgatgaatcatcatcatatgtgtaatggtatggtcaaaactgtgttaaaaagatacattaaacaaatacgtggcagtaacaacaacaaagttacctctggctcaaaattgtcccttcttagctcatcattgatccactgagagagaggattacgaatacgagatcggagac

SEQ ID NO: 10422 - DNA, 3000 bp, Unknown; identical to SEQ ID NO: 10404
  misc_feature (1)..( 3000): cDNA_ID_1808761_gDNA_ID_2213647_Annot_ID_132414 3000 nt of promoter + ATG

SEQ ID NO: 10423 - DNA, 3000 bp, Unknown
  misc_feature (1)..( 3000): cDNA_ID_2715623_gDNA_ID_2213647_Annot_ID_132415 3000 nt of promoter + ATG
aatgtttgtttattatatggtttcatcttttgttgccaagtttaaatctttatgatctcgttttgcatttttcagcctctagaaaaaaggctgaagaagctcaaggaagtgattgttgtgaagaatggagatagctcaggatctgactcgagtccacaaggttatgacgaggaggattcatcgaggaattctactgatattgacaatcaaagtctatatgtggatgcagaagaagaagaagaactttggaggaagatggcttttgctcaagaatcaattaaggtaagcattttcagtgaatagaagaccacctctaatttgcatatagattcgagttctggagcaggtacggtgtctgcttctctgtccagcgttttccgctgatctttgcctatgttcatggctaggtaacggtggaggattcacaaagtaatgatcacaaacaaatcgaagactgtgaccattccttcatttgcaaggacgatattggagaagtgtgtcgtgtttgtggacttatcaagaaaccaattgagagcatgattgaggttgtgttcaacaaggttagtgatcactgataactgtgtctgaaatatattgattttgttacaaatattcagaagttcaatctactttctttcctggtgtagcaaaagagatcgaggagaacttatatgcgtgaaaaagaaaatggggaaacgagcagggatttctcaggaatccagtcttctcatacaaacattttgggagaaaaaatgttcattcacccatggcatgatcaggagatgaggcctcaccagactgaaggatttagatttttatgtaacaaccttgcagcagatgagccaggtggatgcatattagctcatgctccgggatcaggcaagacatttctgctcatcagctttctgcagagtttcatggctatggatccgcaggctagaccattggttgtgctaccaaaggggatcatagagtcatggaagagagagtttactttgtgggaagttgagaagattcccctgcttgatttctacagcgtgaaagcagaatcacggaagcagcaactgaaggttttggggcaatggatcaaggagagaagcattctgtttcttggttaccaacagtttacgaggatcatctgcgatgataactttgaggcagcttcagaagattgtaagctgatattgcttgagaagccaacgttgcttatacttgatgagggtcatacctcaaggaataaggagacctacatgcttagttcgcttgctcgtgtcaagactcgtcgaaaggtggttctcacaggtaccttgttccaaaacaacgttgaagaagtgtttaacattttggatcttgttcgtcccaagttcttgaagcgccctggaactcgggagattgtttctcgtatcatgagcaaggcagagataccaagaggaaaacaggtgaaccagagtagtagtagtatcgaggggactttctttgctgcagtagagcttacattacagaggagtacaaacttttctgccaaagccagcttgataaaggatctacgcgaaatgacccgtaatatcttgcattatcacaaagcagattttagcggcttgcttccggggcttagtgagttcactgtcatgctcaacctgagctcaattcagagagatgaagtaaaaggtctgaggaaaatggaactgttcaagcagatctctcttggtgctgctttgtatatacacccaaagctcaaatctttcttggaggaaaacccttccaacggggaaaagggtttttctgataacaatacaacagttatgaagctggacaagatgctgaaaaagatcaatgtgagagatggggtgaagatgaaattcttcctcaacctcttagctctgtgtgaatcaacaggagagaagctcttggtgtttagccaatacattgttccaataaagactctcgagagactcatgagctcaatgaaaggttggcgtttagggaaagagatgttcacaatcacaggtgattcaagcaatgaacagagagaatggtcaatggagagattcaacaattcactagaggctaaagtgtttttcggatcgatcaaagcttgtggggaaggaatatcactagtgggtgcatcacgggttctgattcttgatgttcatctgaacccatcagtgactcagcaagccgtggctcgagcttatagaccaggacagaagaggaaagtatatgcgtacaagctcgtagctgcggattcaccagaggaagagaactacgaaacatgtacgcgtaaagagatgatgtcgaagatgtggttcgagtggaatgttggatcaggaagagaggattttgggtttagagccattgatgctgatcactccggtgatgcgtttcttgaaacgaccaagatgaaggaagatatcaagtgtttatacacaaaggtaaactgatttgataaccgattataaccggtttaaaccggatatttcgtttggtcaattagatgataacataatattttcatacttttttaagtttttatattttgtagacatttgggtttaagagatgaaccgaattgaaattgaatctcgtttgatggttcaacgagattccggtttctattggttgttttcttttgaatctgaaacacttttctagtaaaaattttgagtttatattcatttgaattttcaattatatacacttttgttgagtttataaaaatacagtaaaataaaaccgatcactaatgccaaaaaagaatagtaaaataaataaactaaaccgaaaaattgaaccgacccaaatcgtaccattcgattcggagtaattttatctggattagtcggttaacatgggtttagtgatttaatagataaaccctagatttcttcttcacatcatcttgagctcagctcttcctctatctctctgcaactcaaaaaataagattgtgaaaaaccctaatcgtaatctctcggttgagtcagtcttaaggtatcaatg

SEQ ID NO: 10424 - DNA, 3000 bp, Unknown
  misc_feature (1)..( 3000): cDNA_ID_2715619_gDNA_ID_2213647_Annot_ID_132416 3000 nt of promoter + ATG
ttgtttttcatcaccaatgtgaatcttaattagactcttattcataaatcatctatacaatatggatcttaaatttttatattggaagagtagaagggataacatgaaaaaaaaaatagtacttgtagatgtgtaagagcccatctcaattgatttgaagaagaagcatgtttcatgttctttctttttgtacatcatgtttatggtctttcgaaattgaccatagttcatgttatacaaattatcgaataatatgttagatgatacaaacataacggtattttaaatattcccgcgaaaaccaatctacttaaggtcttctatattttctttttttggatttgtttgaataaatgaaaaaaatatttttggtgtaaatgtttgattccttttgtttatgcttctaatttttactcgtgattgatgatgaacagcttggcctccaaatccacttagcaagagcattactcaaggagatcttgccaagcgccttgacccattctatctacctaatctctttgatgggtttgaagatagtaaatacggattgcttgttgatgatgttgtgagactttgtaagctgaaacgtgactactcgagtggttatatctcgctggcagatattgaagctagagaagagaaaaaaccagccaagtctgctaatattattattagcgaaccaaccaagtctactaatattattatcagcgaaccagccaagtctgctgatattattatcatcgattcagatgatgtgttgcctcaagaatcagttattgtaagcttttaacgtttgttgattaatttgatttcatcttttgtttagtaaatacttataatcacgttttgcattatttttcagcctccagatgataaacgatcgaagaagctcaaggaagtgattgttgtggatgatgatgagccttggttttatgctaatgataagttgactataggctcggcttctactagtaatgctgttcgaaacagttcttatgatgttgtgatgtatggaaatagctcaggatgtcttcaagaaggttgtgttggggagggttcatcgaggaattctattgataatgacaatcaaactcctctatatgtagaggcaaaaaaataagaagaacattagaggcagatggattttgctcaagaatcaattatggttacttcttttacattttaattcagtcaatcacatagctctctttgcatatatagattagagttcttgaatatctggttagagtttccggctgactttttttgcatatgttcttggttaggtaacagtggaggatttaccaagtaatgatcacaaacaagttgaagaatgaagaagtttttttttttttggttgttgtcgtctgatgcactttcttaatattatttcctataattaaatataatttgaatatatttgtattcaacgagcaattcttgctttattaaataaaagtataattttaattttatactagctgttgaaaaaataaaatagtattaccatattgacgagtctatattaggtaaataagtatgaaaattggaaaatgactagtgatgtttgaataatttgccaaaacaatttcaaaacttaataggattgagtgtttgactaagggtgttttttttgggttaaaatttgactaaggttaaatttgatatgtataattaaaaaatatataatctatgtgaaggtgaagaacatatctaaccagatattaaggacatatatgtgaaggtgaaactatttgtcactttatgtgaaaatattccaaaattgaccataaacatgattcaaatatatcaaataaaaataattaatatgctaggttatatatatacataacggtattttaaatcttcccacaaaaactaattatttaaaggcgttcattttttttttttattagctttttatagagatcgaaacggttagttagtttcttctttaccgtcaaaatttaaaactttttgatttagggaatccctaatacaccaattgaagtattagcacataatcattttttttattggatgtccccgaaagaacgacactgaatcatgtaacaccaatttgtaaaaagattagcacatgtatgtatatagatcattttttttgtccaaggtatatagctcatttctattcaaacatagaaaaatatgtaagagagatagacataaccatgtgtccaccaaaatatgagtacactaagcataagtttgaagaacacattcatatatatcttacacacaaagatacagtagagtagagagcaagttgaagtgtatagatattatagatgtagatatatagttttgtcttattgactttccgaaaccgtcattgttcttgtctctctcctttgccactttgccaccatgactaattactattatgggaaacaaaaagacgcttcagtttttccagaaaaaaagtagatctatttgtcttctttgcttgaaatctctctgattcatgcataaagcttgcatctttctagtctttaacatgtttggagtcgtagttttgatttaaggagctctgtttagcgaagatcaaacatggtgggtactaatcagttttcattttcgaagccgagagagacgcgtacgtttatatactacttacactcgtttctttttcttctgtaacctctcttgttgttcaatggtgtgacaaagaagaagattagtctctctgtttatggaaagttcaaagattcagacttttgagtgtgcaaatctaaaaagccaaatgggttttgcatgatttctaaagctaaaccgaatctgttgattcaattatgtttttgattgtatcatacatggggttttgttttccactaagttcatttctggctgtagctttcctagtggttgagattttcaactaaaaaaatcgtttcttttttgggtttgtttgaagaaattaaacccattttggtgctgatgccttttgtttctgcttctaatttttactcgttattgatgatg

SEQ ID NO: 10425 - DNA, 3000 bp, Unknown; identical to SEQ ID NO: 10402
  misc_feature (1)..( 3000): cDNA_ID_2715611_gDNA_ID_2213647_Annot_ID_132418 3000 nt of promoter + ATG

SEQ ID NO: 10426 - DNA, 3000 bp, Unknown
  misc_feature (1)..( 3000): cDNA_ID_3036259_gDNA_ID_2213647_Annot_ID_132421 3000 nt of promoter + ATG
tcctttctttgcttgctcttcaggcaaggaaagttcatccagacaagaaccctggagaccctcaagctgctaaaaactttcaggtgttttgtcatattgttactgtttctttccagggtctttatatgttgttttactggaatcacatcaaattgctgatgacgtctctcatttgttgattttcatgaatgaaaaaggttttaggtgaggcttatcaggttctaagcaatccggataagcgagcagcttatgacaaatatggcaaagaaggggtccaacagtatgttttgtcctctctgtttacaactttgcatctccaacttcggtttgtgattgatttttcatttgcagggatgcaatggttgatcctgcagctgtatttggtatgcttttcggaagcgaagtctttgaagaatacgttggccagcttgcacttgcttatttggcatctatcgaagctgacttagaatcacatgaccctgaaatcagaaagcaaatgcttcaagacaagatcaaagtacattgtttatttatcgttctattttaacacatgtcgatgttttttagctacttttctccatatattaacgtgggatttgtgtgcaggctcttcaaaaggagagggaagacaagctcgccgctacattgaaaaacaaacttgaaccctttgtggaaagacaaacagatgaatttatcgaatgggcaaacgaagaggcaaagcggctttcttctgccggtaagttttgcatttaagctatagaggaaagtctttcaatgtatatatataaactagaaagatttacatcttcttgctctggatgtttaaggttttggcgaggcaatgatgcatactattggttacatttacacaagaaaagctgctaaagaaatcgggaaagacaagcgatatatgaaagtaccattcttagctgaatgggtgcgtgacaaaggccaccatatgaaatctcaagtgatggctgcttctggtatgaaacaaagctaaatataaaccaaaatgttttggttttctaacttaaacaaaatccttactaattgctttggatgattttgttttggatctgtaggtgcggtttcgttacttcagttgcaggatgaagtaaacaagttgaatgaacaccaaggagagaacaaagaggaacatattcagaaagctattgaagctaaaatggatgctttgcttcaatctctttggcaaatcaatgttctcgacatcgaatccacgctatctcgtgtttgccaatctgtaagatactatgcttcatcatacattatatgaccatttcttttgtagcaacaatcgacgaattaatcttgttgttaattatatatgtatctttctctcacaggtgcttaaagatccaagtgtttcgaaggatgttcttcgagctcgtgccataggactgaagaaacttggaacgatcttccaggtgagcaagaagaacaaaagggttcgtatcataacataaaagaaacactcattgtgtttagatttaagatgtcgagagccaaaaaaaaaactttttgaaaaaaacatgtaactcaaaaccttagtgaatttctctgttctttttctttgaagggtgctaagaagccgtacacgagaggaagcagcttgcgtcgggaagccaccaccgtgaaaatggacaccggaggttcttcaaaggcgacgtcttgaaactccggaacttaaaatgctgtttcttttattggttgaagttggatttgtccttcgttttttactttccccagttttgtagagattgctttctatgttaacttttttttcgtgtagatgttacatttaaggtggtgcattactgcattctcattaaaatcttttcgtcacattattcaaatttcttatacattcagagctagtgatgaaatgatctaaggaacaaaatttacaatttactttcggtaaagaaaaaataatagtgaatagtaatattgtatgtatttgggcgtgtttgaatcgcgtttttattccctttccatctttccgcgttgtgatcgttttaacatgacgtgccatcgttagcctaattccgctaaaactaacgacaacagaccaaaacaagttaaaatgcagtgtttggttctattaaaccgaatactaatcaaaccggtctgctgacactcgacatttcatttggtacggtttatgggtcctcaacctaaaccacacgccaatcggaacggtttatgggtctttaaccggtacaagccaatgggagtctaacggcgttaaacaaaaccggtcagagaagacttttattcgtctctttccttcacaaggaaaaaaaaagagagagagaacgaagcaaaaaacctcgctcgctagctatgtgaagaaactatcttcgttataaaactttccggcgacgttttccgacttccgagagcaggttcggtgttcatcacttgtcctctcacatgcttaattcttttcgattttgttatttagttttttttttagtttctattttgggtaatctcgacttggtttgcaagtcccttggccataatatcggatctgtttaatgttagttatgtagatattgcccgattcaatttctatttttagtgcctttgagaagatttttcattttggattttcttagtgaagaatagtcatcacagttcactcacctacatgttagtcagcaatggattactggatttgattctctctttattttcattctactttgaacttcatttatcttggccatggccagtttaagttattgtgtagattaatggtaagctcttttttttagtgttattgttgaggttatagtcataattgattctgattgagttcttaaaattgtgtttttttttgttggaaggttttgaggtggttttatgcgccaaaacatctaaccggagtgtcgttgtacggtgcttagtagttttcaataacacgcttcagttatggggaatgcttgttgtgttgctactcgagacaaaatg

SEQ ID NO: 10427 - DNA, 3000 bp, Unknown
  misc_feature (1)..( 3000): cDNA_ID_2715603_gDNA_ID_2213647_Annot_ID_132423 3000 nt of promoter + ATG
gttctagtcttctagatgttttatattgttcttcatttactcaattttttcacgcagtgcaaacattattctcaagatgacacagagaacttcgagtcagatgagtacagagaaaaccaagaaagtagcagagttaaaccagactcaccggttaactatcaaacctacttgcagtattgtttgtttgaaaagctgcatgcgatcattcatcttaattgttcggtttcttactcctctgcaaatcatacttattaccataacgtgatctagaagtttcaacaagaggctgatgcatagaaagctgatgaagaagctgaaactgcgggtaatgtaagaagtcactgctttgctcattttatcatatgctttagtgatgaacctcctttttgtaaaatcatatttgtttgtccggttctgtttgtgcatgtatattcagcaactacgatttgtcgatttaacctgaaaatttgattttttggcctggttttgtttcaaccaactggattagtttactcaaaattcatttcagaaaatgatcatttaaatgttgtggttcttgcaggcgaaatgcgaggaaacgcaggtgcgaggtgtgttgctcaagtagaaaccgagaacggtccaagatcagaccgtacagagttccaacggtggattatttagcaagacaaattctgggcttctttttgattatttagcaagacaaattctgattttcaagacttgatctagaatgtaattactattttttgtccaactggatgcattttgtgggttacattattgtattgaaataaaatatagtgtggttatgttgaaaaatgattagagcaatgattgattaaaaattctactaccagaacgaacgtactaaccaatcataacacaactgatcattacgaagtctaaaccgaaagtcaatatttcgtgctgttcagattcaattaatgaaacttgtctaattttcttttgtcaaaattcactatctgttgatttctgtaatataaaaatggatatatattgtgaaagtaaaacaaattaagtaataaatatattcgaactagaaatgggaaggcctaacgaccgttgaccctccctttaattgctccgtatttaattgatttttcttctaatcttgttatcatcctccgctatccgccacgtgttgtatgggtcccacggtacgggcaatgagagaaactacactttgctccctattttaattaataattcacattttgctacacaacatcttctaattgtcaaaactcaaaactaacaatcatggtcatttaaaacaagctatatacatttttcaaatctgtatttcaaaaaatcaaataaaaatcatcttaagtcactaacctatgtgattaatcaaagtggagtaaaattttccgaaataacatttgcaaaaaattgttgaaatctaaattgacaatagttataataaaatatccaaaattaagtggggtcatattgtaaagaatatttcattttccacctcctgttttgacgtttctcttcttttttttccaacaaaaaaaacaaaagcaattaaatagtgtttgtcgtttagttggcggaattctctcagttgaattttgttataaaaatcttacaggtatacaggtctactgtccatagatccgttaaaagttttacctacggccattaatgaccgtccgatcttcctttgttgatgatgacgaggaccaactatctctgcactttctcggtttctccttatttaactacttttaatattactccaaattcacaccccataattatgcttctttttgcatatttgatcaaaaactagttctagtgacagaattaacctcaatttccgtaaaccaagttttaatatatatcaaatgcaatactcgatatcacacattattcactaaatgtgggagactttcatattttttgttttgtcacacactataatatgaagaatgaaagtaacatgatatttttgttctaggtgtaatttaatttccaaaacattaaaaattcctgacacaaaatactgtaccaccgtcaatttggggggtagattgaaagaaaataaagtgtggggctcacagataaaaacgaatgtaacagttggggtctcattaaatagcggtgcaaatacaaacttctctataacaaaaatctactactattaaaaaataattaaattcgagaggcagtttaggtgagaagaaactgagaaagttcggtccgaattctaatcccacttttgtctctcaatttgtttcccctttctctctctctctctccttcaaatttttttagcgatttttctgggtttcatgtaaatgtgagaagtagatagattctcaacaagaaaaaaaggttttttttttttttttttttggattcgtggatcagccatcttctcgaaagatttgggaaagatccaaagaatcacaatattttttcgatatttagtcgaaaggaatttaacatgtcaggtccacttgatcgatttgcaagaccatgtaagagatctcaatcttctttgtaatgttcttgcttctgggttagcttttttctaggtttactgtagcttaaacttggaattgtgtctaatataataatgagaatctaaaaattgtgtctctttgctttctcgtgtcttcaatatatgttgttgagctggttaaataatgtgtattgctttagataatttttaatgtgtctcatcaaatcaaaacagctttcactacaggttttgagggattcttgagcagtgatgagaaaaaggaaagaaagtcagattttgagaattcagaggatgagaggagaacaagaatcggttccttgaaaaagaaagccattaatgcctctactaagttcaagcattctcttaagaaaaagagcggaagaagaaaaagtgatggtcgagtgagttctgtatccattgaggatgtgagggatgtcgaggagctacaagctgttgatgcgtttcgacagtcgttgtta

SEQ ID NO: 10428 - DNA, 3000 bp, Unknown; identical to SEQ ID NO: 10399
  misc_feature (1)..( 3000): cDNA_ID_2715600_gDNA_ID_2213647_Annot_ID_132424 3000 nt of promoter + ATG

SEQ ID NO: 10429 - DNA, 3000 bp, Unknown
  misc_feature (1)..( 3000): cDNA_ID_2715686_gDNA_ID_2213648_Annot_ID_132425 3000 nt of promoter + ATG
taaaacacttcctcctctgtttgcttcccatgttgactttcctcctctgtttgctttccatgtttcttttccttcagatctgccacaaataactcaatagacttcactctcccatcaatggcatcaatcttatctcttgtttcctcaaagcctttggtcatcatctgcgttagtgagtttatagatgccacaactgcatctaattcagggactcgaggagggacagcagtcggaggaacatctttctcggggacatcagtcggaaggacatctttctcggggacctcattctcaatctcatggacaacatcatcatcaagatcattaacaatacatcaagaagaaatgtccagctcacacattcctttccaccatatcttcttcttctctacaaatagtcgccctttccaattgtcaataacaatatctataagatcgaggtcatcatcaacatcatcttctaagagactgtccaacagatatttctcatgatactcaggtaccaaatggctagcaatatcctgtgaaaagaaactcatttagcaatcaagcaatctcatgatatacagacaatcaagtaaatacagaaactctaacctcactattcccaagctctttatatataacttccaacgggacacctttcatgctacattctttaaacttatgcttgcacatccttggacagtccttctctgcacgtacagggactctaaatttcagttgaagctgtagaatagcctcataagccagaatctacaaataacaaaacaatgtttaatatcataaaacctgtacattacaccttatactcatataatgatcataaattacttatctcgagaggcacaatgaatccactgtagcaaggttgagcttttggtttcacgaaaccatccacgttcttcatcattttccttatcccatccaaacattccaagaagtattaacggccccacagaaacgtctcgtactcatccaaaccgccaacaatccttaaaagaatctcttctatgtttccatcattctttgagtttgcttttactaccttgaccaggaagtacaacagcactaacttcaacctatctgtaccgctgcgtatcttctcgtacttagtaagaacttttgaaacctttatcccagtttcttttttgaagatcctcttcacaaactaagtattccccattgtcttgagttattttgggtaactacggcaatcaaactcacttaacaacgcatgctctttaatggaatacctaataggtactctatttacaacaaaccaagcctcctagagcaaatctgtcttcactgtgcgaagcataagcacccacatgccttgcatttggtggttaggctcctgagacatgtggaatatacgcttgaactgtgggtgttttcgaaatcattttgcttcttctttaaaccttctatctatcattgccactatctgcgtgacttggcacctactgcttatcttgcacactttgtcgtattctgtaaaagaaaaatacatggtctctggcgccagtggctgagaatcatcttcatcatcctcctcctttaaactatcattgccagcctcatcttcctcattttctttacaagtaacctcatcatcctctggcccagaatcatcatcctcggcctcacatgtatcctgcaactgcgaattcaatgaacattgaccaactgaacaatttagaggtatcaaactaacaattcatatgtactcattgaactagttccatcaaattacttatatcaaacaattgtcacatatgaactagttgtatctaaaacatttctaactaatactcaaacaaaacaaatgtgagtcatagagattccaatgtatatacttgacaattaatgttctctactccttcttttgttgtattcaccatttcctcctcctccagctcatccccatcaccttcattcgcttctaggatttctataaagacagcctcaagtagaggttcttttgcagtatgggttggtggttatgtcttacccttttcaatatcggcggttcctttagaagaagcctcatcaccatctagcgattcctctatggcctcttcaatttcagcagttttttttggagtcttattcgctgaaacatctgtttcagctggttcggtcggaacctctacggcggcatctccgtcgatctcaatttctgaagaaactgtttgtgatgtcgaaacttcttcggacggcctctccgtcgactcatatacatggccaccggtaccatctctaacacgagccatcaaactattacacgaatcaagaattcgtcgaaaaatcgtgaaagccgaaaaattaggaatctgattttggaagaatctgaattttgtgagagccgtttttttaaaaatcaggaatttcacttaagtgtttgggatgagttttgtatcgatggacatatatcttaattggatcgaatacttttttgggtcgtctaggttttagttttttaccaattgttttgattttttcttatttttagtttaacaaagaattaaaaattagaaaaatgacattcttgattttttttttttgagataatggcattccaaccatatattctatcatttgacttaagaccgtttccgtttactaaagatcgatataaaaattggctaaagattagtaatttaaattttttgttgtttcaagttcaaaatcgcattgcatatttggtaaaggtttaccatatttgacacgatatgtgggaaaaaaagaaagtaacaccgatccaaaaaagaaaaggactcttaccttaactttttattattaacatatttgaccctaaaacttcttatctgagcttatcagaccaaaccaaggtcacaaataaaaaagaaacagatttgtaatcgattgttcgattcacttcatcgttggcacacacacatactctctattcgaaaaattcgccactgcaatttcttctagggtttctggtaatcctcacttagccgggcaatg

SEQ ID NO: 10430 - DNA, 3000 bp, Unknown
  misc_feature (1)..( 3000): cDNA_ID_3036389_gDNA_ID_2213648_Annot_ID_181537 3000 nt of promoter + ATG
tgtggctttgcaagaacaattacttgaagctcaacgcaagatagaagagcaggtttcttacaatcagaagcgtgaatctgagattgctttgcgtgatgttgagaattcccgagctgcagatgagcagaagaagaagcttgagcacttgtccttagtggagaagtttttcgcgaaaataatcctcggttcctcaatttcctcgaatgtcattcagctaaggagacaaccacagatcctatctcaccctctccagctgcctctccctcttcatctgcttcataggtctgaatcttaactccttcctcaagactcaatatcacggctcaaagtttttatctatgtgtacttgtgttgcttgtatttatgctgaacaaagttctaagttgtagtgaatcgaacatgtttttgtaatttgggttttgtacttttctgaaatgataataaatttgttttcatgcttcttgtattgtgtttatgcttcttgtaatgttttgtttttgcaggaaggtttccatctttagaacaatcatataggtgttctaataaaaccaatagtcgcaaatttagtcataaaaaatgtaaccaagcagtcggtttttgataacaattcagtcactaaaatttctgactaaatgatatttcagtcgcaaatcagtcttaaatatagtgacaacatagtcgtaaattttaacgactaattacctacaacgactacataaccctcaagttaatcgttaatttgtcgtccaatagtcgctaaatttaacgactaaaatgtcactaaaaaagcgattactttaacttagtcgtaacttagtcgctctttggcgactaaaatacgactaccgtatttaccgactctcgattagcgactaaatttaatagtcgtttatttgtcgtaaagtggtgttaaccgactacagagtgactactactgaagtcggtaaatggtaattttcttgtagtgttgtttaacactgctttgtaatgttatggtttgtacgaattcattatccttctcatcaacggtactgaattttatctaattttaatgcttatattctcataattttctaagccaatatgatatgtctataatttgcataatttagacactcattcttcaccactttgtcattgtttcatccacatttcagctcattaggagtcgttttagtgtgttttgcatacttaggaaggttttgcattaggattgcatgtgcattgcatatttggttgttttcaggtactttggatgcttttggagttcaaacagaggaaaaacagaatgggaagtcaggatgcccaatgacgccttcagtaaaagtactctatcgcagcctcggagccctgccagggcaaatcactctatcgcaaccctggagaagctagcagctcagtttcactcaattgcgaagccggaggaatcaccccatcagaaccactcgaccatcacctaatgacatccactcgatcgcacttgatcacagggttgctggaccattcaatctcgacttcactacatctcactcgctcgcaaggcggagccttgaagcccagtttgatcaatgacatactcgatcacatggaagctcatttcagcccatcagatgccaatgacacattcggtcgcagggtcatgacgtgaagattcgctatatatctattttccttatttgtttcatttctcgcttatataaactgcctcttagggttttccctagggcatccgttgttatttcgtttctcatcaacttttacattttcgcaactttcatagccgcagtgtttctcctgcgactttgtattttcactttcaagtatttgatattcagttttcgtttaagtatttcgttatttctgttatcatgttttcaatcgttgctttgatattgtctttgattatgtctgagtagtgaaccgtatttctgaggatgggatagattagttgtggtttacttggtcgttttaggtggttgagtttagaatactagaatcccttctggattagttgtgattattgcttgtttcacgggctaatgtggaatatgagtccagacgtccagcgctcagaaggcgtttaatggccgttggatcctattaattctagagatatctgactctaccccaagggattggctgtagagagggtattggctttaacatgttgattcgatagtaccttcttagttagagattgctaatgggaattaggtcagtgtctagctttccttgaggatttctatcacgggagtgaattaatctgttgttgaacttgttgtctatggatagcttctgtgaagttttgtcaaccacctgaatagattaaggagaccacactattcgattaccccatccttaggaatcgtttatccatttgattgcctgttatcatttctgctttgttattcaccagcctgttattgccaaatctgcttttagtttcatttcatttctgttattgcatactaggactattagaaccaatcaactctctgcgtggcttgacttagagctttctaatcatatctcatctgtttgcatcacaccggattggattgacaacctaaaataatacaacgacaggataatgttttaggattaattgagaaaaatcctactatcaatttggcaccgtggcgcgtttggtgtttgtttgctatatttgatatcattagaaacgttaagatcaagttcgtttttgttacacagttggcgagcaatacggtcgatgtttttgtttcggtaccttgcaacccgctttacagacgcatctctgattcgtctgttatagctcggctgctatttgttgcatgcatacatggtcacaaggaaatcagaacatcctattcaacaataacatcgaccgtattgctcgccaactgagagaacagacagaaaccgacacaatggtcacaaggaaatcagaacctcctattcaacgataaccttgaccgtattgctcgctaactgagagaacagacagataccgacacaatg

SEQ ID NO: 10431 - DNA, 3000 bp, Unknown
  misc_feature (1)..( 3000): cDNA_ID_2704909_gDNA_ID_2213648_Annot_ID_132426 3000 nt of promoter + ATG
agaattaaggggaattcagcagaagagtggagaaaagttaccaaagtaaggaaatacaaattcgtgtgggttattattagtttctttgatggctgccatatagtacatcccagccttttcaaagtccccctaaaacaagaccatcatcagacatcagaaaggaaggttacacaaaggaaacaaaaaaagatgcattcttctataacagcccatagaatgaaaaaaacgcctcaaatatatcacaacccaaataaattatttattactcgtattttttcctccactggcaagctcagagggtagataagaatggaatatacaagggaggacaaaaatgtcaaaccttgctatgatatgaccgtgctaaattgtaaaaagaatgtgactttgttggcccatgagttgtgacggctaatgctgtttcagtcagctgctcaacaagaaagtgctggccggtgaaaaaaaagtgattggccaaataatttaaggctgatgcgcaatagggataaatctcgaatgcctgctgcattctgtccattcctttcctcattcctatagctatacatatgtaatatcatcagtgaaggccaaagagaagtaaagttaatagaatctttccagcccacacgcattatcataagatttagaactgaggtatacttacaatcatttgcttgcaaatccataatcccaagtgccacaagagcctcaacattatcaggatctagctgcagaaatagaattatggtaattagcactatttgttgacgcatacagtcagctatgtcataagaagatgagataaacatcccagtcccacttgcctgcaaaacgcgatcaaacgcttgccgtgctttatctagttgccccaacttataacgacaaaaccaattcccagtctcacagctgcaggacaaccgggaaatacttgcaaggccctctaaaagaattcaaaacatagacaaatcaaaatactaccaatttgttccataaatagactagatggttcacttgaacaatcaaagccatgagatttacagccaaaatgaagaagtggtatacagaaatatagtaggttataaggaaaagcttaccttgtatagttgtaatgactcagaaaatcgtccacgattaaattctacagaagcctgtatacgtgatagagcaagttattaatttgcagaaaagtaaacaatagactaatactgtgtcaggcctaggttggtaagaaagagagcgtcagaatcaaattcttactaccaccaataaattctagtatacagaatctacctacctacaaattattagctaagtgacagaaaatgaaatcacaagtcattatacctgacccagaagagcaggaacattatcaggggcagtgtctaacacaatcttaaatgcctgaagagcattatctatttcacccttagccagtaagagctgacctgtaagcagacaattacatttcaggattctgtatcttagtaaacatagagcatcatcacaaccttcaaattcttaaagcgtacattgtacagggagaaccggaaaagaaagattgttataggaattgcttgcaacagaaacttatcagtcgaaacgaatctggtagtacctttcccaacccaagtggaaggttcatgcatatcgattctcgatgctttgttataatatcgtgtggcagagataaattgctcctctttctctctgtttttggtctcagttttaccaaggtagctataatacgcacctagagcattcaaaatcgctattctctcgtacttaacatcggcatagtactcgtcaatgtcttgccaaaaagaaacaaaaaggacttatattttcgaaataaccaattctagaacaaattgaagcagcatcatcgtataactgcttaccagaacttgacccttcctccaatatttgtcgaaactgttcaatttttccttgtttgaagtactccctcttcaccatagatgaaaccaaaatcagaattggaaaaaaaaacaatctttaagcaaatcagccacaaaagcaactaacttttgaagtgttaatcaaaacccatcagccattaactaagaaaaactcaacaaaactcgattccagatagaacctaattagagtggaaaagaacgaaccgcgatgatgagccagagatcgagaggagcttgttcggctttaagaatatcaagtatatcagaagcgtcacgagggagctgatcaagaacaaccctaacttcttcttctgaattctgaaccggtatgtacacactcgccattgcccggctaagtgaggattaccagaaaccctagaagaaattgcagtggcgaatttttcgaatagagagtatgtgtgtgtgccaacgatgaagtgaatcgaacaatcgattacaaatctgtttcttttttatttgtgaccttggtttggtctgataagctcagataagaagttttagggtcaaatatgttaataataaaaagttaaggtaagagtccttttcttttttggatcggtgttactttctttttttcccacatatcgtgtcaaatatggtaaacctttaccaaatatgcaatgcgattttgaacttgaaacaacaaaaaatttaaattactaatctttagccaatttttatatcgatctttagtaaacggaaacggtcttaagtcaaatgatagaatatatggttggaatgccattatctcaaaaaaaaaaaatcaagaatgtcatttttctaatttttaattctttgttaaactaaaaataagaaaaaatcaaaacaattggtaaaaaactaaaacctagacgacccaaaaaagtattcgatccaattaagatatatgtccatcgatacaaaactcatcccaaacacttaagtgaaattcctgatttttaaaaaaacggctctcacaaaattcagattcttccaaaatcagattcctaatttttcggctttcacgatttttcgacgaattcttgattcgtgtaatagtttg

SEQ ID NO: 10432 - DNA, 3000 bp, Unknown
  misc_feature (1)..( 3000): cDNA_ID_2704957_gDNA_ID_2213649_Annot_ID_132435 3000 nt of promoter + ATG
caaatttttacctattaaaattttaaaataattaaacattttgggaactctctaaatcttaaaaaaagatcgtatttgattattaaggtattattaattaatgattgtggttatgatgatgccacacaccattcattatcgtattaatggaatgcatagggaatagctaaattgatgactgttgtcatgtgatgaaaatcccttacttcgtgggttgcgatatctcttccgtttatttctgaccgtccgatattctcattcaaacatgtgtagctctactcacgttcattgattatctcacaatcatctatatggtactatatatagatcgccctatgaatgatttttactcaaaatagtctttagaatttatttctgttaaaaatagccttcaaattttcaactaccagcttctattaaagcaccatatacttataagtgaattatattatgcatatgtatttctactgttagagtgtgcccatgttaacataaatctcattttgtatgttatatgaaattcaaacttcaatagcaaaagagtaagagacgttccaaattgtacgcaaagataaaaaaaaaacaaaagtaagttcaacattatcgaataataatatggatacccttcaaagtttggaatcttcaaagatatgctttgtctcagtttagtgctttgtatttgaaagcagattatagcatctgtatatattatttctgatcgcatagtttcctaggggtgtccagtgtccaatgtactggaaaaaggtatcgttgccaaaatttgatacagaattaggaatattttaaatcgaaaccgtaactaatttttggaacctagtttagaattagaagaggatttatattttcgtattgcaaagggtaaaaagaattaaactcatataagaattgaactttcctaatcgaagtcagtgcagcctttaaactcagaagttcaacgtgcgatatttgcaagcctgacacctcaaacttattcacactgagaatgcatggtcgaccatctgaggtcatgttttgtcattgttcggctaacgaaagcactatcaaacaaacaacaatttgtaaagagaaccagaactaaccaaaaatatcaaacgtaatgctgttaaaagacaaaacaaaaaaattcgattgcatttggtgtccaattaagatgaaacttgagagtaccttcccgatgaatttagctctatctatgcatcgtagtttatactgttaaaatgaaattgtggtagtttcatgtatttgttaaagtggaaataaccctattaaaaatgcccaacaatattacatgtcgtcatgcgcaaagactttaatctttttttttcaactgaattttctaaatttcccttaaaaaatattttagttttcccccccattttattatgatatttatgacacaagcaattacatcactacgaatagacacgagagacacgttcaatccgtaatattagtatattactttgtttaaattagacacactacctacaatatcaacaaaattaaactaatcaaatcatcacagaatttgtaaaattgtaactcaacgagataatgctataagaatccaccgtttgcggcaaaatcactaatttttttttttttttttaattgaaattgaaagcataacttcgttggaagaaattatgcgatggaatttaattattttttacaattcacacacattccaaatcctcaatttgaattttaaaacgacagaaaacaaaaattaataggcaacaattttgatttagtacaaaataattccgttggaggaatttcagttgatacttaagtaaaagatcatgcatgtgttagattttaatgcaattttattaaaaaagcaccttgaaaacttttaatagtatggacgacttaccatttacttacgattatgaacatagcaaacagttagacggattatgttgaatgttgatcgtctgatcaccatacaatgtagatttcttacacctaataacacgactgtactatgtagcaataaacgtctgaacagtaggtgacaatccatcaactcatttggacatccattatcaaaactaaatatatgtaaagcagactaaatattggactaactaattttactaaaatattcacctaaactaattacactgaaagctaggaaatacatcttaattatatatatatatacgtctatatttattttgtttataaaataactatgatatgttacaaacaatataatataaataagatatactaattcatcagaaattcaatgttattcttcatagtaatttattaaaataaattcataagaagttatctgatacaaatatgtaacacgcacatatatcacatcaattcaacattttatctttcctatatatagtattgaattttatttgatattttctatctaattgagatcgatttaaatatagaactaaattttttcagtatattttatcgaaatgatgtaaaataaatcatatttaccatttacgtctgaacagtaggtggcaatccatcaactcatttagacatcaatagtcaaaaacaaatatctgtaaaacagactaaatgttggactaactaattttactaaaaaaaattatatgatacaaataactaacaaacacatatatcaattcaacatttcatttttgctatagatagtaattaattttatttgggattttataactaattgaaatcgatatatatatagctagtaattctttttaagtattttctatcggaaaataatataaaatactatttaaatcatatttaacagttgttagtcttactagacaaaagaaaacagacaaaaaaaaaaattgtattataaataaaaaaaatattgtcactcgaagcctttaaactcgcctcttctctcttctctctcactccagagtttctctctcccctttaaatggtcgccggaaactaaatcgtctcgaacattcattagtaaaaccggacgactcagcggcg

SEQ ID NO: 10433 - DNA, 3000 bp, Unknown
  misc_feature (1)..( 3000): cDNA_ID_2704949_gDNA_ID_2213649_Annot_ID_132438 3000 nt of promoter + ATG
aatgatataactatcaatatttttcgtaagaaaacacaagtttccttattcttttcttacgtcggcgataaaagttaatgtcgtactttgatttatgaaattgtgatggaaaattgttttaattaattaagaagagaaacgagttatttgtacaaacaaatctgaaaatatagaaatagagcaaaggacagagaataagaagaagaggcaaaggagggcgagagttcacatgttcaagagaagacaaatacgtttctctgacacaaatctgtcagaccaatatttttaaatattttattgtatagtttttattttgttttgttgtatgagaaagaaacgtatattatgtctttattaccaccacaaggggtcaggctccgtccacttggggtcccaattttttctttgttacgagtttttttttgtagtaaaaggcaagtcacgccggcacgcgagccctcacgtgatcccacgtgctttatttattctctccataccaaaatttcttttcctttgttgtttggtaaggttttttcttttttggccaaaatatgatattggcgagattgaaaacatgtatatttttaaaaaaaatgtaggcgtaaaaattatgttactaacacttcattaagcatatgccaagatttttaaattaaaatttatatatcactattggtcgtttttttttttgtgtgtgacagcagctcactattggttgtttatattaaccacatactaaataaggctagctactaccaaacttggaccagaacctaacacatgatgttatttttagtaatatgaaaaaaaagaaacgaaaaggaaaaaggaaagaatagatctttctggtgagagagcatacacaacacattggtgacacaaggtatctaagggcatgaccgcacgtgtcaacatgcatcaaacatgcgatctttcaatattagtattatatatttagcaaagacgcaaaagaatccaaggcaaagactacttcgcctgcatgtcatgccaatctctctctatatgttttctaatcaatatactagattactagacaagttgttttctaataagatctctcacatatgagccaatttgagccaaaacatgatatgatggataaagcttatttgggtattgaaagtatagagactgtcaatgagaaagtagtcatttgggcccaagtacagagatttaaaccttatcaggaaaagcccaatccagtacaaacttgaagaaaaagattgatctccttgtaagttgcaactggtaaagaataggacctttgttcaaggtctactgtattgagatactgaattagtataaacggccacttaaaactactttgtatttgtttaggcccaaaacattggactatcatgttgagaaaataaacacgaacgcaacagaagtttcctacttattatatagcccaacaaatattgatctctttgcttccaatgaatctttgttaaggcccaaaaaatacaaagccgaaactacttccatcttgtactatttttaagtttattttttggaaattttaccatgtatgattcagatcgttggtttaaatttttacaactagaaaatagtatatactctattagcctattatgatattaattaatgggcaatatttcgattagtttacgtgtagagtgtagtgataatgtatttaggttttgaccggcaataatgcatttgtaagaaaagtctttggacaataatagctttggtcaagtcaatgtagaacagaagactaatttctcttgacaaaatattaaaccttaaaaacaaatcctgtcagaccaaaaggtgatacgattgtaacttacaaatgatactatatatttttatagttaacagtctagtatttaaaattttgaaatattgatgatcattgattggttcatataagtaatccattaggttttcatgttggtcaatacagatgtacatgttttcaggattaatataggttccgtcctatgaatttatccgaccatgcataagagtaactctttaatctactattacaagttttcaggatttgaaagctctatacaagtttaactttatgtgtatattagttaacgtttgtaaccacagattcataatatttaccgtcgaactcttagccataaaattcggactaaaagactcgattcaaaaaggtatcgatgagatggaaagttgttgaacttattgtataaaagcttagagaggatattgataagtcgtcttttgcttttgtatctacagctatgacgtatattgtttaatccaaatcaaagtgttttaaagatattttggtttctggtggaggtggtatactaaagattcacatatagatagagatatttatgaatacattgatatgaaaatcatatacaatatgctaaagaacaataaatggtacacatatggattggttggatatggttggcacttggcagttaggtcattttcgttgctttactaaactttaataaacagtctgtaacatttacatttatatacgccaatgccaaaaaattctttattttatgcaatggcacattttctgcttttcctttacaggcaaaaactctttctttcctaaagatgcattatttttccatttgataaaataaaaaaaacttgacggtacaaaaatacacagaagacaatcgaattaagtaatgactaagtattaagattaggtgaaatggtgtaattaaaccgatgggaataatataattattatttaaatacagaaacagagcttgctttaccaaataccaccgaaacccactaagaatacagcaaatcgtctcttcgccattaaaacaccttcctttgcaaacaaagcttcaaactttctcttaaaacacccccaaatcagcaaagatagggttaatcgaagaacctcaccgtaagtccactgaggattcaagttcttgctttggtttaaggaagaagaacagcaaaaacctcaaggagaagaagaagtcaaag

SEQ ID NO: 10434 - DNA, 3000 bp, Unknown
  misc_feature (1)..( 3000): cDNA_ID_1808560_gDNA_ID_2213649_Annot_ID_132439 3000 nt of promoter + ATG
acgttccacgcgttcagcaaaatctttttgtctgctgcatgctcagatggaaaaaaagatcagctaattaacaaaatatctaatcagaataatcagaatagtctaaactaatgcagctttacttcatcttaaatcttattcattttcatatatgtaaagttggttacgttaatattaaatctttaagagagcggggaatccgagaacaaacagtgtctctccttcgctaaattatttatttatacagtatagtattaccaaattgcaattaattctttttttatatataagtggtgacaattagtggacttcgctttttatgagaaaaaaatatcattcatattgagacaacaacaactagaaaaaatattctacttactgtattatttaaaacacagatatgtcaataattgaaaaatatgtatgagtggatcaacagtaaaacaaattatatgtaacatatcattctacaacctctccttaaatcaattttttaaattcaagccaaaagctaaacattaaataaacagtagtgccacatgaaattataggtcggaccatagtgaaaatatccactatatatactttttttttttcaactatccactatatatactataaaaacaaaacataaagtccacagatgctgagaatttaattaaaaggagtacacagctgtaaagcctacaacttttctttctcatttatggtgcgaaccttttattgtcctgcccaatgcaatttttttaatatgagtaattaaatatatttttcgtttttataaattcaattttcaaggagaaaataattcgatgtatatgcatattttgtgtgtatatattagcaaattttcacgtgtggacaatctacgtcaatggagtatataaacgtgtgttacgtaggacaaatcagtcgttggattagtagttgccaacagttgccttgattaataaattggtatcatactctcttctttgtgtttgttagggtcaagataatatataaatttgtgatactaatcatagacattttacgacaaaaatacggacctgttcattactcgaaaactatatgaagccgaaatagataatgtcctatttttcctcatcattatcatgaaatctatttaaaaaaatcaatagtggtgtaaaacaattgattcgtcatgatttataggtatgattgctattcttgatttcaacatcgtcagatactaaaaatttcccaatgagtaagttaagattcggaccactgttatttgggatttcttaaaataaataatcaacaacagatttcgtgctatgcccggtaatgttaaatgtagaacatggggtgttttgttttacttaattgtcaatcataaatcaaatattcggattaggaattacgtcaagtgccaattagattgttatcactaaaatcatatcatattgctttctaaaccaattaacgtcagtccatttatttaaagaaaaaataaagtatttcactaaactgtccagtccatttcaccaagtacttagatattcataaacacaaaattaatcactcaacttttaaaaatatttcttctagaccaaatcctgtaccaactcgtattgaatgtttcagtgtaaagtgtaaagtgttttcttaaaaaaattagttaaaaaataactgaattatcacaaaatattttcagaacctagtcacaaatctaataaattacatataaaagcttcttcatagttaaaaaaaaccagtgatttcagtaccaaacaataagaaaagctagcatatgatatatttcttttgctaagaagcatatgatatattcaatattcgtccacgatccactgaatattttttctttattccactgagatttcttttcgtcgctactttgaatctgaacattatttttggtctctgaatctatatgtttgcttgtctttcaacatcatgactcgcatatcgatactacaacttcaactcttcaagcaagacacatggaaatataggagttaacacatgcaaactagcacccccaaattttgtcctcctggctcctacaatagctggaccgaacctacatgaagccggctttatctggttctcttctccagttatgatgtcaaatttaaatcattcatccctcaacaagaattgtcattttaggaaccatcatcataccgagagagagcaacattttatctataaatatagtaatagttctactcttatttcttccgtggtttcttgtaaaaaaaacttatgcatgttcgttcactaaatagtagttaaatttgcgataaacgagcgagatatgtcatgcataaaggagttaaaaattacgtgaagttatttcaatgatcatgcaagaaggattgaatgacttgtaattacgatcaagtaatataaaaatggtctatttgttgttccttcgttaccacagtatggttcttacatgtgaaaatgattgtgctttacataaatgtagtagtacatgagcccataaaaagttactgctcagtcgagttttcactaaccggtgaaaagaaatggataaataaaaatatacacgactacaaatagactctttaaatttgacacgtaaactctatttttcaggagtctttgaggcccactctgataataatatgtcaactaaactttctttttacaaacaaaattaccgttgcataagacacatgtcgtcaattataatccaatatgaagaaagaaagaatataaaacgaaaactttacttttcttatttttttcctatttttcaagatgctaggaagtagccaaatccaaagcattgactcttctttatccaatgtctcaccctttgtcttcaactgttcctcatccttcaccaaaatctctctctctctctcttcttataagaaaagagctaaaaagcttcccttcgttttactatatccatgattctgaattccacacacactgagagagatagagggacacattaaaagctaattcaacttttctgca

SEQ ID NO: 10435 - DNA, 3000 bp, Unknown
  misc_feature (1)..( 3000): cDNA_ID_1383349_gDNA_ID_2213649_Annot_ID_132443 3000 nt of promoter + ATG
cgaaagagccatctttttttctttttttggacaattgaaagagctatctaatgtccgttccttgggttttttataaagacagttctttaacgaccttatgagaattttccacttgcagttgatgtttgagactttgagttcgaaactcataaaccttgacatgttatcgaaaactaaattgttgatacataagtaaagtggtctaactgtctaagtaatatttttggccgatcgataaatatgattcaattataaaatgaattttaaaaacacatcatttctagatagtttcacattaaacaaaattgactatcaagcattgtatcagcaaaagaaagatatcaaggggaagagaagagtttaaaattcataaatgttgataatgcaaggaacatggtacaaaatatctaaatttcatttctgcaaatctcttgtcgttagctcatcttttccacatctaacttacatttaatgatggattcgtatttaaattttacattttcaacaagagtaacaataaaaaaaaacaccaatccatataatagaccagacgaaactcaaaaagtcagaagagaagagagacatcttcacatggccgaatgaaacacatatccaaacgccaaggacaaagaagaattcatcactttcttccatttcttctctgcaacttccgtaccaaaaaatacataaagccctaactaatattatttctccaccaagtttctttatcttttagtttcccggtaaaaaatctctctgtcatgtcttatgttcttccacgtcgttcctaatctcccaagacagaatctctaaacttcattttgctccttttccacacaaaactttctctccctccaaagaccacaaaaaatgttcttccttccttcaacttcaagtatctctctttattcacacgtatagcatccaaaaccaaaaatctataaccttttcctctgtaaagtttcttcctttctaaccttcccgagaaaaaaacaaaccctttctgttagaaaaccatgagaggtctcgcggcttgttacagtgaacacgccattaaagtatcagatacatattgttcaggtccatcgaatcattcctatatatctccgacattacctccttcaatccccgacacagtaaccaccacttatagatccaatctcccatcttccgacaaacccgtctctgtttcactcacctggtcggataatctcaccgtcgtcatctcaacgccgccgaaatcatactctgtttcactcagaaaacctaaaggatcaagaaagttgacttcttcctccggttcactcaacgccgagatcctctgggatctatcggaagcagagtacgaaaacaacggacctgaaccaataagaagattcttcgtcgtcgtcgttgtaaattccgagattaccctcggagtcggcgacgttgaccacgagcgagacacgtcatcatcgtcgtcgtggcgagtctcaaaaacggagagattctctggaacttgttggctcacgacgaaagctcaattctccgacgtcggaaggaaacacgagatacagattcaatgcggcggaggaggaggaggaggaggagaggaagggtatttatggaaagtgaaaagtcctgaaacgatgtcggtttatgttgataagaggaaagtgttttcggtgaagaagcttaagtggaactttagagggaatcaaaccatgtttttcgatggaatgcttatagacatgatgtgggatttacacgactggttctacaaagaaacgttgtcgtctgtttcgactagttcatcgtctaaaacggcgtcgtcgtcatcgtcttcttcaacttcatcgtctactcctccgtgtgctgtgtttatgtttaggaggaggagtggtttggatagtagattatggattgatgaagatgaacaagagagtgagatgaagaagaatattggttctagagatgagaaacattcgttttcacttatcatttgtgcctctaaaaagtgaccaaataaacaaataaacattttaacataactcttcgttgtctgaaattttaattttaagaatattttgtgttgcatttaggtatatctgataggttgattagatcaaatgtttttgtgttttttctctgccaaatgttcgtgagaatgcaagagatattcaaattgtgttcatcaaaactaaaatttatattcaaaaccgtggatggcaaactatgcataagataaaatgtacataatttttgttatcttctaaaataaatgtacctaatttaatagcctaataatatcttctaaagttattaacttttgtttatgacaatgatgatgataggagcattttcgatatttccaaaaaaagaaatggaaaggacattgcaacaaaattgaaaattcaaacaaacaaacaaaataaaaagtgcagctaggggataaaattcaaaaggcaggatagaaaataaacaagaaagaattcatgaataaataaaaacactagaagttgaaattctgaaaaatacttgaaaagaattgatacaatgaatttgatgattcattgtccgaattagactactcacagtctcacataaatatcaattctaaatttttggttccaagatctcaaagtcttcacttctcattttgtaaacacaatttttttcaagggaaacaaaaattgaatcattttacctgaggaatattattgggctacaatgggccgtagtgaggccgaagtcacaccttaaatagaacgtggtagaagttactataatattagagttacaaaccagtaatcacggaagtagtaaaaacggcccatagaaagtataaacaatccaacggctgaaaaagcttaccttggagaagagtccaaaatatcttctggaagctaccatcactctctcctatataactcaaaattcaccatcatcttcatcatcatcatcatcatcatcctttctttatccaactttcttcaccaaatcgattcttcttcaaccatg

SEQ ID NO: 10436 - DNA, 3000 bp, Unknown
  misc_feature (1)..( 3000): cDNA_ID_2715704_gDNA_ID_2213649_Annot_ID_132445 3000 nt of promoter + ATG
ctggaaatgtaagcacttttcaaaatggtcctacttggaaattgtaatttgttacttaatacatctgaggtttggtttgtctaggtatcctatgcttgaatctattcaaaagtatctttggccccgtctctgcaaactcgaccaaaaaacattgtaagaatgatgtttatcactaactttttttttttcatgcctcagtctaatacacttattcattagtttaataccctattatctcacaggtatgagttgcactaccagatgattacttttggaaaggtatgtattaaagaaatacatatatacgtatgtcaaaatcagctcacatgatgaggtttgtaatctgcttgattattgtatcaggtcttttgcacaaagagcaaacctaattgcaatgcatgtccgatgaaaggagaatgcagacattttgccagtgcgtttgcaaggtgctacaacatgttctcttaaacctttagtaccactatgactctatgaggaaagtccttgttaaaatataacccagttaaatgagaattggtctgtatctaaacgaagctctgaatcatcattacagaaaatttagtaacattcatttgttttacagtgcaaggcttgctttaccaagtacagagaaaggtatggggacacctgataaaaaccctttgcctctacacctgccagagccattccagagagagcaagggtctgaagtagtacagcactcagaaccagcaaaaaaggtcacatgttgtgaaccaatcatcgaagagcctgcttcaccggagccagaaaccgcagaagtatcaatagctgacatagaggaggcgttttttgaggatccagaagaaattcctaccatcaggctaaacatggatgcatttaccagtaacttgaagaagataatggaacacaacaaggaacttcaagacggaaacatgtccagcgctttagttgcacttactgctgaaactgcttctcttccaatgcctaagctcaagaatatcagccagttaaggacagaacaccgagtgtaagaatccatttttctctgtttttcttcgttcttaggttaaaaatgaaatcagaaacacatttttcaaaattattaaagcttgaacagagtagaatatttaagtgattgaccaagcatgaactcgtaagttggaaagcagacaaacttcccaataattacaggctatgccataacttgtttcttttcccgtatcttgcagttacgaacttccagacgagcatcctcttctagctcaggtatgtgagctaactggataaggacacatgccgtatagagtgctgtctatattgtaaaatctgactagctgtttgtgatttcttgtggcagttggaaaagagagaacctgatgatccatgttcttatttgcttgctatatggacgccaggtaatttaatgatttgcatatcttttaatcatgaaatcaaatcggtatctttaatcgatgtgttattcaacaggtgagacggctgattctattcaaccgtctgttagtacgtgcatattccaagcaaatggtatgctttgtgacgaggagacttgtttctcctgcaacagcatcaaggagactagatctcaaattgtgagagggacaattttggtaagtagttgcatcaatctccttatgcggcttactacacttatgttttctacagattaatatgttgtaaattgtacagattccttgtagaacagcgatgaggggtagttttcctctaaatggaacgtactttcaagtaaatgaggtaagacttgaactccaataactccaactctttcattttaattatttgcattgaaacttgtgatgtattctattgatacaggtgtttgcggatcatgcatccagcctaaacccaatcaatgtcccaagggaattgatatgggaattacctcgaagaacggtctattttggtacctctgttcctacgatattcaaaggtataagattttctttattggattgtgatgcgattgtttatataaaagaaagttgttctaaccacttgagctctatttttctcaggtttatcaactgagaagatacaggcttgcttttggaaaggtacattttgtattaagcagtttcttcttgttctgaaacataacttatcttttgatattatgtagggtacgtatgtgtacgtggatttgatcgaaagacgaggggaccgaagcctttgattgcaagattgcacttcccggcgagcaaactgaagggacaacaagctaacctcgcctaatccgttggcaagcaaacaaatacaagcttatggttaagagtgagagagcacactgttccaatctagttaatgtaagaaagtgaaaacgtaaagttaacagtcctagagttgtacaaggtttctaaatcccattttagtttcgtcttaaatttgtatcaaacacttgtcacaaaaaacagacccgtagctgtgtaaactctctgttcccttcgtttggtttatatctgaatttacggttagcttttggttacctgaatcaagatctggttcgatatgtggaggatctcacttaacttggtttaaatcagatagttcaaccggaccaaagaattctattgttgtcaaatattagatgatgggcctattatacatggaatgtgggtcattaaatgggcctaaatatttttggaaccagctccgatcttcaacttttttttgtctcgtctccataaaatccccaattcacaaccctaattgatcggagattgtccaaactctctgacatttttgccgaattcgaagcattccttctatcttctccgtcttcttcgcagaatcgcgttatgcatctcaatttttagattgtaacttagggttactgattgttgtaatgctctgaattcccctctaacgaggatttgttgtcactgcaatcgatttttgccgattaggtttaatttagggcattatttgcgtacctcttgtattgtatagttctttggaatg

SEQ ID NO: 10437 - DNA, 3000 bp, Unknown
  misc_feature (1)..( 3000): cDNA_ID_3036486_gDNA_ID_2213649_Annot_ID_181571 3000 nt of promoter + ATG
cggtttgtactatcacaaacgacccggaatcttctaacactgatcagattgttccgtcgaatcctacttcgattccgcattctccggttagcgttagagaaccggaaattcacagtcatagagggattaaaccgggaataatcgctgcggttatcggtggttgcgtggcggttattgttttagtatcttttggttttgctttctgttgtggaagattagaccgtaacggcgaaagatcaaaatccggaagtgtagagactggtttcgtcggaggaggagaagggaagagacgaagcagttacggagaaggaggagagagtgatgcgacgtcggcgacagataggagcagacttgtgtttttcgagaggaggaaacagtttgagcttgatgatttgttgaaagcatctgcggagatgcttgggaaagggagtttagggacggtgtacaaggcggtgttagacgacggctcaacgactgtggcggtgaagcggcttaaagacgcgaatccatgtccgaggaaagagtttgagcagtatatggagattattggtaggcttaaacaccaaaacgttgttaagctaagagcttattactatgctaaagaagagaagctcttggtttatgagtatcttcctaatggaagcttgcactctcttcttcatggtaaaactctcttctctaagctttgattatcaaactgaaaatgctctgttttgcttagtgacaaaagtgttgatttttactacattatcggccaaagttatgatttttttattggtggttttagggaatcgaggaccaggacggattccattggattggacgacgaggattagtctaatgttaggagcagcgagaggattagcgaagattcacgacgagtatagcatctcaaagataccacacggcaatatcaaatcctctaatgttctattggacagaaacggcgtcgcgctaatagctgatttcggtttatcacttttgctaaacccggttcacgctatcgctcggttaggaggataccgtgcgccggaacagtcggagatcaaacgtctctctcagaaagctgacgtgtacagttttggtgtgttgcttctcgaggttttaacaggaaaagcaccctcgatattcccgtctccgtctagacctagatcagcggcgtcggtggctgtggaggaagaggaagaagcggtggttgatttaccgaagtgggttagatcggtggtgaaggaggaatggacggcagaggtttttgatccggagcttttgaggtataagaacatagaggaggagatggtggcaatgcttcatatcggtttagcttgcgttgtgcctcagccggagaagaggccgacgatggcggaagttgttaagatggttgaggagattagagttgagcaatctccggtcggtgaggattttgatgagtcacgaaactcaatgtctccgtcgttggctaccaccgacggctaagtttggtttctgtctgtcgatgttgtagaatacgtatcgtttggaccttgtcgatttttaaggttcttgcttagaatccctgatttgcgaacttgtcggagtttttttagccatgttttgtgttttcactgtttgtgatcgtaacggggttgtgtggttttgtggatttatgaagccgtttcaataataaaaccccatttgttactctttaaagcccattaggcccatatgttttagatgaattattttgcaattgctgctatttaattatagaacctaaaactcgaacgcccattgattagtgcttctagaacggtggatgcttctgtgtccactggtaattgtctttttggttgaagagtcagcccttcggatttgacctttcgtgtaccttttaagcccattgattatgattggcagattaagtaaattaacgaatggtcaagcacatgattagccaaatcatgacaaataaatggattcctttttcatttctggaagcggaatcttgtctaacaatttttttaattgatagtaatattttatgttatgggtttctgatagttgaagacttgaaatgttgaacttaaaagtgaaattacgctttcataatttcattaagccatgatggcaagttttttttttgggttgaggtcaacaagagcaagtttaatggtatcgaatagtgcgtaactgaaataaaacttgttgaaaaatcattcattcactattcctcggcgcgtgaggccaatttgaccccttcccccacgaaattaaacttggggagtactaaaagtctaaaccagcaacgtcgcttttcatgtgccttaatcacacccttttctgccacgtgtacgatctgggaccgtcgttgtgctcattgacatttgtagatccctttctagatgttcattaaaattacttaatttatatccagtccttctacttttagttttttgatactttaatccctgttgttttaatgatacttcattcagtatccatccaaaatcaaattaaatccatagattaagatgtacatttttgaaaataataaatggtttattataatatgttactaaatttatggtatttttcgctcttgtattgacttttacatggatacattaattttaatcttctttgatttctgttaattttctttgaattcattttatacatttattagtgaactattctaaaaattaacaaaatcatttaaaccgacaaaaaaaactttaaaagatcagcgtattataaaccaacgggggatagtttgcattaggtattggacatctggggggtaaatagagcgaaacaaaagttgaggcttgtttttcaacattttcattttattgtgtgctatttaaactgcgtcgtatttggaggcatattcgccggtcaagcgtatcaaatacccaatcacgcgaacttttctccgcctcttctccactccaaaattcttctccgtctttctcccgtcaccgtcgaataaagcctgagatctccgaattctgatcagcaact

SEQ ID NO: 10438 - DNA, 3000 bp, Unknown
  misc_feature (1)..( 3000): cDNA_ID_2704913_gDNA_ID_2213649_Annot_ID_181570 3000 nt of promoter + ATG
ttgtttggaaaacttttcttttctttttaccgtttcctaattaatatgtggctgtcccaattaatagaaaatatataaattaaattttgaagtttcactgtgtatgtatatgttgtctgtacatacagagataatataagaaggtaaacaaaatcgatattttgtctatctatgtaaaatttagtttttcttttctgtagatgttatctatagatatggataataagaaagaaaactttttttatatataattaatttcatattaaaaagaacttagtttagattttcgcttaaaactttatgattctagttattaaccattgttaacggtttaaataccgttattttgtaatgctagctagtgaccgttgtaaatggtttttataacgtttaaaacttataattctattttagatgtgttggaaagactagtaatttcaacattttcatatttttttagtgatttgtaacagacttctaaaatgaacaaacttacttatatacaaatgaatattatattatataataatataaacaattagaccttatattaatataatttatattcaatggatattaagtttcaaatatcaaataatttagattaaaatgcaaaaaagaacaaaaaagtcatgatttgaatttggccgaattaaatcatttcaatgtagctgtcttttaaaaatgttatttttttgtttttaatggaaacagtaattaagtgttacatagaaagtattttattttgactaacatacaatgctaagacagatttgttttagtatacgataattatatattttaaaagtaaaagttgggaatttgaattggcttggccagttataccactaaaaaacaaatttcttaaatggaaaacgccagcgggaagcaaagaacacgagtcaaacctttatagttttttccacttctagatattatataattaaagtacaaatggaaagaaatatagattttgaccaatttaaaataagttcacggaatttgtttttgatgttcagaaagaaagaaaattatgtatatttggaaaacatcaacggaaaaaaaagtagtatttgctaaaacaaaatctacaacaattgcaaatcatcaagtccggtaatttttttttatttttgtatttttcttcagtcaaaccgatgatgtgttgtaacgtaaatggcatctttttccaaactcagattctttttttttgtgttgataacattataatttcgaccactttaagcccaaggcctaaggcccaactgtatagcataacgtttaccgtcaatgcttgggccaacataataaaaccaagcgcgcacacacacatcaagccgacacattcggaaagactaaaagagcgacccaaagggaactgtgttttttttttttttttttctttctttcaaagagaagcaacgaacattatcaattcaatatgttgttatctccctgtttaaagtttcaggttgattcaagttcttcgtagcagagaattagatcaaacgtaatctacgtgaaatgcaaatgcatggccacatcgtagcagaatacaacatcactacatgagtcgttccttctccaatgtttaacaaaatattcaacaagtatacaaagctgacactctagtcaaaaatttgtaatggttatagtcgtagttgttacttgtatgtatattacttagtaaatcaaacattcttaagatagttgttttaagtagaatacaaaaacaacctaaaactgtaaattttttgtttaaactttggtagtatgaaggtgtaaaaactttagtaaattttattcaaaagataaaaaaactttggtaaattttctgattagcatttgaatggaaaaaggggatgggaatcacaacgccaattgcgcatttctttcctccttttataatttacattttaaattggttaaaggggtctcgaaaatgtcgggttggtaaaaaataagagtgagattagctacaagaaagctgactttgtttttcaagcaaatcatcaactgtcgcgtcgtaccaatcatggatccaccatgttatttgttatttttttgtcggcacactagtgttaatttgaattatttgatatattaatagcagaaataaaatacttcttacttgaagagcttaaacatattttcattacccgagaatgttggtttatcaaatgtgtatattagtggaaatgacaaatacgagtccaatagttaacgtaataactacccttcttttggggttcaaaagaactaattatgttgtttggagatttcgggaatacgagatcgaaaaatctatcttatttggatttgctttgattcattcttagtgtaaaaaccaaaaggaaagctaacctgttataaattttgatttactcaatatctaaacagaaaagcaatttgcacaagtaactttaactaatcttgtaacaaaaagacacaagttaaagcaatgatatactgtggatacctttttcaaacattgggtaaactttttgggcgtagggttatgttcacccacactatggagtggaaaacagcaatcattcacacaaccaccaccattcctactttttgtgcgtagggttatgttcagaaatatgatttaccattatctccttttttacatctatcaaagtatattattaactgattaatggaaatttcagttgatattactcgataaccttatgtcattactcagttcaatccttatgttatatatgcaattttaacatagaacgtacattattcttcatgagttctgttcctaatcagtgctatgtacgtaacttttgtttttactttgttcagtttttgttttgtctctttttttcttgactatgacactgcattcaaaaacataagaaaacagattaaagaaaagagaaaaaagataaaattgaaagattcgtttttctcaaatttcaataaaaagaaagatacatttctctcttcacacttcactcttctctttcccgcctctccgcc

SEQ ID NO: 10439 - DNA, 3000 bp, Unknown
  misc_feature (1)..( 3000): cDNA_ID_2704917_gDNA_ID_2213649_Annot_ID_181566 3000 nt of promoter + ATG
gtggcatcctggccgtacttcttcttaatcacagactggaaaaacatatgagaacaagatggttaagccataaacatgtaatacatgttagttcacaggaaccatctgcgaaaaagtaatacatgtatatggaatattcattgaagagcatctcaaagaccaaaaaatattggagatttaccttcaagtggtggtaaacttccacacccatcttcatggcttccttgaaagaagcagctccaacagggaggatcataaactcctgcatagcaagcttgtttccggcatgggatccaccattgatgacgttgaaggcaggaactggtagcacaatcttggggttaccagcaaggttggcaatgtgctgcacccaaataccacacaaagggaaaagcttagaacatttatcaccgaaaaaaccaagtagccaaagcagtaacaatcttatcttccatggacagagggaaccaacttaatagtgccagatcgttctaccttgtatagaggaatgccgctgacaacagccccagctttgcagacagcaagagacacagcaagaatcgcattggctccaagctaaacacagatagaaggcgcaagatggtcagacttgccttctattcttaagtgaatacacaaaaaatgaattttcccttttaagtaccttttgcttgcaccacccccactcgttttgggttccgtcaagttcatggaccatgaagttgtcaatagcagtctgctgagttgggtcctgcaagaaataataaaagcaacaaaaataaaatgagtgagcctagcgcatagaattagacacaaatttgatgttctgagagtagcttaaagtgagtcactcacctttccaataagtgctggcccgatgatgttgttcacattgccaacagcctagtgatataaacaaataacgaatcagtcaacatgatcaattgaaataactctactaacactaaaaaaacacacagaacagatcgcagtctctcaccttagatacaccctttccaaggtagtcagatcctccatccctcagctcaagagcctcatagataccagtggaagctccacttggaacagctgctgtaaccttaataccatttgacgtgtggatatcaacctaaaccaacatcatcagagaaatcattagctttcttttcaaattcgtcattagcaaacaatcgaaatcgtaaaaaccagatggaaataaatagatccgtcgcaaaaatcatataaacaaaatcaactccatcatcgacaactcacgatccaaatcgccgagatcaaatcaccgatcatcgttcacaaaaaccaaatctcattcacgtacgactactagatcaattcaggtttacaaaaaaacgattgaatagtggttttagcatcggatagtcatcaaacaaacagatccgtcacgaatactgtacaaagccggaaagtgactgggaaatacaaaagtgatcggagaaactaacctcaacggtgggattaccacgactgtcgaagatctgtctagccttaacaacggtgatagtagccatagcgagtagatctagagaaagagataaaggcgatgtgttcgagggttttagtgagaatcgcttcaacagtagtagctgaggaaatgggttggtggtctggttcgatatataaagacgtcacggatttagccaaaaccgttggattgttttaataacagccgttggatgagaacagtcagctctgatgcaagaagccaaaacgatgcgctgcacgccttttgcagaatagaagagttttttccatattgttttgctccttgtccaagtaataccgactatttttattaaagactttagaacaagtaagaataatatatggcatctagattttattccattttccgactatacgtttcactgtttccatttttattttgtcaataacatcttttataccatgtttgaaatttggatggttgtacagaactctctagaaacaattcactagttgaaaattttcttttttgttaaaggggtttcgctaaactataacttaatggatatgtttgtgggtcaaaaactttgggccttacttatgtgacaaattctccactagggtttcaatgtccatcaaccatttttatacgatattaatggaccatatttttcagtaatcattgtttgattatgcttattctatatgtatcaacatttaaaatgcaaatcactagttctataattcttatcaaaatgtggtgtttgcgtcggatttttggatgctctttggactttggagtttcaaactcaagattatgaggtgatctaatatttattttaatctaagttactaatttttgaaaataatttaaatgttgctaaactattatgatttttatgttcttataaacttttttttttgttaaaaggttcatataaacttagatatttctgttaataattttaatttcgattaattcaaatataagtttttcatgttttatatgaaaaaaatagtaaacaaatgcgttttacttatgtaaaaattgtcagaagaaaatagagcacaatcttccatgtttcatcaggcttcctccgagcctttagtgctatttcttttgatagaattcgtgagagattccccaaatcataacaagaaaacaaaatggtaaacgggaaatataactcgacaaatcagcgtcgattaattgatgtatcgacttttgtccatgtataacaactgctgacaggtggaattttctgattggtcgctgtaagtcgattcacactaccaagttggatacaggaaaaaaaaaaaaaaaaaaaaaaaagagagaaattaaggataagtacaaaaaagatttgtgagtatccaaagagccgcttgaagaaaaacgccaaataaatggttttgatctcgtgaagccaaatcgccattagtcaccaccttaaatgactcacctagtatatatatatatgcaccatatgagtttgatcaatctcattcaataca

SEQ ID NO: 10440 - DNA, 3000 bp, Unknown
  misc_feature (1)..( 3000): cDNA_ID_2704924_gDNA_ID_2213649_Annot_ID_181565 3000 nt of promoter + ATG
gaacatcctaaactcccacacaaacaccacattttgatacaaaaattagaactagtgatctgaattttcaaattttgacacatagaataagcataatcaaataattgttaatgaaaaatgggtccaaaagagaatatataatcaaccatgacacagtataaaaatggttgatcgacattgaacacgtacagaagaattaacaaatgctgaagcacaagtgattcatctttcttattagaattgaaataggtagactttttaatgtgttcattactaagcaaaagaagataatgattgagatacgaagcttaaacaaactaataatcataaaagattaagagacaatctttgaaacgttgctgtagaaagaccaatcaggatgagaagaatcgatcatgggccgtccaaaagaatgcacttttatgtaagcctgaacatccgatgattttgccaaaccttccaagtaagaacacaactctccttccggatctaacaaaataaaagaccaatcacaaataaaccaaaacgcatgtctaaagataagaagtgaacagcagaagtttaaattttgcataccaagtaaattatcctttatgttagaagcatcatagctcattgggaacagaccagtattgtcctgaatgcaaatcaagatagattagaattaggattaagaactacaaagttatcgataaacaacactataatagagattcgagtgttttacaggattacgaagagctttatatggttcatcatcaatgaagatggtgtttgaagcagagaagcctttaaagcacttgaacactttagagagatccttaaagaacaaaggcttgtaacggttctctagtgttttatatccactgtccgtacactctcttggtcctacaataaaagagtattcgaaattatatatacataaatagacacacatctctatacaatgagagtcttacccaaacaaagagaagcttgtcttggagattttcaagcacaatgcttaaaacaatgtcaacatttttcctatcaatcaaacacatgaagagtcagataaaaagtactatttaagcttaagaaatcaacaatattaacctgtaactataagaatgtttagtgaagagactaactcgcaagcagaggaccaaataccaacttcaaatctctcaagacaaaacttcataaactcttcagcaaacggtctcttatacactaaacaacaaaacaaacacaaataaactataaatacaaaaaaggtagcaaagttaataaaagaataatgaaacgttaccaagatttggcccacaagaagcatcaggagagcggttcttgggtttcttacgcaactcttttttgtggactctgtgaagaagaagaccacttagactcaagaccaagagtttctttttctccgtcttaggttctagactaagtttatcaagaatcgaactcagttctgtctgatctgaaactgtatcacctcttgagtactcatcgtcgctgtcgtccgcagcaagcaagctcttcttgatcttttcttcagccattgtattgaatgagattgatcaaactcatatggtgcatatatatatatactaggtgagtcatttaaggtggtgactaatggcgatttggcttcacgagatcaaaaccatttatttggcgtttttcttcaagcggctctttggatactcacaaatcttttttgtacttatccttaatttctctcttttttttttttttttttttttttcctgtatccaacttggtagtgtgaatcgacttacagcgaccaatcagaaaattccacctgtcagcagttgttatacatggacaaaagtcgatacatcaattaatcgacgctgatttgtcgagttatatttcccgtttaccattttgttttcttgttatgatttggggaatctctcacgaattctatcaaaagaaatagcactaaaggctcggaggaagcctgatgaaacatggaagattgtgctctattttcttctgacaatttttacataagtaaaacgcatttgtttactatttttttcatataaaacatgaaaaacttatatttgaattaatcgaaattaaaattattaacagaaatatctaagtttatatgaaccttttaacaaaaaaaaaagtttataagaacataaaaatcataatagtttagcaacatttaaattattttcaaaaattagtaacttagattaaaataaatattagatcacctcataatcttgagtttgaaactccaaagtccaaagagcatccaaaaatccgacgcaaacaccacattttgataagaattatagaactagtgatttgcattttaaatgttgatacatatagaataagcataatcaaacaatgattactgaaaaatatggtccattaatatcgtataaaaatggttgatggacattgaaaccctagtggagaatttgtcacataagtaaggcccaaagtttttgacccacaaacatatccattaagttatagtttagcgaaacccctttaacaaaaaagaaaattttcaactagtgaattgtttctagagagttctgtacaaccatccaaatttcaaacatggtataaaagatgttattgacaaaataaaaatggaaacagtgaaacgtatagtcggaaaatggaataaaatctagatgccatatattattcttacttgttctaaagtctttaataaaaatagtcggtattacttggacaaggagcaaaacaatatggaaaaaactcttctattctgcaaaaggcgtgcagcgcatcgttttggcttcttgcatcagagctgactgttctcatccaacggctgttattaaaacaatccaacggttttggctaaatccgtgacgtctttatatatcgaaccagaccaccaacccatttcctcagctactactgttgaagcgattctcactaaaaccctcgaacacatcgcctttatctctttctctagatctactcgctatg

SEQ ID NO: 10441 - DNA, 3000 bp, Unknown
  misc_feature (1)..( 3000): cDNA_ID_3036499_gDNA_ID_2213649_Annot_ID_181563 3000 nt of promoter + ATG
atatggataatatcatgtcgatacaaaatgtattataatatcataacattataacgtgtgcatgtaaaataggattataataagataagaattaagtgctttgctaaaattcaatgtaatttatacttttcatgcatggtgaatgagtaaaagagttgaatgaatctgatacatgagacgtggatggtaagcgagagctatgtcattcacacgtctcacacagtgcgtgaaacgggaatctcctgccaccgcttgagaggattgaccttatgggataaaaaaatctttcgacgcttaaatcagaaaataatcacaaacatgttatgagaaaacaaatcagcgaagtcgtgggtcttgtatccgctggtactattgctctgattctctgtttccggtcttcagcaagatccgatcattatctccagtcatacaaagatttttttgattatttatttttgtatatgttggatctttgtaatgtccaagaccttacccaaatttttgggaaggccaatattataaaattatgaataaaacaaagaactaagaactatgggaatgatatttttttttttttaatatataaactacgtgaatgataccatatcataagacaaaaaatagaagtatggattgagatacaagcgtggcgtctttgttttcaagtgacctatctccttgattatattaaataaaaactagtaaacaggttacatgatagattcgtagattagtagtatttcaagttataattaagatcaggatatttatagttacagagtatgatcgagtaacaagcgacgatttatatgaggtttttaggcatgccggctttagactatagtcgatgaagcaaggactttaaggtcgacgccaaaatattttttatattttgaacttttgagaaccctagttaggcctaagcttcactttgcttggcacacagccggttatattggtggatcaatgtatggatattttgtatgtttggagtgatggctttatcgaactctctgaacacaactctgctaaccatacatccacacgtcgtgtgataattagatcttatataatagtccaaaaatgacttccaactcatatatttatataaatagtcttcttttgtggttatatgtttggttatttctatttatagtttaattcaataccaatattacaactaaatcagtttaatttttctttgatttggtctttgaattcactttcatggtcagtttcattgtttaagataaacttgaatggattaaaccgaattaggcattcacttttgatcagtctcttctgccataatcttcataagacaaacccaaatttgtaaaaacttttttgaaaaagaaaccgtaagtaaaagtaaaagcgtttaggatccaagtatggattagcttcgtaatttgaattaggtttagctatacgaattcgtttacttttgtaccatatttagttgtattgttttcaataatagttttaaacattcgaataatccgttcccaactttttatccactattattcgtctcagtttctaggatagatatgtccacacaaaaaagctcttgatttttttttttttttttacaaattccaaatttctttgctcataacccaatcattaggttatgaccaccattgactcactcataagtcataagtcataggctcataaccaatccaacaagttgttaagattgacaacaacgattcactaagattccaaccaagtccatgaaataaatgatttacaatactcatttctcatgtacgtctctttgaaggtttcttgcatgacaggaaatcaaaggttagcacactaattactctttttttcacacacattcacagtttcacacatatggtgcagtattttgactcctatcgtactagactaaaacatttggaatgatcaaaaacgaaagactcgttgggcaactagcctaataatcactctactacactagctcccatatcagtggaaaataataattctaaaacgaatcatttaacttctgcatatgtaaacgaaaacgtgtaaatttatgagattacgtaaaaattagcaaaataatatattattgatcaaaattataaacgtggattacataacatgttatttgtttaaatcataatttgatgataaatttataaataaagttctaattattttatatctaaagcaaaattaagattattttataatttctattaattataaaattagttagttcatataattttaaatagttacgtaaacgagaaaaaatacgaaattttaaagagaaaaagataacagaaaagacgatgatgacgatgacgataacaacgacaatattattaactttttaaatcatctttcccatagtctaggagattttgtagaaaagaatcattatttttaaaataaaattccgtaaaacttttcccgccaaccaaacgaactttcgccctacataaacaaacggttatgaaaaatagtgaaacacacaacaacacatgttatatcctcttctttatacgttaggccaaaaaagctttttctatattactctttaacttcatcgattccaagagaagaaacgaagcatcagtgatcttatcctctcatagctaccaccgaactaactctctccatcaccaccataaccattgattctactggtaatgaattttgtttttttcttacttttttttacattttgttgtgaatctaaaaagtctctctttcacctaacgaacggattaatcgttcatgtcgccactcacccaaaatcaatgacttccggagatctctctttctctaaaaccccagaaaaaagtggatctgatcattttataaaatcgtgatttttaaaaaaaattggtgatctcttttattgaagaaattattgaactttttgcagtggaaaaaatagaaagttccaagctttttctcaaatggttctgatttaagtaagagtgaagaaaagtaaaaatagagtcagaaatg

SEQ ID NO: 10442 - DNA, 3000 bp, Unknown; identical to SEQ ID NO: 10435
  misc_feature (1)..( 3000): cDNA_ID_1383349_gDNA_ID_2213649_Annot_ID_181560 3000 nt of promoter + ATG

SEQ ID NO: 10443 - DNA, 3000 bp, Unknown; identical to SEQ ID NO: 10434
  misc_feature (1)..( 3000): cDNA_ID_1808560_gDNA_ID_2213649_Annot_ID_181555 3000 nt of promoter + ATG

SEQ ID NO: 10444 - DNA, 3000 bp, Unknown
  misc_feature (1)..( 3000): cDNA_ID_3036513_gDNA_ID_2213649_Annot_ID_181554 3000 nt of promoter + ATG
tataattttaataagtttcatattatctgatgaaaattaaacatcaaactttgttatttataattttagtaaatagattttttttcttttttatttcataagagattaagttatttaatgtaaagcttctcttgactgtataatatcttaactatattattcttataaaatttctcaaatttcaataaccgtattatgttagtctacaaaaaaaattatattacatcaatattcttacataccaaactaagatatatattgtccagttcttttcatggcatatgtattttacatgctctattttaaaaaattactacgtgtttcaatatcagtattgttgaaattatacaccctccaacgagtaaggagataacccattacaatgcattggcactgatctacatgaacatgactgaccagatttaaccattcgagcaaacaaaataataagtcaactatattttgaatagtcacaaaactatacatcgtaattacaaaactatttctgacatataagattaataggttaaaagaaccaccgtcgaatcgttgatgtacgtagtagtagtatcgtattaacgaggcaatgatataactatcaatatttttcgtaagaaaacacaagtttccttattcttttcttacgtcggcgataaaagttaatgtcgtactttgatttatgaaattgtgatggaaaattgttttaattaattaagaagagaaacgagttatttgtacaaacaaatctgaaaatatagaaatagagcaaaggacagagaataagaagaagaggcaaaggagggcgagagttcacatgttcaagagaagacaaatacgtttctctgacacaaatctgtcagaccaatatttttaaatattttattgtatagtttttattttgttttgttgtatgagaaagaaacgtatattatgtctttattaccaccacaaggggtcaggctccgtccacttggggtcccaattttttctttgttacgagtttttttttgtagtaaaaggcaagtcacgccggcacgcgagccctcacgtgatcccacgtgctttatttattctctccataccaaaatttcttttcctttgttgtttggtaaggttttttcttttttggccaaaatatgatattggcgagattgaaaacatgtatatttttaaaaaaaatgtaggcgtaaaaattatgttactaacacttcattaagcatatgccaagatttttaaattaaaatttatatatcactattggtcgtttttttttttgtgtgtgacagcagctcactattggttgtttatattaaccacatactaaataaggctagctactaccaaacttggaccagaacctaacacatgatgttatttttagtaatatgaaaaaaaagaaacgaaaaggaaaaaggaaagaatagatctttctggtgagagagcatacacaacacattggtgacacaaggtatctaagggcatgaccgcacgtgtcaacatgcatcaaacatgcgatctttcaatattagtattatatatttagcaaagacgcaaaagaatccaaggcaaagactacttcgcctgcatgtcatgccaatctctctctatatgttttctaatcaatatactagattactagacaagttgttttctaataagatctctcacatatgagccaatttgagccaaaacatgatatgatggataaagcttatttgggtattgaaagtatagagactgtcaatgagaaagtagtcatttgggcccaagtacagagatttaaaccttatcaggaaaagcccaatccagtacaaacttgaagaaaaagattgatctccttgtaagttgcaactggtaaagaataggacctttgttcaaggtctactgtattgagatactgaattagtataaacggccacttaaaactactttgtatttgtttaggcccaaaacattggactatcatgttgagaaaataaacacgaacgcaacagaagtttcctacttattatatagcccaacaaatattgatctctttgcttccaatgaatctttgttaaggcccaaaaaatacaaagccgaaactacttccatcttgtactatttttaagtttattttttggaaattttaccatgtatgattcagatcgttggtttaaatttttacaactagaaaatagtatatactctattagcctattatgatattaattaatgggcaatatttcgattagtttacgtgtagagtgtagtgataatgtatttaggttttgaccggcaataatgcatttgtaagaaaagtctttggacaataatagctttggtcaagtcaatgtagaacagaagactaatttctcttgacaaaatattaaaccttaaaaacaaatcctgtcagaccaaaaggtgatacgattgtaacttacaaatgatactatatatttttatagttaacagtctagtatttaaaattttgaaatattgatgatcattgattggttcatataagtaatccattaggttttcatgttggtcaatacagatgtacatgttttcaggattaatataggttccgtcctatgaatttatccgaccatgcataagagtaactctttaatctactattacaagttttcaggatttgaaagctctatacaagtttaactttatgtgtatattagttaacgtttgtaaccacagattcataatatttaccgtcgaactcttagccataaaattcggactaaaagactcgattcaaaaaggtatcgatgagatggaaagttgttgaacttattgtataaaagcttagagaggatattgataagtcgtcttttgcttttgtatctacagctatgacgtatattgtttaatccaaatcaaagtgttttaaagatattttggtttctggtggaggtggtatactaaagattcacatatagatagagatatttatgaatacattgatatgaaaatcatatacaatatgctaaagaacaataa

SEQ ID NO: 10445 - DNA, 3000 bp, Unknown; identical to SEQ ID NO: 10432
  misc_feature (1)..( 3000): cDNA_ID_3036523_gDNA_ID_2213649_Annot_ID_181550 3000 nt of promoter + ATG

SEQ ID NO: 10446 - DNA, 3000 bp, Unknown; identical to SEQ ID NO: 10441
  misc_feature (1)..( 3000): cDNA_ID_2715700_gDNA_ID_2213649_Annot_ID_132446 3000 nt of promoter + ATG

SEQ ID NO: 10447 - DNA, 3000 bp, Unknown; identical to SEQ ID NO: 10440
  misc_feature (1)..( 3000): cDNA_ID_2704924_gDNA_ID_2213649_Annot_ID_132448 3000 nt of promoter + ATG

SEQ ID NO: 10448 - DNA, 3000 bp, Unknown; identical to SEQ ID NO: 10439
  misc_feature (1)..( 3000): cDNA_ID_2704917_gDNA_ID_2213649_Annot_ID_132449 3000 nt of promoter + ATG

SEQ ID NO: 10449 - DNA, 3000 bp, Unknown
  misc_feature (1)..( 3000): cDNA_ID_2715694_gDNA_ID_2213649_Annot_ID_132450 3000 nt of promoter + ATG
atctaatatttattttaatctaagttactaatttttgaaaataatttaaatgttgctaaactattatgatttttatgttcttataaacttttttttttgttaaaaggttcatataaacttagatatttctgttaataattttaatttcgattaattcaaatataagtttttcatgttttatatgaaaaaaatagtaaacaaatgcgttttacttatgtaaaaattgtcagaagaaaatagagcacaatcttccatgtttcatcaggcttcctccgagcctttagtgctatttcttttgatagaattcgtgagagattccccaaatcataacaagaaaacaaaatggtaaacgggaaatataactcgacaaatcagcgtcgattaattgatgtatcgacttttgtccatgtataacaactgctgacaggtggaattttctgattggtcgctgtaagtcgattcacactaccaagttggatacaggaaaaaaaaaaaaaaaaaaaaaaaagagagaaattaaggataagtacaaaaaagatttgtgagtatccaaagagccgcttgaagaaaaacgccaaataaatggttttgatctcgtgaagccaaatcgccattagtcaccaccttaaatgactcacctagtatatatatatatgcaccatatgagtttgatcaatctcattcaatacaatggctgaagaaaagatcaagaagagcttgcttgctgcggacgacagcgacgatgagtactcaagaggtgatacagtttcagatcagacagaactgagttcgattcttgataaacttagtctagaacctaagacggagaaaaagaaactcttggtcttgagtctaagtggtcttcttcttcacagagtccacaaaaaagagttgcgtaagaaacccaagaaccgctctcctgatgcttcttgtgggccaaatcttggtaacgtttcattattcttttattaactttgctaccttttttgtatttatagtttatttgtgtttgttttgttgtttagtgtataagagaccgtttgctgaagagtttatgaagttttgtcttgagagatttgaagttggtatttggtcctctgcttgcgagttagtctcttcactaaacattcttatagttacaggttaatattgttgatttcttaagcttaaatagtactttttatctgactcttcatgtgtttgattgataggaaaaatgttgacattgttttaagcattgtgcttgaaaatctccaagacaagcttctctttgtttgggtaagactctcattgtatagagatgtgtgtctatttatgtatatataatttcgaatactcttttattgtaggaccaagagagtgtacggacagtggatataaaacactagagaaccgttacaagcctttgttctttaaggatctctctaaagtgttcaagtgctttaaaggcttctctgcttcaaacaccatcttcattgatgatgaaccatataaagctcttcgtaatcctgtaaaacactcgaatctctattatagtgttgtttatcgataactttgtagttcttaatcctaattctaatctatcttgatttgcattcaggacaatactggtctgttcccaatgagctatgatgcttctaacataaaggataatttacttggtatgcaaaatttaaacttctgctgttcacttcttatctttagacatgcgttttggtttatttgtgattggtcttttattttgttagatccggaaggagagttgtgttcttacttggaaggtttggcaaaatcatcggatgttcaggcttacataaaagtgcattcttttggacggcccatgatcgattcttctcatcctgattggtctttctacagcaacgtttcaaagattgtctcttaatcttttatgattattagtttgtttaagcttcgtatctcaatcattatcttcttttgcttagtaatgaacacattaaaaagtctacctatttcaattctaataagaaagatgaatcacttgtgcttcagcatttgttaattcttctgtacgtgttcaatgtcgatcaaccatttttatactgtgtcatggttgattatatattctcttttggacccatttttcattaacaattatttgattatgcttattctatgtgtcaaaatttgaaaattcagatcactagttctaatttttgtatcaaaatgtggtgtttgtgtgggagtttaggatgttctttggaatttcaaactcaagatgatgaagctaggtgatccaatatatatttaatctaactggtaatttgttaaaatttgtaaaataatttgaataacgctaaactgtatatgggtttccatgtttttatatgaaaaaatagcaaacaaattcttctactatttttttcgtcaacaaattcgtttacttatttgacatttttttcagaaaaatatataatacaattttccattcagcttcttctgagccaagtgagatttcatttaataggatttcttttgattttaaaacaataaaaacaactggtaaacgagaaatagaagttgattcagtttaaatttataggattttagtctttcaacatttctattgttggattcatcaaaaactttaaatgagattcattattcatatgaggaaaaaatcaactttcaaagcgatggaaaagatgtacagtatctacattttcccatgtatgacaggtggaattatctgattggtcccttttaagtcaattactaatggtctttgtctctgactctcttcgaatcaacagaaaaagtgaaaaaagatagtcattagaaaaacaattaaagataagtacaaaaaaagattttgtgagtatccaaagagccgcatgaagaaaaacgtaaattaaatggcttttgatctcgtgaagctaaatcgccattcgtcaccaccttaatgactaaatcctctactatatatgcaccatatgagtccttactgtcttaagcataaca

SEQ ID NO: 10450 - DNA, 3000 bp, Unknown; identical to SEQ ID NO: 10438
  misc_feature (1)..( 3000): cDNA_ID_2704913_gDNA_ID_2213649_Annot_ID_132452 3000 nt of promoter + ATG

SEQ ID NO: 10451 - DNA, 3000 bp, Unknown
  misc_feature (1)..( 3000): cDNA_ID_2715690_gDNA_ID_2213649_Annot_ID_132453 3000 nt of promoter + ATG
ataggagcagacttgtgtttttcgagaggaggaaacagtttgagcttgatgatttgttgaaagcatctgcggagatgcttgggaaagggagtttagggacggtgtacaaggcggtgttagacgacggctcaacgactgtggcggtgaagcggcttaaagacgcgaatccatgtccgaggaaagagtttgagcagtatatggagattattggtaggcttaaacaccaaaacgttgttaagctaagagcttattactatgctaaagaagagaagctcttggtttatgagtatcttcctaatggaagcttgcactctcttcttcatggtaaaactctcttctctaagctttgattatcaaactgaaaatgctctgttttgcttagtgacaaaagtgttgatttttactacattatcggccaaagttatgatttttttattggtggttttagggaatcgaggaccaggacggattccattggattggacgacgaggattagtctaatgttaggagcagcgagaggattagcgaagattcacgacgagtatagcatctcaaagataccacacggcaatatcaaatcctctaatgttctattggacagaaacggcgtcgcgctaatagctgatttcggtttatcacttttgctaaacccggttcacgctatcgctcggttaggaggataccgtgcgccggaacagtcggagatcaaacgtctctctcagaaagctgacgtgtacagttttggtgtgttgcttctcgaggttttaacaggaaaagcaccctcgatattcccgtctccgtctagacctagatcagcggcgtcggtggctgtggaggaagaggaagaagcggtggttgatttaccgaagtgggttagatcggtggtgaaggaggaatggacggcagaggtttttgatccggagcttttgaggtataagaacatagaggaggagatggtggcaatgcttcatatcggtttagcttgcgttgtgcctcagccggagaagaggccgacgatggcggaagttgttaagatggttgaggagattagagttgagcaatctccggtcggtgaggattttgatgagtcacgaaactcaatgtctccgtcgttggctaccaccgacggctaagtttggtttctgtctgtcgatgttgtagaatacgtatcgtttggaccttgtcgatttttaaggttcttgcttagaatccctgatttgcgaacttgtcggagtttttttagccatgttttgtgttttcactgtttgtgatcgtaacggggttgtgtggttttgtggatttatgaagccgtttcaataataaaaccccatttgttactctttaaagcccattaggcccatatgttttagatgaattattttgcaattgctgctatttaattatagaacctaaaactcgaacgcccattgattagtgcttctagaacggtggatgcttctgtgtccactggtaattgtctttttggttgaagagtcagcccttcggatttgacctttcgtgtaccttttaagcccattgattatgattggcagattaagtaaattaacgaatggtcaagcacatgattagccaaatcatgacaaataaatggattcctttttcatttctggaagcggaatcttgtctaacaatttttttaattgatagtaatattttatgttatgggtttctgatagttgaagacttgaaatgttgaacttaaaagtgaaattacgctttcataatttcattaagccatgatggcaagttttttttttgggttgaggtcaacaagagcaagtttaatggtatcgaatagtgcgtaactgaaataaaacttgttgaaaaatcattcattcactattcctcggcgcgtgaggccaatttgaccccttcccccacgaaattaaacttggggagtactaaaagtctaaaccagcaacgtcgcttttcatgtgccttaatcacacccttttctgccacgtgtacgatctgggaccgtcgttgtgctcattgacatttgtagatccctttctagatgttcattaaaattacttaatttatatccagtccttctacttttagttttttgatactttaatccctgttgttttaatgatacttcattcagtatccatccaaaatcaaattaaatccatagattaagatgtacatttttgaaaataataaatggtttattataatatgttactaaatttatggtatttttcgctcttgtattgacttttacatggatacattaattttaatcttctttgatttctgttaattttctttgaattcattttatacatttattagtgaactattctaaaaattaacaaaatcatttaaaccgacaaaaaaaactttaaaagatcagcgtattataaaccaacgggggatagtttgcattaggtattggacatctggggggtaaatagagcgaaacaaaagttgaggcttgtttttcaacattttcattttattgtgtgctatttaaactgcgtcgtatttggaggcatattcgccggtcaagcgtatcaaatacccaatcacgcgaacttttctccgcctcttctccactccaaaattcttctccgtctttctcccgtcaccgtcgaataaagcctgagatctccgaattctgatcagcaactatgcattcaagtcatctccttctcgaggaaccgatcaggatgacttcaatcctcgaaccttctaaatcagtgagctatttatttctccttctctcgctctgtgtgttttctgtggttgttttgatttccttagctcgttgttgattatcgattacgtttggatctgttgcgatatttcatccattttgaagcagtgagagatttgtttcgtttgtcgtggtttttgatccgcttgatgttatttcgcagagtttcttcccggctttgactaagattgttgggactctaggtccgaaatctcgatccgtcgaggtgattgctggttgtctcaaagctgga

SEQ ID NO: 10452 - DNA, 3000 bp, Unknown
  misc_feature (1)..( 3000): cDNA_ID_2703736_gDNA_ID_2213650_Annot_ID_132455 3000 nt of promoter + ATG
cataatgacagattgtgataaatttgtcagaaaaatgaaacaaagaggacaaagaagtcggaaagacataaaaaacaaaaagggagtaacaaattagaaaagtttgttctgggtttacgtaatacattttttcgaattatttattcttgttttattatatgtttgttagtgagggaaaaaatgtgaggagaggattgaaacacgactgtagaaagaagacagacaattgaagacagatcttatctctatccctcccacgactactttctttggaaacacaaagctatatatgtgttctcttttataaaaaataaattatcatttcacataaaatagtcagagacaaacaattttcgaaattttatgaacaatacgtagccatttatgagatgtgtcatgcacgtgatgaaaaaactaaataaggaaaggctgtacatagaaatcttcttggttaagagacaaaagatcttttctaggctttggtccatgtatctgcctttcttttcttcttctttttcatatatatgttttttatataatccaataatatctgcaattttatcaaagataaaataggctaccttactatttctggaattatacaatattttctcatgtagaaatatggttttgtgttaatttcacactaaggctgataaatataatgttctaccgtacctgatgaaattgtagggtcacaaagtcaagctgtaacagaaataagtaaatgttattgtaagaaactaaaaactatatatgtatgtcagttaatttgtaatacaaatgtcaatatgtcaaaactaacataattaagattgagataattggatgatttgttgggtggtgaatggagagcacgtgcttgagaagttagtagtaagctatagaaaatgaaggataatgcgataacatgtgccttatcccgacaaaacacatctcacatgtaaatatagatatgtccatacatattatcatagaaagagtaccaaaagtgtgaaatctatacaccctaaaataccactagataacactctttattatttatatagtgatatcaaccacctttcatatgtttctctgttttgcaagtaaactttttacatttatatcaaggatattaaattagttttcatattgttagctttgctgaaacccaaattaatgagtccaatttttaattattctctttacatcaaaattcatatctacaattatattcagaaattactagaaaggcatatcttatacatacttgatgtattatagataaattttctctttcttttgaaacatatatatacagatataaatagaggcagatacatgtaacctagccaaaggagcattggtatctcaaacaatatttgccctttctctatctctctctcatcactatttgccatctctttctctctccctctctttcaaatgtcaataaaccaatactcaagcgatttccactaccattctctcatgtggcaacaacagcagcaacaacaacaacaccaaaacgacgtcgtggaagaaaaagaagctcttttcgagaaacccttaaccccaagtgacgtcggaaaactcaaccgcctcgtcatcccaaaacagcacgccgagagatacttcccactagcggccgccgccgcagacgccgtggagaaaggacttctcctctgctttgaggacgaggaaggtaaaccatggagattcagatactcgtactggaacagtagccagagttatgtcttgaccaaaggctggagcagatacgtcaaggagaagcaccttgacgccggagacgtcgttctcttccatcgacaccgttcagacggcggaagattcttcattggctggagaagacgcggtgactcttcttcctcctccgactcttatcgccatgttcaatccaatgcctcgctccaatattatcctcatgcaggtaccctttttatttaattaaacttttttttgtgtcataaccaaaaaaatttgaacctaaattcagattaatcttgaacaaaaaatgtcgaatatctttgacatttaaaggtgtagtgaaacacaatagtttttccaaccatttagctcgattattaactaagccattgactaattaacacactattaagagttatggaatagcattaaaaccaaaacaaaaaaagagttatagaaattggaagagatgttcattttgtcgtttctatttttgtcaacgtatagttttcattttacatgcatagactggataaataacggaaataaaatttaacgagtcatgcgatgttctttctcaaaaaaaaaaaaaaaacgagtgattcgatatttacttaaagttaaaaaagtgtaaaagtccaaaaaaaaagtggaaaatctatttcatgaaatgtatgaggttacgtgacccaattgaaaactctttatcttgtttgagtttgtaaatgtgcgcgtgaggttagacgcgctttaaagtaagtagagaagtaaaaataaagaaatgatggaagcccatagaaacagaatcggattcgtattatctgctctgcgtgacatttgttgcgtatccttacacctactctttctccatttttcattatacttatagcatcagtgtgaatatatatacacccttatctttaatcgggatcttggaccgtaaccaaaacggcatgcagtagttcctcacatgttccgaatatattcatcagctcaaattcgattcaagacattaacccaagtccaacatagttttaagagtatatacttaattattttcatatatactggtttatgtgatgtggacattttgtagtaccaatgtaattcacatataatataacgtggcgtcccattgtggtaaagcttgtcatctgagtaccacaattggaaattctcttccgattaaagtcttgttcattttggaaaattatgacaaaagtctcggtagttatccattatagattcctcgatttcactatctatgttactggatatataatttttatg

SEQ ID NO: 10453 - DNA, 3000 bp, Unknown
  misc_feature (1)..( 3000): cDNA_ID_2991235_gDNA_ID_2213650_Annot_ID_181593 3000 nt of promoter + ATG
tcgctgcctatggcgtgaatagtggtttaagtgctggtcttggtgttggtattggtggtggtcctggaggaggatctggttacggaggtggaagcggtgaaggcggtggagctggtgggcatggcgagggacatattggtgggggcggaggtggtggacatggtggtggtgctggcggaggaggaggtggtggccctggaggaggctacggaggtggaagcggtgaaggtggtggagctggatacggaggcggagaagctggtgggcatggcggaggtggaggaggcggagcaggcggcggtggaggtggtggtggtggtgcacatggtggaggatacggtggtggacaaggtgctggtgctggaggaggatatggaggtggaggtgccgggggacatggaggtggtggaggcggtggaaatggtgggggtggaggaggaggttctggcgaaggaggagctcatggtggtggttacggagcaggaggtggagctggagagggatacggtggtggtgctggagctggtggacatggtggtggaggaggaggcggtggtggttccggaggtggaggaggaggaggtggaggttatgctgctgcttctggatacggtcacggtgggggtgctggtggtggagaaggaagcggtggctatgtaccatgaaaaattatctatatggagtgtaacggcaattgagtgaagtgtcatatctcgtaagggactatatagtttcacgatttatatgtggcaataaatagagtaatccttcgtataataagccgtagaaaggcggctattgttgaagtttttaaattgtaccacgaccaatattgttgtaagctactactacgtgtgtatcaagtttttataaatggaaatcatagttgttcctacgcgtgacgtagaatctatattaaataaattttacggagtatgcaaagtaaggtacatgagtgaattaggacacatacaactttgatttggtacatgacaacaagtgacaatatgaagaacattaaaaacatcaataatgcccaaaggtttaattgacattaatttaattgggccgaacttaattttccaatagtttcaacctctataataaacactcttaatattatttacactaaaaggcccaaaggttatagaaaattagagccgacccataaaaccgataataaaggatcagatccgacccgataaaggtaagcagtgtagcgtcgcatcatacactccttcggttcccgacgaatcgctgcttttttctctctctctctccgtcgctgaaaaatgtcggcaagacctgaaggaagtccgccggaggttacgctcgagacctccatgggtcctttcaccgtcgaggtttctctctctcactttttcgcttatcggatcaacgataacacattccggccatgacattcatatatagagcttacacgaacttgagatctagatttcattctctataattctacattccaattgtatttttctcgaatcgagcttaaactttaggattttagaacggggttttagggtttacaatgttttgatctgtgtgtcaatttttactcagatgtattacaaacactccccgagaacttgccggaacttccttgagctatcccggagaggttactatgacaacgttctgtttcacagaatcgtcaaggtatgttttctgtgtgtttcagtctacttttcgttgtacttaagatcatcattgtgatgaagttttaaggaaattgttttgctttgctattgatctgtttcaggatttcattgtgcaaggtggggatcctacaggaactggaagaggtggtgaatccatttatgggtacgttatcatcgtttttctttaatcaatgctagctttgcttgttgattctttgtcagtaatcaaatttgaatatggggacacaagcaagctctgatgtagttagttttggtgggggatagaagcaagctctgatgtagttagttttgaagtgataatattcaaagctctgatgaagtaagcttcattatggactaggctctgtgactagaagtctcaagttaattgacactactcaagttgctttattcattgtccattccattcttgttttgtttaggtccagtcatgtgttccagaggcttgatcttaatcttagcatttgtcttattttattttattttttgccttgctccttttcctagttcgaagtttgaggatgagataaacaaagagttgaagcacacaggagccggaattttatcaatggcgaacgctggtcctaatacaaatgggagtcaatttttcatcaccttagccccacaaccgtccttggatggtaaacacagaatacactcttttaatagcttacaatgttttgagatcattttccatgtttactaagagaacttgcattgactgttgtgttcttcttttcacatctctatgcaacttctaggaaaacacacaatatttggtagagtgtgccgaggcatggaggtgatcaagaggctcggtagtgtccaaaccgataacaccgacaggtaaagttgattattcatttggaatcaacaagaattaaccaccgagtgaaaaaacccaactaatcgaaggaatctcttttctattctcaatttccaggccgatccatgaagtgaagattctaaggaccaaagtgatcgattgattggggcagaggagtttttgtcaaggagaagaagaagcatttagtaaaccgtttatgacatgaagaactataactctgtgtactgatcccttgatactattgtagactggtttttgtctaagtcttgactctactttgatggaaaaaaatgattgaaatacgttaaatcactctctatttctttttgtaatttgcctcgttcatatcaattcaacggcttaaaaaagaacacgtcatcaagattttcatgtttcaactcatatcctctaaaaagctatctctcactatgtgaaggacgcgacagtaggaaa

SEQ ID NO: 10454 - DNA, 3000 bp, Unknown
  misc_feature (1)..( 3000): cDNA_ID_1808507_gDNA_ID_2213650_Annot_ID_181589 3000 nt of promoter + ATG
ccgaaccatagcatggtggtttatgcgttatgccccgaccttagatgattgattgacaggttttagttggccgcaaagtgtagttttttacatatgaaagtggacccaaccatttcactttgtttcacaagtggatcctttaatactttcctaaaatttctacaaatgggtttaggcttatgattgtcatgaaagatatagaagcacttatataaagtttaaaaacttatcatatacaaaaaaaaagaagaggaaaatcaaaaagtataaagttaaggaccgcaaaattataatcggaatgtaccaattaaaactgctaacaataatccatagtatgtatatctttgactgatatactaaaatataatttcacccttcataaacaaaaatgcatatctatttctttttattttatatatacttttcaattttccatacatgtttattttacacaaatcatattttttaatgattttttaatcacaccttaaaagatcaactaaggaatcgcggtctcgcgggcatatctcttcttcggggtcagcagtgttccaagagaaagcacaggcccatcatagtcttgtgggttgcatcaaaacacgatcactcgacacttgcacaaattcttttttcatccttgtccaacatgaccacacacaaccaatttcatcttctttttttttttttttggttttcgatttaatcttctcagcaaggaatttattcttttacccttaatctgagcctttggaaatcacagtgttggtcaaaatatctatgatcatgtgtttgatatcgacatacatgtaacatgtatgtgactcctgtagttcatttaatatgcaatattttaaaacatatatattttcataggaatgttaacatagacaagtctttttatttcatagtctctgacaataacgcatgcattgtatttgtattcaaaaaaaaaatattaacacaacatgagaattggcgattaaagattttgacctagataacgttcattatcaaaattccaaacaactaaaagaaaagacattgattattttcaaggaaaagctctttcctcagaaacataccccaacaaaataaagtttcgagctctctttccagatatgttccttaacattcgagctctctttccagatacgttctttaacattcgagcgctctttccagatacattccttaacaccgagcttgcagcaaacatagacatcatctgacgcctgaacaatctgatcatgggaaaggctacgagcaccccaattactcatacatatctccttatctttcctcactcccttgtaccccaaacactcctctacaatcttctcaaacgaactattgaggagcctcgtaggcagatagtgccttatgtctagaagtctccatatctccaactgatggcggaatctttcgagcttgccctggtcttggctgttccagacgccgacaaaagtgattgtctcatcttccaagaaacttcgaaggacctcaggaatgcgtttacagtgagacaactggatgatgagacagcggttaccaacacatagttggagaatatccggtggaggatcggaaccaccgggtgtccattggacgtcgagtccaacaacgagagggtgtgaggagcgaagacggctgaagaaacggatgctatgaatccaacggcggatggttgaggtagtatgagtgaccgtgacgatcaaacgttctccaaagaaatcgatgtagcggttttcgtggatatggcgcttttggattcttcttctgatcctagccatttaatctgcataaaagtgagtatgagagagaagattaaatagatatcaatcctaactaatattcaagaaaacataatatagatcaataaattgatgagagtaaaaacacaaagatgtttagaaataattattgtcaagactcaagtttcttcaaaatatcaagaggcgcttggaataagacccttattctacaatacatcaatctatatagagataaagactaagcataatttttaaaatagaaaaaatataaacgtaaataacacttttttgaggtaatactaaattttctaaacatgaaatgttacaaatccacaatatttccatataaatttgtaaataatattttgttagataatgttaaattttctaaactgaaatattaacaaatccgcagtatttccattattaaatctcgattttgtttcaatgggagatttgaattttgaaccaaaaaaaaaaaaaaagatttcatcaagatatctagggggatattttgctggaatatagctttgatgagaatatttatattttgtatctctgaaaatcaagtttaaaggggaaatgattatgggttgaaattttgcaatcaaaagccctaatttgcaaaaactacataagttttttgtttgggctggcgctatcggatccttttaggcttacatttaacatctggtccacttagaaagagtcacgtagtatatggtaattgtcaacttgatttttcaagttaaaagaaatatgtatcaaaatgactaaaaagtagtgaaatattatgtatctaatttgtttatttaccaaattaatgctataaaaatgttcaactgtacaattggcatggaataatatgaacataaatcatacattattaagcacttttgcctacgaagggataccaacttcattagtttacattttcttttgtgttcaattgttagctcaaacccaattaagtggggaaagtaagaagcaacaactcctcttcccggacccctaacaaatcaactaaactcaatatcaaaccattttaaaagagctcatcattaactagctactaattattcttaatcaatcactgcttaatacaaagcactatatatacacttgtatcttccattagtttcccaccacaactacaaaacattccaatacacaacacacaaagcacacactttttctttcttttaaaccccaattgcaagagaaaatg

SEQ ID NO: 10455 - DNA, 3000 bp, Unknown; identical to SEQ ID NO: 10452
  misc_feature (1)..( 3000): cDNA_ID_3036546_gDNA_ID_2213650_Annot_ID_181586 3000 nt of promoter + ATG

SEQ ID NO: 10456 - DNA, 3000 bp, Unknown; identical to SEQ ID NO: 10454
  misc_feature (1)..( 3000): cDNA_ID_1808507_gDNA_ID_2213650_Annot_ID_132458 3000 nt of promoter + ATG

SEQ ID NO: 10457 - DNA, 3000 bp, Unknown
  misc_feature (1)..( 3000): cDNA_ID_2704987_gDNA_ID_2213651_Annot_ID_132464 3000 nt of promoter + ATG
cccggaaccagatcaatattttgagttatctgattcatccccgacgcgtaaaagagaaaaaccaattctctcctaactaatacctaagacacaaccacttttaccaacacttaaaaaaaccaattattcacagtttgtcaaaaccctctccagctctccaaatatgtatggtttagcattcatttttcctatttccacaacattcatcatcaagttcttcactaatgctacttttttacatcatagtgaacatgttaccaagtgtggattccttatttccaactcattcctcgtcgatcttgccaaacctcataaatgggtttcaaccctggtatgtagtccactatatttatcctagtacaaattaaccttttatcaagatatactaatgtgtaactgttttattcccaagcagatggaggttttggtgtcattactttctcggaggcttacaactacacttgataatcatcgttctgcttttgttgatccatagttcacaagccatctacaagctaaattcagagccttcaatgctgccaagatgaaatcacgcgttcgttggtaagagaacatgcaacgcttcatcaaaagatccaaaattgaatggttcaaggacatagataccatttacgcacctatgaaatggaatgatgagcactgggttggactttcaatcaatcttggcatatggagcgttgaaattcttgacccaaatacagacctctacgacgacgataagataaaagattcattgagcgggttgtcaatcttttgccccacctcatccaaaggtactgtacgcttgagtgttctcagaatcacggtcttcaaccgtttttatggagacgaattgatggtatatacaagaatttgcggagtggtgactgtggcccggttgctatgaagttcctcgagatccaggcaagtgataaactcccagataaaatggctgaaattactgacaaacacgtcgacgcgtttaggcgttaatatgccatggacatatataaactatgtgtctacccactctattcatctcatgtttctgactagttatggaatgtcaccctacattcatgttgtaatatatacattgcttcctccttctttgaatacttataactctggattctataaatatgatttttgcttttcttaaccatattcataatcttatctttttattactgttgaatgttttagtggtctgtatcatattatttgtttattccatccataaccccaattttttaagggcatctaacagttgatatcggttaacaatgcgaacaaaaaaaatactttagagtattttgaactattgttgatttggtaaatcattcgaactaattatgtttacaaatacgtgaaaaaattaatataaatgtcatccaatgataataatttatccaatcatacaaacgaattaatacagttatattgtggatggattcatatggatacattaacaattatctttctcttttaccttgaaagacaaatctgaatttttttctaccgagaatattgagatactgttgtatagcaagaatattcccaccttcacgtttaaaactaggattattatggttagagcataaaccagaaacattatggttagagcaatattcgtttaataaaagttttaattatcacgtttattatgaggaggtgagcataattatatacggttactaaacacccacgatttatttaagtttcttccattccccattccatctgtttcaacttgaaaacaaataagttatgctcaagttagaaaaagtcgacaagaatgaataaccatctggtgtcaaaaaggttgttcagcataaactaaactacttagttttctacgttttacattcatcgtaaacaaaacataatcgtctgcatatgttttttttttatctcaggttgctgctatcccaaaaatttacatcccggcaccaatacttgtttaaattattagctacgttgccgaagatgtcgtggatgctttgaaacccttggttatggctggtccaacatttaaggatgcaatgtattccaaggaaacactaagttgtgtccgcatagacaaatatcgttatttcatgtggtggttcatgccgcattccatctattatcattttttcacacaatgtcttgaagccaacaatccacatgctttgaaagctgtattgtacaaaccaatagcatatgagaattttgttgccgaatgctatagatctaccttatgggcaaagctatacggagagcattaaggataggaatcaaagaaaggaacaaatagtcccaaattttgaaagacaatgaaaagtctgtttttgatgttcatttctgatgttctgcctttcatttcagaaaatagttgcttattaatttctgatgttctgcctttgtttttataaaatacataatttatactctgtttactcctatgaaaagtcagatcccatcaaaatttgttcgttgccatgaatgaggtttgcatatttatgtttaagctaagtccgcaaaaatgatttccaattgataaccctttaaggccatatacgtgtgctcacgtcgttataataaattccaaacggacatatatctttggacatgttctcttggatagaacatatatttagcatttaattacaaataaataactcgactataaacgacaccagacgaattatctatctaatattacaaccacccccaactcaatacgtaatattctcaaaaataaatatgtcatatagtgtaacgacaacggatcgttcaagtaaccaacccttcgatgttaaaagttacatctttttctcgcagacgaagttacaccgttttggcttcaatcaaaggaaccttttcacttgctataaatacctctcctatacttgactctaccaagacaaccccatcacaaaagaaaaacattgtcctctgttttcgtttccataatcctctgtttttcgttactcttcaattctgccgcttttcacc

SEQ ID NO: 10458 - DNA, 3000 bp, Unknown
  misc_feature (1)..( 3000): cDNA_ID_3036613_gDNA_ID_2213651_Annot_ID_181606 3000 nt of promoter + ATG
tgtatcatattatttgtttattccatccataaccccaattttttaagggcatctaacagttgatatcggttaacaatgcgaacaaaaaaaatactttagagtattttgaactattgttgatttggtaaatcattcgaactaattatgtttacaaatacgtgaaaaaattaatataaatgtcatccaatgataataatttatccaatcatacaaacgaattaatacagttatattgtggatggattcatatggatacattaacaattatctttctcttttaccttgaaagacaaatctgaatttttttctaccgagaatattgagatactgttgtatagcaagaatattcccaccttcacgtttaaaactaggattattatggttagagcataaaccagaaacattatggttagagcaatattcgtttaataaaagttttaattatcacgtttattatgaggaggtgagcataattatatacggttactaaacacccacgatttatttaagtttcttccattccccattccatctgtttcaacttgaaaacaaataagttatgctcaagttagaaaaagtcgacaagaatgaataaccatctggtgtcaaaaaggttgttcagcataaactaaactacttagttttctacgttttacattcatcgtaaacaaaacataatcgtctgcatatgttttttttttatctcaggttgctgctatcccaaaaatttacatcccggcaccaatacttgtttaaattattagctacgttgccgaagatgtcgtggatgctttgaaacccttggttatggctggtccaacatttaaggatgcaatgtattccaaggaaacactaagttgtgtccgcatagacaaatatcgttatttcatgtggtggttcatgccgcattccatctattatcattttttcacacaatgtcttgaagccaacaatccacatgctttgaaagctgtattgtacaaaccaatagcatatgagaattttgttgccgaatgctatagatctaccttatgggcaaagctatacggagagcattaaggataggaatcaaagaaaggaacaaatagtcccaaattttgaaagacaatgaaaagtctgtttttgatgttcatttctgatgttctgcctttcatttcagaaaatagttgcttattaatttctgatgttctgcctttgtttttataaaatacataatttatactctgtttactcctatgaaaagtcagatcccatcaaaatttgttcgttgccatgaatgaggtttgcatatttatgtttaagctaagtccgcaaaaatgatttccaattgataaccctttaaggccatatacgtgtgctcacgtcgttataataaattccaaacggacatatatctttggacatgttctcttggatagaacatatatttagcatttaattacaaataaataactcgactataaacgacaccagacgaattatctatctaatattacaaccacccccaactcaatacgtaatattctcaaaaataaatatgtcatatagtgtaacgacaacggatcgttcaagtaaccaacccttcgatgttaaaagttacatctttttctcgcagacgaagttacaccgttttggcttcaatcaaaggaaccttttcacttgctataaatacctctcctatacttgactctaccaagacaaccccatcacaaaagaaaaacattgtcctctgttttcgtttccataatcctctgtttttcgttactcttcaattctgccgcttttcaccatgattcagttccaccgtctgtatgagttgtctccgttggtaactggttgggcgatatgtgtcatggtagtgagagtttacaaaaaaatactcaaccatgatgcattcgaactaagacttctcttggttgataaattggtatacaattttctcgtattccttttcgcaatttgcagatttttttctaatccctcacccctataatgttgttttcatagggcacccaaatagaggcaacaatcgggcctcgtttttctgccttctattatgacagaatcaaagagaatcaatggaaaacgattactacttttattgttcgaccaaactgcgaagcaataagaacaactcctcatgaatttcggattttgttcatggagcaaactgtcgtgactccctcaaccaccaaagaaaccgttgtgcttaacaacttcactccatttgactacatcatcgaagacactgttcgcaaatatactttggttggtaagtaataacttcacaaatttaattttctttccaaacacatagatttaactactgtcatcttcatcatatttcgaccagatttgcttggtgcactcgttgattatggatttctgaccaataacgcgaggaatggtaccgatttggacggattcaagctacccttcaagatcatggatagatagtacatctctttaccaacactacaagaaaacaggtaaacgacgactacaatcagcgacaacaaacgtagtcgtaacattatacgactatttggccacggatttacgactcgcatgcgacaacacgaaaaattgtagttacatagtcgttgttttacgactatcgtatgcagtcggcaaagagtcggcaagtaacgactatttgatgattaaattattgaagggataatgttgtcgttgcttagtcgctaattaacgactattctaccgtctattttatttagtcgctaatttgacgactacaggacgactagacgtcttagtcggcctgtagtcgtagaaacgtcgcaccatagtcgtataaagtagatggaaaacgtgtttcgcattggtaagtaggtacagctaactatttagttgtagtcgtaaattagtcacaaaaattggcctatataataaacgttcacgcaactcttctttcaccaacaaatcaaaacaacaacaacatcaaagagaaaaaaaaaaaattagttactttattgtata

SEQ ID NO: 10459 - DNA, 3000 bp, Unknown
  misc_feature (1)..( 3000): cDNA_ID_3036580_gDNA_ID_2213651_Annot_ID_181616 3000 nt of promoter + ATG
ttggagagtgaacaacatacagaattaaccagtgaaagagatgactacaaaattgattataaagatgaagaacaaaatggattttatactcacagttttcatagagaatagcgatgtggatgatatgggaatctaataacaagcttgaagggtgactttgcaaatcagaaaatttgaaaatcaaatagaattgagagagagaaagagagagagagagagagagagagagagagagagagagagagagagagagagagagagagagagagagagagagagagagagagagagaggagaagatgaagtgttgaaaattttgtcgacattcgagtttccaatattggagataaggaatacggacagaaacagaacttgccgacgatgggattggagcgaaggagaggggaagaacgagatggcaagacaggatgattgtattacttggatcttaatgaaactgatcgttgagtttaaccttttttgcgctaatctccaaattattcattgttcacttttatttttgctttatcatcttcttctttgtccctatttaaggaattcaaattcacttctactgaagtatttcttgtatcttctgtgttggtcgatttgggtttaaaaggattaatcttttaactttaaactttatccttccatcgatttcattatttgtttctgataaaggcttttgctttatggaagtgataagatagtttgatgatgaaaaaacctaatttccaaaagttccccacgccttcgtcttactctttttatctctttcggcaattggagaatatgacttgaaaaatctcaattttgtttcattttttcttctggatcctcttcttcttctctatctcgtttcagtcgataccctttcatcttcttcttcttcccttttcacttgtttctctagatactctgtgaatctgagatatctaccgtgaatatgagaaatccactttgaaaccgagaaaccgccggtaagaaatcttttgtgtcatatctatgtaagattttatctgtttgatccatagtttttgattgattgtgttgggatttagggtgtcatgggttagattacgttttgttttagagtttggtctcttcttctctttgatttagagatggattttggataagttatcgattgaattatgatgtttaatgattataatttggattttatcattacaatttggatttgaattacaattcggatttgaaattgggattcttttaaattgtcccttagtagcctttgttaaggatagccattgaaacaagtttttatgatttaaattcggatatgaatttgttccttatagatggtttgtgaatatcactacaagaaatattgacattgttagcgcgaaatatttgctatcatacatataatatagcgaattcacaaatgttataacatcggcatgcatcgtaagtatgacccatacattagcatttttttaaatgctacgatagattcacatacaatagcactttcttgaacgcttttatttatttttatatgacgatacatccatgctatgatctatcattttttcagtgctataatattcagttttatgactcttattttatgcagttgtattactctacaaacatttggtggaatctgtttaatttggaaaatattcaatatatatattaaatttccaaaagatcaaacattaatttatacataacacgagtctcaaacatgtacaactaatatctttaattctatatactacttttgcaattggagaacttgaaaacgattgatgagatcatgcaaaatccttatttcgttttctagatattggactcggttcctcaaggaagttagctcagcttcatacgttgttgttgtactctctttctttctcataggttttcgaaaaagactactaaactcttccgtatattttctccaaatgttgcagtcttcatctttgtcactgtcctcaacgacatctgtaatttctggtacatgaaagaaaacaaggaagattcatgcttcctactacaaaacttatcgaatcactttattagcaaacaaacatctttactcacatgcaaacgtaacatgtgactgagacatatctttaccctcagaagagactaattccatattatttatacctttactttctccaaaaaaagaaaagttaagaccatcacttgtatccagcattggtgattcatagacataactcgaaaaccatttacttagatcaggaacttctgataattgtgaaaataaaagtgaagaaccacataagtgaaatcaatgcagctaaaacaataagatatacatatcttcccaaccagccaagcaaattcgggaaacagtttccaagaaaatgacttaccttcactatcattcatcttttaattatctatgttcgctcctctttgacctaagaatcttttgtataagccaacaaacaataaaatccaaaaccatgtaatgtatgttagtactaattagtctacaagaaacaaaaccaagactaaatttttataatgtaggcagaatatattattttagaatttattacacgaaagactaaattttggctaaatttctagcggaataaggtattttagtttcccgtttaataaaattatacattagcgttaataaaatgctatatcagcaaactctatcctagcgtatataaaatgatatatatgaaaataaaaattacaattaatcttcaatagcagttgagtaatctgtgctatgtcgttatgctatcaatgtagactttttttgtagtgtatgtctaaaacaaaagatgacaagtattttaaatgtttgatattgaatttgtattttggatttgttgttgcaagtactaattactatagttgttactcgtagaggaggagaacctacttctagaagtgaagtatatgcctatcttagaagtgataatagacaaaagctatctgatccactccatttagagatagtagttgcaatggacaatg

SEQ ID NO: 10460 - DNA, 3000 bp, Unknown
  misc_feature (1)..( 3000): cDNA_ID_3036558_gDNA_ID_2213651_Annot_ID_181622 3000 nt of promoter + ATG
atcaattacaagcccaatccaaacctctcctacagaagcactaatgtagctaactcccaagatcaagtgtatccaccacaatagaatcagtctaagccatttgttcagtataaccaaggttatgtccataaacagcagtacaatggaggataccaacagcagaatccaccaccagggttcactcaacaaccacaacaagcaccgacagcataagatcctgaaatcaagctacttattcaacagatcattcaaggacaagctactggagctatggcttttcacaagacgatagctgaactacacaacaagatatattgttcttacaacgatctaatgtcaagtttgaagctttgaattccaaattcaagtatgtggagagtcagtttgtatccacctcttctccgaagcatccagaacaacttccaagaaaagtagttcagaatcctaaggactatgctactgctaatgctatcaccatccaacaagaagatgagtctacaccaagtcattagactcccaatactgaggacaatatgattcaagaaggggggtattcaactcaaattgctgcacctgccatccagcaattcagctggactatagagcacacacctttgattggtactcaccattctgagaagaatttcaaagtagaaaaacccaagtaggatcagaatcatgagatgattagtagttttatcactcaagaaacttacaagaagaaagtcatccaagaaaagctatatgatcctagttcattcactctgccatcctccctaggaccattgacattcgataggtgcctttgtaatttaggagcatttgttagccttatgcctctctttacaactaaaaggctagggatcatggaatacaagttctgaaacctagcttcactcttagctgatggttctgttgcacacccccatggtttaatagaagatcttcctgtcagaataggaaatgttgagacacctatagactttgtagtgttggataaggatgaagagggaaaggatcccctgatactaggaagacctttcttagcctcaacaggagaagtcatagatgtcaagaatggaaagataaatctgaaccacaaaaagacatcaagatgaaatttgacatcagcaaagcttcagggatatcaacaacaggatgtcagaattttgggatccaggatatggatgttgatgaagaaacataagctggaatcccatcaagatttaactatacttctcaactgagcaagctatagacaaattttgaccacaagaagagagcaatagaaaggttagctcagactaaagacccttcggaggatgactggcaggagatgagaaaaatatttaaatggaaaagtaaaatcatagaggggttgtcttcaagagtaatgaagctaaaagatcaactatgggcttttgaaaaaagagttaataagtattcaatgaacattgacccagataagatggccactacactagctatcaaagaggaaaatgagttcacaacataagagtttgcacgagatgatcagaaaagagtttatgttgaggaaagaaacttagaggatgagttgttgagagaggagggaatccatattccgacttattctccaggagtgcctaaactgccccgtaaaccctctgctaaggaagaacacttgacacttgactctattactagagaacttctggaactcaggatagagtaccaagcttaagaggataccattgggaagttaacctacaagatgaaagaactgaaccatgcaatcttggaacttcaagaaatggttaaaagttaccccggttttgaaattgagcattggtcaaaagaacctggttcagaagaagaagactactctactgatcataaagaagtttattttgaagaaaaatcaaatgagtactcatcattacatatgtcaagagaggatggagtgtatggttcaagcattgaagattcaaccactaaagatgaggacttctcagttcctcctttcaacctttttttgactaagctttgtaagagtcaagcttagtgacttaaaacaagctcacttgggaggaagtcacatgtttacctatgtatataactttctatttccttgttatttttgatgttttcgtttaagtgtgtcaggtttatttcattgactctgaggaagtcaatggtcgagtaaattcaaaccaagtcacgaacaatctcaaccaatgatcgagtaaaatgaagaggagtgttctcagccattggattgaatgaccaaatgagagaaatcatccccaccgtttgatcgagtgatcaaaagcaaagcattctccatcgtttgatcgagtattgtgcatttcaaaaggatgctcgaccatttactcgagcttaaattatttggagaccaaggcataagtcgcgtgaccccacttgttccccctttatttcactactcgatggacaaaccatttacccatgccccgcattatttacaactcgcttttctatcccttcaaaaagaaacaaaaaaccatcctcctccactcattgaaatcgcaaaaccatccttaaaacagtctctctctttcatcctctcatttcgacattcctttctatctcgcaccaaacttcgttacaaactctccctttcactcctaaagaattcgttctcatcttcaccatacctcaccaaagttactcgatcattcccaaatccatcctcaaatattcaaccggtttttaagctcaaaactccatcaccaaataacaaaatcctttccactttgatacctcttggagagttgttcttgattttcctgtagaagctcaccaccaaaatccatggattcaagaagaaagagttcatctcgggctagaagatcctctatttataacaaagaagttgcggcgattgacatgagtggcatgactaaacgccaaattcgccaagctctccatgctcaaaggtcaagctcgattcaaggggggagctctagtcgctaaaccatg

SEQ ID NO: 10461 - DNA, 3000 bp, Unknown
  misc_feature (1)..( 3000): cDNA_ID_3036566_gDNA_ID_2213651_Annot_ID_181620 3000 nt of promoter + ATG
ttgttcaatccttcatctccattccctctcaatctgaagtttcatcaagtgctaaccaacgactttaaggatcctcttcatgaaaatcgacgatggaagaagagcggcattatgatcccgcctccaaggagcggtgattcccgacacttcttcaaatcgtcatctctgctgcgcctatttatcgaacccttccttttgctattgttttttagcatcttcagagatctccctattgaatttacaagattgcagaagaagggcattatgatcccgcatcaaacgagcggtgattacccaaccttctccaaactctgttcttcgatcctaatggtttttgaactcaagagcatacccgaatttatctatatctatcaggatattcaaccctttgtcccaatgtcctcgctgcgttttgcgtcgacgaacacagaggtacaggactctttctcaacgtcattttatcattgtttgatagtgactatctcataattctccgacttgttcgtggacgtgtctttgacacactttgaagtcgtttgtggtatgtggcttgtttgcctctgtctccgactctcatcggcctatccaatctacttatcgacctatgtagctagattatgtttttctaagatctttgtaacccttttcatccttgcagactttgtaaacttgcccttttggaatatgattgaatgaatacatgtcttgtttgacaaaaaaaaaaaaaaaaaatctataaatttatgaatatatattatgtaaaacttagtaaaatatgattttagtattgtttttcttcaatttatattaattttttgtaaaattcaattctaatacttttactacgtataaatgtttttttttttttttttctaaacctaataatggttatctacttgtaatagatttttagaaaaattattgattgtatagagaaactaccttttagatcaaatttttgtaaacaattacaaactttgtaaaatctctccataaattaataattaataatttatcgataaattaatacctctctaaattaataaattttcttggtcccgacattattaatttatagaggttttactgtatttgtaaaatctctctataaattaataatgttgggaccatgagattttattaatttatagatattaatttatagaaatatttaatcaaaatacaacactatattctttcagaatataataaaagtcaatagcatactcgattatccgggtgaaaatgaagcatactcaaagagttttgagaagaaattgtgatttctgtctataatgttggtgaataaattgaagacgataatgtgaaacttttggaaatagtgacacgtaaggaagcaattatcgcgcctagaactcttcacaactttttgatacatatcgagaagacaacaccagaagtttttgatgcaacaaagaaaattagagatggactttaacaagattcaaattttaagaaaagacaaacaacgctagattcatattatattaaattatcttaaagtatgcttaaaatttgtggttattaatttatgatattattgggaccatattgttacatagagatttcaaaaaaaaatattatcttattatcttatcgatatttttggttaatttttacattgacccgacttgggaccggcataatttattaatttatcgtgtttattaattgatcgagtattaatttatagtgtttctactgtataagccctaatgtctttattgaaccgggataaaccggtccgtttgggtcactcaattcacatgttttggatggttatctgtcgttttctatccggttttatctagatcactatgtttgttgacggtactactctcaagccattatctcatagacacaaaatcaataacttaaacaaatcataagataactcactagattgttttatttactcttgaagaagaaacataaacaaaattgggaatgtacttttcaatatcatctacacatatctcctcaaatacaagtgaacctaaaccactatgctaactgaactatttaagtgattttaccaagggaaaccaattatatacactctaatactccccctcaagatccttttatcttggatttgaaaactccatgaaaattgggaaaggtttaaaccataaaatcaactgaaatcacaatgtcctctggcggtcttgttagtgatctaaagacaaatgtgcttcaatgaccagaatcatctacatgcttttgccttaagactaacaagactaccatcaccatgtagcaacaaaaataatctacaacttttgattccaataaagaataacttcaacagatttggcttcttcattgtataacaaatggacatcttcatacacttgtgcatgaaatagtcaacataatgaggtatatatgtgaatctaagaagcacggggacggctaaaaggtgacgtatcccgtatcggaaacgttttagatcggggacgtttctcaaacttggggacgatagcagcttttggggacggcgccgaaccgtttgagggacgtttcagaaatgtttctaccccaaaaaagaaaatataacttttttttcttctataaattataaaagaaaaggaaaatatattcttaaactttgtgtaattagggtttaagaaacgtttaatctcccttaatatacaagagcccgttgttttttttttcatctaaactaaatcttctcgacttctctcctttcacaccctctggaaagtagatttctataaaaggtatatcatgactcatctctaagtttttaatatgattaaaatctctttttaatacaagttattagtcgagtacggttggttgactaacaaatagcgacgtgatgcttaagagattaagaaatttgtttaatctttgtttgacaaatagctttggttggactgtttcatatcggtcgaatacagattatggaatcgtcttaataatttgcttttcatattgcttgcagccgatatc

SEQ ID NO: 10462 - DNA, 3000 bp, Unknown
  misc_feature (1)..( 3000): cDNA_ID_3036603_gDNA_ID_2213651_Annot_ID_181609 3000 nt of promoter + ATG
aaccctcctactcgatccactactcgattcatttactcgaccaagggtgaccatctttacaagacttgttgagctatcaaagcgtctttggatcctcctcattccccactcaaccagacatctgagcatacggataggagaggatgaagcttctacttgaccaattgatcactcggagcatagacacaaaggcgcagactttgcagcaccctctttactcaatccccaaggtcgagtattcgccaaaaccgcctcaagtctcttgtcttctaatgaatctagattttccaacattttagtataaatagatcactttgggatttgtccaaaggatctatgctttatctttcagtttttctttgtgtttatgaatcttgaaaccttaattactcttaatctatttcgtttttgcatttgattgtttaagtaaagttgtttagcttgtttagatctacattttggtatgattttagtaatttctgggtttgtgttcttgagaatgttgcttgagtagtgattagggttcttgaggatggattagattaggataatctctaggttagttagctggttagtgtttaggtttatacccttctggattcgcttggcccctatgcggttttcgctggctaatgtggagattcgatcatagacgtccagcgtccaaaagacgttcaaatggatgtctgacctacgaattccagagatatgtaaactcgaccaagggattggcttgtctgcctattggctttggtagattatttcttaaaccctgctctgctatgtttcatcaacgagagttgagattaggaagtggtagagttatggggatctctgtcacgagagtggattgacccggtttttgaatctatcgtcatgggtatctacctttcgcctattagccatttgatgaaccctagagttgcccttatcaatgaatccatcattagaacttctataagattgatttgtatcccctattgattacacttttatttacctgttatttgtatcctccatttacatcccctgttgattgcattttagttcttaattttgtcacatgttggttctactcgacccaatgatcgagtagggctgttaagttcttatttttacttgtttgaatcctgacctaggagtgttactagaaacccaccatctttataatctggcttgacttagttgtttttgtacacatcttgattgctagcaatacaatggactggattgacaccctctatgactgcatcgacatgtttgtgttttagaggaattgaactgaactcaaacagcattcagcatataagtaggcgtaaaaatctgcttatcagaagtacacaacaatttgcagcaacaaaatatctctactcgccactctcgttattctaaacctttcagatatctacaagttccataatattaagattatcaaaatctatgattaaacatcgctatggcaggtcgataccaaacaggcagagattcctaatcgacttctatgtcatctttcccatcccagtggcggttaagtcgctgcataaacattgttcccaagccgtggttaaggcagaggctattcaattgaaaaatatcgtttcaagagatttttgggatgggagagagagcgttgaacaggaatatcaaccaattcaaggatcatacctgactcggagattccgaatcgacttttcaaaataattccttggtcagaagaattaactgccatcaacatcgatattgtgagataatttcagtcggcgaaggtagctccctttctcatctgtaaatatcaactgtcgttttattagaaaccaaatcaaaacaaaactatgctaactggttaagcaattgatggtttagattgaaaaggatataattgtctatttattctccacgaaacaagaaaaagtgtctcatccctcagaagtgcctcaaaaggaataaaagtgcatagaaatgcctaaacgtgtcacattccctatattatattttggaacgtgattttgtggaagatgggtttgaatcaatatttataaaaaattaaaataatcttaacatgccactttaatacaagttaaattttcaatttattaacaattattttgtagactcgtgatatatcattatttaatttaataacaatcgtaaactattttttttttgtcgttaacaatcgtaaactataatagatacaattttaaaacttttatatatggtaactttaaaatataaattattccgcggtaaaatctagttttcaataattatttgccgactatcaatcattgtggtttgtggtctggttcaaccgccggtttgcttcgaatttacaaaaactattttcaatttgattttttgatatatatatattttttttttccattcccatcatctaacagagaaaacaacacgaactttcctgagacggaaaacaaaaaaacagaacacgaattttcaaagttttccacacgatgtcttccataagatcgttaccacgtccctaactcttctccttcagacaaaagtactttagttattcttctttcttttgccatacttctctgaaaacagaataaatcttttgtattcggtcaaactgattcaaatactgtacagtcaagtcaaagctacaagatcgtgttccaggttttggtcttctcttccttaactctcctgggttttctctaaattggtctcttctacaaaagttcgaatcaaaaaattttctgttttgatttcgcttaattgatttctcgttttctttcttttcttggaaaccttttaattccgaaattgagagttttttttagggtttaggaaatctcttactggatctttgctatagtattgaaatggaaccctaatgttggaagctttctaaagctgagtttttgtttctacaggtttagagaaaatcttctgaactcaaaagattctcataactgagtttataaatggataattgaagttgtgtattttgttgataaaaccaaaacc

SEQ ID NO: 10463 - DNA, 3000 bp, Unknown
  misc_feature (1)..( 3000): cDNA_ID_3036603_gDNA_ID_2213651_Annot_ID_132465 3000 nt of promoter + ATG
ctgctctgctatgtttcatcaacgagagttgagattaggaagtggtagagttatggggatctctgtcacgagagtggattgacccggtttttgaatctatcgtcatgggtatctacctttcgcctattagccatttgatgaaccctagagttgcccttatcaatgaatccatcattagaacttctataagattgatttgtatcccctattgattacacttttatttacctgttatttgtatcctccatttacatcccctgttgattgcattttagttcttaattttgtcacatgttggttctactcgacccaatgatcgagtagggctgttaagttcttatttttacttgtttgaatcctgacctaggagtgttactagaaacccaccatctttataatctggcttgacttagttgtttttgtacacatcttgattgctagcaatacaatggactggattgacaccctctatgactgcatcgacatgtttgtgttttagaggaattgaactgaactcaaacagcattcagcatataagtaggcgtaaaaatctgcttatcagaagtacacaacaatttgcagcaacaaaatatctctactcgccactctcgttattctaaacctttcagatatctacaagttccataatattaagattatcaaaatctatgattaaacatcgctatggcaggtcgataccaaacaggcagagattcctaatcgacttctatgtcatctttcccatcccagtggcggttaagtcgctgcataaacattgttcccaagccgtggttaaggcagaggctattcaattgaaaaatatcgtttcaagagatttttgggatgggagagagagcgttgaacaggaatatcaaccaattcaaggatcatacctgactcggagattccgaatcgacttttcaaaataattccttggtcagaagaattaactgccatcaacatcgatattgtgagataatttcagtcggcgaaggtagctccctttctcatctgtaaatatcaactgtcgttttattagaaaccaaatcaaaacaaaactatgctaactggttaagcaattgatggtttagattgaaaaggatataattgtctatttattctccacgaaacaagaaaaagtgtctcatccctcagaagtgcctcaaaaggaataaaagtgcatagaaatgcctaaacgtgtcacattccctatattatattttggaacgtgattttgtggaagatgggtttgaatcaatatttataaaaaattaaaataatcttaacatgccactttaatacaagttaaattttcaatttattaacaattattttgtagactcgtgatatatcattatttaatttaataacaatcgtaaactattttttttttgtcgttaacaatcgtaaactataatagatacaattttaaaacttttatatatggtaactttaaaatataaattattccgcggtaaaatctagttttcaataattatttgccgactatcaatcattgtggtttgtggtctggttcaaccgccggtttgcttcgaatttacaaaaactattttcaatttgattttttgatatatatatattttttttttccattcccatcatctaacagagaaaacaacacgaactttcctgagacggaaaacaaaaaaacagaacacgaattttcaaagttttccacacgatgtcttccataagatcgttaccacgtccctaactcttctccttcagacaaaagtactttagttattcttctttcttttgccatacttctctgaaaacagaataaatcttttgtattcggtcaaactgattcaaatactgtacagtcaagtcaaagctacaagatcgtgttccaggttttggtcttctcttccttaactctcctgggttttctctaaattggtctcttctacaaaagttcgaatcaaaaaattttctgttttgatttcgcttaattgatttctcgttttctttcttttcttggaaaccttttaattccgaaattgagagttttttttagggtttaggaaatctcttactggatctttgctatagtattgaaatggaaccctaatgttggaagctttctaaagctgagtttttgtttctacaggtttagagaaaatcttctgaactcaaaagattctcataactgagtttataaatggataattgaagttgtgtattttgttgataaaaccaaaaccatgggtggagatgatttgagcttcacaagattggtgattactgctttgtttggtctgttaatgttgttacaaatcaaggaaacttctgcatcaacatcctttgtaagctcgagtgtttgtaagtctgatcacttgacctacacaaagccttatcaacaagggagtttgttcacaattaacggtaatccggtggagaaactccggttttgcgaagctttacggtttcacaaagccaatggttgtatctttgaggattcttttagtgatgacttctgcacaattcactctctactaggtttgctctatttaaagatttttttgtgctcctttgattatatatagtaaccgaatttggttaattgtgacattgtttaatgtagggagaaggtttttggaagaaaaaactgtaaaagattccaaaaatagtaagcctaaaactgaatatagccatgttaaagttagcatagcaggaagtgggtttcttctcttgtgttgcgctctttgttgtccttgctttcataaagagaggaaagcaaatagtcatgaagttctacctaaagaatctaactcaggtcacttagtgtctctcacatttatctttcttttgtagctatgaaataataacatttgacattgaagcttatatatttctatcacagtgcaccaagtttcttcttttgaaatgagcccttcttctgagaagattccacaaagtccattccgagcaccaccaagtccatcccgcgtaccgcagagtccatctagatatgct

SEQ ID NO: 10464 - DNA, 3000 bp, Unknown
  misc_feature (1)..( 3000): cDNA_ID_2703600_gDNA_ID_2213652_Annot_ID_132473 3000 nt of promoter + ATG
gtggttttcttgagtgtgtatgtatgtatatatatacatatatcaataacatatatatatatatatatatatatatatattccatcttttgtatgaaacttatctaatgaattttccataactgaaaagtttacaataatttggtcaacacgttttattatttattatatctttctgtttttaaaacaacaaaagatggaaagtatctcatacatttaaatgattatttttattcaaacctaaaaaaatatattcaaaatatcaataaataatacaagaagttttttaaattatccaattaaagtcaaaattgtattttgcttgctaaattagtataaagtcttttaggaaggaattcaaaaagaaatgcaagtttgaccatttgactcaaagtgcctgcttaaggttcaaaggcccaaattttttttatacatgttaaggctttttttttaatacctattagagatttttgatataatagcattgggtctaggcaatgtttgggtcggacctgactcaaaccaaacaatatcatactgatatgaaagttggtttgggcttggaaaacctaacatttcttttattttcttacaaacaaaattgtacaaaggacccaaaaaaaagacaatgccatatctaggcctaatactccgagcgagtgaccgagcgagagtcatatagttgtatcgaaacgacgaaaaataaaaaccgtacatagatttttttcctttttattcaatgtatcttaaactaccaaataactcaaaataacttcaatcactcaaaataagattgaatgcaacatctttaattttggtatatagactcattgtgtagtctttctcattgagcttacgattgaacgtcaaatgttaatgttttagttgtacaattaatgtctattgtcgtaaaattaatgtttaattgtcttagctttataattttgttgaatggacataattaaaaccaaaatcaaaccacatgttctataatgaatacaacgcatgacatgacaaacttaggatgctatagtcccacatacacacaacatgaccgcatacggctattggccagtcatgagtctctaaagttgtttattaatcactcatgttaagcactattaaaagaaaactttaaacccaattcagtgtcattcttcttaggctttacacttcttgttttaaaggggagagttatagactcatatcttccaaacctgtaatccgacctgcacatatatagatagctcaaattacatatttgatattagttctggtattcataaatgcataaaacatagatataaatataaaaaatgttgacaaatacacaagaataggagtagcagagaagacacaattttgaaacgaaaaattcatatgaataccgaagattatcaacaagcacaacacaaatatcaacatggcagattggacaagttttgagtttctttgttattaacttgtatcaacaagcacaacacaaagatcaacattgcagattggacaagttttgagtttctttgttattaacttgttatgtatgcagttgctgcatattgttttcagaaatatttcaatcaatatatattttcagctataaaatcaatgatagtcctaaaaatcatgaaggtacaagatatgacaacgtttttcttaagccaaattaaatgtccaaagaaacattaagattgatagattccttaacaaaaagttcagaatttttcaaaactcaacaattctaatacaacaaaacgaatgattgtattaggcttgaaaaagcttttaagtgttgaaaagttttgaactcttagggaagaaacatgttaaaactcttaatgtttagacatttagcttaagcaaaacattgccatatattgtgccttcatgaatttaagactatttctaattctataattgaaatttataacaggattgcttgttatattacagtatctattggagagagatattatttatatgtgactgaagaatcacatccatacaaaatgtattatgtcttcttcctgcaaaaacaaaccatgtgactgagaattcctctgcagcttgtctttctgctaacacatcaagcagccacgtgagtcgtgaggttatctgcttctacagcaatctgtttggtatcagtctcaggtttctctccctcagaagcttgtttaaacagagacagaaccgaatccaagcaggtttggcaagaggaatagattgtatcattgaagttatcagctacattggctccattctgttccctaagaagcttcaggacaatagatttcatctcacgtcgacttttctcctctttgcttcttaaaacaagctcaatgatgcgtgatagcgtctcctttggtggatccacagcattagacgcaactcgtttaagaacaggcgtgacaccaactccttaaatcaatttaagttttattaaattttagatgatgtgttataattttttttaactcttacttaaaatcatgcgatttgaatctttttatttttcacttagtaaataatctaaaatctctttatcatgaaaattcaattgttattgtaaagtgttccaactcaaatcactaaattgttcaaacaattcagtactacattcataaaaatgtaatctcatgtcactataatgtgatttataactatttatggatgtctacttaactgttgaaaaacttcataaataaaggtaatatagttatagtgtcactaactaatgctatttttttttttttttttgaaatttgtagaatatatactaaaattgtccacaaacttatttattttttgtcgggtccacaaacttatttaatattaattttctaaattacaacaaaactaatgaataaaaaataccaaagaaacagaaaaaattgcaagctccactaagaattgaccgtctcaaacaaaactcgagggattttttttttatatggcgaattcactcattctgggctcaccgattaatccagaaggagaaatg

SEQ ID NO: 10465 - DNA, 3000 bp, Unknown
  misc_feature (1)..( 3000): cDNA_ID_2715718_gDNA_ID_2213652_Annot_ID_181630 3000 nt of promoter + ATG
tgacatcacaacaactaaatccaaccataaccagcatgagtagcttgcttcatagaggagaaacagtgggttatcagagaacatccttcatccttggaaagcttaacgaaacaggtttcccacaatctagccttgtgccctttgataccgcagaagaatgcgatgagcttctgaaaaaaggaccaaaaaatggtggtgtggctgcagctttcttgggaacaccttacgtgagactctttcttggacaatattgcaacacttataaaatggttgaagaacccttcaatgttgatggattcggctttgtgtttccaatcggatcacctctggtggccgatgtttcaagggccatcttaaaagtagcagagtctccaaaggcagtggagctcgagcacgcttggttcaagaagaaagaacaaagttgtcctgatccagttaccaatccagattcaaatccaactgttaccgctatacagctcggcgtaggcagtttctggtttttgtttcttgttgtgtttgttgtctgcgttctagcactcggaaaattcacattctgtttcctatggaagacaaaagggaaagatttgtggaaagagtttctaaaacgagacaccgactcgtacatcaacgacatagagaaatgcttgtgttctcaagagatgcctgaaaacagcaataaagcaacaaaccagacaaactacggtatggagttaagagttaggaatatcgtgcaagtaaaccaaacagacccagactgtctttaatttaaaaaaacatagaagggcgtctgtttttattaaaccaaactattgtactttattgtgtaaataacgattttcagaaataggtgatccatataatgtataagagactatcaagttactatagtggttgattttcgttacgtgttatgcaagacagtaaacctaaggctatgggttcttacatgtggggaaaatggtattttcatacttgtactatatgctgagtatatttttcaacctgaactataaaaaaatttgaattacatatccaaacttagtatttggtgttaatttcagaatcataattaatgggttgtatttggtgtttgttgaacgaagaagcgcctgttgaagatgttgtaaacccacccgctgatgatattcatcaagacccaagggaacaactataatgtttgaatgtctcaagactctttaatttaactaacaaagaggcgtgtgtttttatcaaacaaaactactgtagtgttttctttttcatttgttcgaaaactaatgttgtttatttagttatttttaaaatcaatttttcgtaaacgatgaaagcaacaattttcatgtaaggactatccacattcttatatatcaggaggttgattatgttacttgttcccccaagacagtaaacctagggctaggatttctcgcattttctaaagatttatagtaagcatattgacttatcttcgatatagagtacaaaaaatattaacctaaacaaaaaatgtggtgcgtttttatacaccaacaaaagttttaaataatttccataaatttccaggctttagccggaatcaacattgatcacaataatgttactcaacaactgttagtttatgttgagtaagatgacatgtgtggaatttcaattgagtcggatgccatatgtctcgtttgtgctgagttggatgtcacctatcacaataaaaagaattgagagaaaattatttgtcttagttcaaatgcttttctgcaaaaacgaattgttatcttttacaactttaacctcaagtttcagaaaatacatacaattaattttgcaaaagtcgaaactaagacacaatataactattatcttcgaactgttttttcaatcacatataaatatacaatagattaataacattcttttttctttcaacaaacactatttatattaacttatcgggaagaaattctccgctagaaagagtcattcaggaactgatgtgcatacatgggagaaaatattatttcgagcccgagtttttttagctaaacaatctgctcgagtattaaaagtacgaggaagatatctataattaataacattctaagagttgatttgaactctgagggcgagggttttgaaatggtcattgatattctccttagtccttgcgtattgaggaagaggcattgaaaatcaaatcagcacgaaaagcgtggtccagactatgatatcagatagtgactacattgagtttgataactgcacaaagtggctcggtgtcgaactgtaaaagctgttgacatgttctttgttttacttttcttttcctctgtttctgagatcaatcaaagtcacaagattttttacttcgtttttgttacttaatcagtcaacgttttattacactcctgattgtgttttaccatgattattttcatgttaaatttattaattgcccagtctttggattacttctaagtcctaacataactctccgactgaataataatttattgctcgactttcatagaaatgaaaatgtcataactttagatacacaatacaagtaaactatagttgcaataagaaaattacaagtaaattgtagaaagataataaagtttatttttctgttactttcaatcaagctgtactgtattttatgtttatttttttgtgtcaagtgtatacaaaacattattttcttgcaatatataatgctaagtcctttcctacaaaacacgaaaccttctttatttttgattaaactacatgcacacgatggcacaaaaccatctaaatacagaaatatctgtattaaacattgccgcgaactttgaaatcgtatttgcttcttatcttcacaatgtttcattgcttattaggatgagatattaaaaaattcagcaactatctaaaattttgctatatatgtgtgcattatttaaaccaataagcatcatctatcacttatcacctaaaagaagaaagaaaaatctccaaatg

SEQ ID NO: 10466 - DNA, 3000 bp, Unknown
  misc_feature (1)..( 3000): cDNA_ID_3036654_gDNA_ID_2213652_Annot_ID_181632 3000 nt of promoter + ATG
tacctcctcatgcaccgccacaaaccctttggctattagataacttcaacattgaggactcttatgaccgagatgccggtcctagtactagtccaatagaccgagaagcatctcatgaagtcaatgaagacgcccacgcaacatcagcacctcctcatgtaatggtctcaccactacaaaacagaagaccatttgatcaattcaacaaccaaccttatgatgcgagtgctggtcctagtactggtccaggaaagcgaggacgtggccgaccaaagggttcgaaaaatgggtcgagaaagccaaaaaagccaaaagcatatgacaacaactctactgatgcgagtgctggtcctagttctggtctaggaaaacgaagatgtggccgaccaaagggtttaaaaaacaggtcgagaaagccaaagaagccaaaagcagatgatcctaatagcaaaatggttatctcttgtccggattttgattcaaggataaccgaagcagagagagaaagcggaaaccaggagatagttgattcgattttgatgcggtttgacgcggttagacggcggttatgccaactaaactaccggaaagacaagatccttacagcgtcaactaattgcatgaatttgggggtccggacaaacatgacgaggagaattggacccattcccggagtacaagtaggtgatatattctattactggtgtgaaatgtgtttagtcgggcttcacagaaacacggctggaggcattgatagtctattggctaaagagagtggagtggatggtcctgctgctacgagtgtggtaacatcaggaaagtacgacaatgaaaccgaggatcttgaaacgttgatctatagcggacatggtggtaaaccatgtgatcaagttttacaaagaggaaaccgtgcactagaagcaagtgtaagaagaaggaatgaagtaagagtcataagaggggagctctataataatgagaaggtatatatctatgatggactttatctggtctctgattgctggcaagtgacaggaaaatccggtttcaaggagtataggttcaaactgctgaggaaaccaggccaacctcctggttatgcaatctggaaattagttgaaaatttgaggaatcatgaattgattgatccaagacaaggttttatacttggagatctttcttttggagaagagggtttacgagttccgctcgttaatgaagtcgatgaagaagacaaaacgattcctgacgattttgactacattagatctcagtgttactcaggtatgacgaatgatgttaatgttgatagtcaatcacttgttcagtcatacattcatcaaaactgcacatgcattctaaaaaactgtggtcagttaccataccatgacaacattttggtttgtcgtaaaccattgatttacgagtgtggtggatcttgtccaacccgaatggttgaaaccggtttgaagctccacttggaagtgtttaagacatcaaactgtggttggggtttacgttcttgggatccaatccgagctggaacttttatctgcgagtttactggtgtgagcaagacgaaagaagaagtagaagaagatgacgactacttgttcgatacatctcggatttatcatagcttcagatggaactatgaaccggagcttttgtgtgaagatgcttgcgaacaagtctctgaagatgctaatcttccaacgcaagtcttgataagcgccaaggagaaaggaaatgttggtcggttcatgaaccacaactgttggcctaatgttttctggcagcctatagagtatgatgataacaacggtcacatatatgttcgcattggactttttgcgatgaagcacattcctccaatgacagagttaacatatgactatggaatttcttgtgtggagaagactggagaagacgaagtaatttataaaggaaagaagatttgtctctgtggttcagtcaaatgtcgtggctcttttggctgatttggacttttttataatttgtgttttcgtttgtttgcttttttagcttctttgtttcttttgtttagttgacaaaaaaaaaaaaaaaaaaaaaatgtttcttttgtttttgttggactttatatcatttgtgtttttattttattttagcttccgtggtgtttgtttttgtttttgttgttgtatttttgtttcttaaaacattaataaagttgtagaactttgaatcatacttttcagttgggcttacattatattataagacctaaatcatagctaaattaaaccgatagattcggtagagaggaacaattcactctatctaccaaataacaacactacatagatcaaagttccagaagctttaagtgatactcatctattatgtaattgagtaaattaaacaatcaccttcaatgaagcaaatgagaatacagtaaatagtataaaaaaaagagagaaatatttaagctttagtaaacagtaaacaaacatgaacagagaaaattaactattaagaacaagatttgccaacagatatttgattgaaagaactgaaatcaattccaaaattcgaaaagcaaatatattatttcaatttcgtaccaaaaagggaaagaagattacaagtttagaaccctaaaagtgacagagacacaaaaggttttctagctcgaagtgagggagagcttctggcttgaaatggagggtttcatgtgcttaaggttttaaaatcaacggtatcgttgtagttaaccaagttggatagaaattgtcaaagaagaaagaatttgtgtcttctttcatttaacaatatgtgccaataaagtattgataatgaagcacaatccccaacaaaaaggttacagtagacttgcactacactagccatatcaaaaatggttctacttgtattatgctgaaaaataatacctgaagctgacttcatctcgtgtgtggctcaactttggctccaaggcattaataagagataaacatg

SEQ ID NO: 10467 - DNA, 3000 bp, Unknown; identical to SEQ ID NO: 10465
  misc_feature (1)..( 3000): cDNA_ID_2715718_gDNA_ID_2213652_Annot_ID_132475 3000 nt of promoter + ATG

SEQ ID NO: 10468 - DNA, 3000 bp, Unknown
  misc_feature (1)..( 3000): cDNA_ID_2715777_gDNA_ID_2213653_Annot_ID_132478 3000 nt of promoter + ATG
ttagagtgatttggatgattcaagacttctcggtactgcaaagttcttccgcctgattaattatccattttacctttgtcgtagatattaggtaatctgtaagtcaactcatatacaactcataatttaaaataaaattatgatcgacacacgtttacacataaaatctgtaaatcaactcatatacccgttattcccacaatcatatgctttctaaaagcaaaagtatatgtcaacaattggttataaattattagaagttttccacttatgacttaagaacttgtgaagcagaaagtggcaacaccccccacctcccccccccccccccaccccccaaattgagaagtcaattttatataatttaatcaaataaataagtttatggttaagagttttttactctctttatttttctttttctttttgagacatactgaaaaaagttgtaattattaatgatagttctgtgattcctccatgaatcacatctgcttgatttttctttcataaatttataagtaatacattcttataaaatggtcagagaaacaccaaagatcccgagatttcttctcacttactttttttctatctatctagattatataaatgagatgttgaattagaggaacctttgattcaatgatcatagaaaaattaggtaaagagtcagtgtcgttatgttatggaagatgtgaatgaagtttgacttctcattgtatatgagtaaaatcttttcttacaagggaagtccccaattggtcaacatgtgaaagcacgtgtcatgttcttacttttgtttgggtaatcttctaattactgtatatggaagatgtgaatgaagttttggtcctgaatgtggccaaggttccgtcatttggagatacgaaatcaaatctcctttaagattttgtttttataatgtgttcttccatccacatctatctccatatgatatggaccatatcatacatcatcatttgtccaaatgcatgaatgaatttggaaataggtacgagaatgccaacaatgacaagaagggatcaaagacagtttttaaaacaatattttacagggttttaatctaattctaagttttggtcactcactttgttaaaagaataattcagtgtctggacactaaaatcttccaaaaaccccatatacatatatgctatttcgatacttatatttatttactcagcataaaaaatattaaccatgtattcatagtaaaatgtttcatgtgatatcaaaccagcgacaacaaaagtattattcccctcattatgtttgactcctattatatttttattttaatttttttcactatcatctttcttgcaatgaaagtcccatatattggtcaacatttcaaaccacttgttctcttttatgttttggtaagagctatcttctaaatttataatacgcataaattcaaaagtaaaagaaaattttggtcatgaatgttgtttaagtcatttggagatacgaaatcaaatctccttgtagattttgtttttagaatgtcgttcctttttcatcatcttagctatatctacagctatatatcctatctttaaacctatattattttttcctctcttcaccaaagccatgttttttagttgtggcgaaaaataagaaatccatacatcaacatatcgctttcgttaccttaaattttggcttgttatgaaggcatgtcataacgtttctagtcacaactcacaagcataccaacgaccatgataaatccaaaaagtagaaacaatctattatctaaacccccaaaagacaaaagaaaaaagtagaaagaaaaggtaggcagagatataatgctggttttatttgtttgttaaaagatattgctatttctgccaatattaaaacttcacttaggaagacttgaacctaccacacgttagtgactaatgagagccactagataattgcatgcatcccacactagtactaattttctagggatattagagttttctaatcacctacttcctactatgtgtatgttatctactggcgtggatgcttttaaagatgttacgttattattttgttcggtttggaaaacggctcaatcgttatgagttcgtaagacacatacattgttccatgataaaatgcaaccccacgaaccatttgcgacaagcaaaacaacatggtcaaaattaaaagctaacaattagccagcgattcaaaaagtcaaccttctagatggatttaacaacatatcgataggattcaagattaaaaataagcacactcttattaatgttaaaaaacgaatgagatgaaaatatttggcgtgttcacacacataatctagaagacagattcgagttgctctcctttgttttgctttgggagggacccattattaccgcccagcagcttcccagccttcctttataaggcttaatttatatttatttaaattttatatgttcttctattataatactaaaaggggaatacaaatttctacagaggatgatattcaatccacggttcacccaaaccgattttataaaatttattattaaatcttttttaattgttaaattggtttaaatctgaactctgtttacttacattgattaaaattctaaaccatcataagtaaaaaataatatgattaagactaataaatcttaatagttaatactactcggtttactacatgaaatttcataccatcaattgttttaataatctttaaaattgttaggaccggtaaaaccataccaattaaaccggagatccatattaatttaattaagaaaataaaaataaaaggaataaattgtcttatttaaacgctgacttcactgtcttcctccctccaaattattagatataccaaaccagagaaaacaaatacataatcggagaaatacagattacagagagcgagagagatcgacggcgaagctctttacccggaaaccattgaaatcggacggtttagtgaaa

SEQ ID NO: 10469 - DNA, 3000 bp, Unknown
  misc_feature (1)..( 3000): cDNA_ID_2715765_gDNA_ID_2213653_Annot_ID_132481 3000 nt of promoter + ATG
tatatatatatattttttaagtatagaaaatagaaatatgacgtgctaaattgagctatggacaaaatcatatatgagaaaatgaatgtagatggatagagtcgtcccacacttaaggttggtccacaatgaataccgttggaggcttcgcaggcttttgttctgtccttgtctctctctcccctaaaaaaaatttgttacgaaaaattcatttgaattaattttggtcggtatgtgtataatattatacaattataatatatttctaggtttagacatttttttattttatttttcatgaagtaaagaacacaaacaaaaacccataaaataatgtaagatagataaaacaagaggatgtcgtcataaataaattggaatttggcatttaatgaaaaagggtgaaaggtgcttgacatacacgcgccgtagtttcttacccggaaagggattggtattgatgttaactagaccgggcccggtttaggctggggcggcggccgaaccgaccacctggctactattcttgtttgtattcgctgattctgcaaatctaaactcggatcttttatggacttggattttcgggtgggtggggttctgctaaagagacggcgctcttgtcattttaagtcggtcactgcaaaacgtgaaccctgtgactgtatttagagtctcgttacgttggatctctctccatgaaccgtccaaagtaggtcaatttttgtgggttcactcacgtatacaacgaagtacggcgctatttaattttccgaaaattttgaaagagacttttataccagaaaagtttgtaatccaaatttttaatatattgcagatttggttcgttttgggcttaaagagcttttattggtgtggtggctcaaatcgtttttgtaggcgtcaggtcaggcccattttcaatgtcgcttgctcatttgatacgctaatatagggctttgcttaagatttgaatgggccgtacccccattttgcttcatgagaatgggatggtaataaagaaaaaaatgacaggaaacaatgaattggtcacgaaaaaatgttgtattactttttccaaaatgcacctttgagaatcttaagattcaatcatacagtgaggtccatgtccacaataagaaatcaaataccaaacaaagtataaacgtgaattgtaagctaggcagtgtatgaagatgcatttgtcttaaagttacgaatctgataaataatattattcgatcgactttagatcgctttccatgcagatttatgcaattatctggaagaagaacaaaacaatatcttagtttcttcggcctcactattcgacttctatcttcaatatattttcgcgtatttttttatttgaattatttggtttttggttagttaactaaacgagcaacagaaccaagatcgaattgcgtttgccgtttggattcaattattgtagaaaattcgacttttcagacatttgttacgttctttctagtagttatattagttattatatgtggagtggaaagagatgaaagtagatgtaaaacataagtgatttcttcatagtgattttaaaactttttgttgattttcaaaattatataatatccataaaaaatagcctatgcgtgttggatgcttacaaagaagaatttgttttcggcgttagccaaaagtcgatggcatttgctaaaggtgttatttgagtggaaatgatctagaacaaaaacgcattgatataccaccactataatgatttggagacgtatctagttctcatcaacttttcaatagtaaacgcattatcaaggtaaacgaagagttttgctttatcagtgtaccatacacacattaatagattgatggacgttagtgactttggtattgactttaacgccaaatggacatcaattctgcaaggcaatgcctagtttcaaagcagcgttacttaacatttaactaaaggtagtgcaaactggttaatactttttaacggctttgcaggaagagtctcgactaaaaggagaggaagagatgagatcgacgaagattttcatatcataaaaagtaatataggtttttgaaaatagttagaataattatttttatttttatttttatgggaaagaagttgcacgagtcggtccacagaatgacagaacaaaagcattttagaagtttagaaccaaccaatcactatagttttccacttgtccgtatctcattggttcatcgaatattaacttacatggaaacagtaaaaagcgtggaataagtcgtaaaactgaaatctaaaaatgaaaagatttcgatttcgatataaatacttaatctttataaaataatatcgaaatcttttcatttttagttttcagttttacacttttacttgataaatttaatacatctgttaattttttttcttctaaaattaacatatgatatctattcgggagataaccctaagaaaactgataaaataaataagttactttttacaaagtcgaataaattatttacccttctgctttaatggcaattatcttaatattgcaaaaaaaaaaagagagaaatattactacaaaacagaagcaagcaagtggaaaacagaccagaagagagaggaagacgaagagagaaacagaacagagtagggatcgatagaccgtggaatctcagaatcacaaacactttgcaaaagggttttcaattcctatttatttacaaagaaatcatcaatagtagtggtctctagggttttgcttgctcttcttcgtgacccctttttacctgcaaacaacaacttcaaaattggcgtgtttcgtacggtctatctaaccctaatctgtcacaaaacactcttcttctctcacccctttttctgggtttattcaattctcgtgcttttggttctgttttcttctctggggatttggttttcttgagtgagtttttctcctctttcttatgttcttgatttgattattatatagaatt

SEQ ID NO: 10470 - DNA, 3000 bp, Unknown
  misc_feature (1)..( 3000): cDNA_ID_2715762_gDNA_ID_2213653_Annot_ID_132482 3000 nt of promoter + ATG
atgttttattttctggttagaaaacatcaactggaaaagaaaatcaagatgagaattgctcgggtgtttctactgtgaacaagtatcccttaccaacgaaagtaagtctaagaaagctacaaaattgtagtcgaagaatctgatgaatgctttcaagtgcatgacaaattatttgttccattctgatttttagcaggtaagtggcgacattgaaacaagtaagacctcaactgtggacaacgcggttcaagatgttcccaagaagaacaaagacaaagatggtaacgatggtactactgtgcacagcatgcaaaactacccttggcatttccacgcagatattgtgaacgggaatatagcaaaatgccctcaaaatcatccctcaggtatggtatctcaagacttcatgtttcatcctatgagagaagaaactcacgggcacgcaaatcttcaagctacaacagcatctgctactactacagcttctcatcaagcgtttccagcttgtcattcacaggatgattaccgttcgtttctccagatatcatctactttctccaatcttattatgtcaactctcctacagaatcctgcagctcatgctgcagctacattcgctgcttcggtctggccttatgcgagtgtcgggaattctggtgattcatcaaccccaatgagctcttctcctccaagtataactgccattgccgctgctacagtagctgctgcaactgcttggtgggcttctcatggacttcttcctgtatgcgctccagctccaataacatgtgttccattctcaactgttgcagttccaactccagcaatgactgaaatggataccgttgaaaatactcaaccgtttgagaaacaaaacacagctctgcaagatcaaaacttggcttcgaaatctccagcttcatcatctgatgattcagatgagactggagtaaccaagctaaatgccgactcaaaaaccaatgatgataaaattgaggaggttgttgttactgccgctgtgcatgactcaaacactgcccagaagaaaaatcttgtggaccgctcatcctgtggctcaaatacaccttcagggagtgacgcagaaactgatgcattagataaaatggagaaagataaagaggatgtgaaggagacagatgagaatcagccagatgttattgagttaaataaccgtaagattaaaatgagagacaacaacagcaacaacaatgcaactactgattcgtggaaggaagtctccgaagaggtaaaacaaaaaccaatgattcatggatattgcagagttcttctgggaactaacactatcaaaatattttcagggtcgtatagcgtttcaggctctctttgcaagagaaagattgcctcaaagcttttcgcctcctcaagtggcagagaatgtgaatagaaaacaaagtgacacgtcaatgccattggctcctaatttcaaaagccaggattcttgtgctgcagaccaagaaggagtagtaatgatcggtgttggaacatgcaagagtcttaaaacgagacagacaggatttaagccatacaagagatgttcaatggaagtgaaagagagccaagttgggaacataaacaatcaaagtgatgaaaaagtctgcaaaaggcttcgattggaaggagaagcttctacatgacagacttggaggtaaaaaaaaaacatccacatttttatcaatatctttaaatctagtgttagtagtttgcttctccaatctttatgaaagagacttttaattttccttccgaacatttctttggtcatgtcaggttctgtaccatattaccccatgtcttgtctcttgtctctgtttgtgtatgctacttgtggtctatatgtcatctgctactactgttaattaaccattaagcaatggatttgtctttattcttctttttaaaaattgtggatattgattgatgagatcataaatagtttataatgataaaagatgaactgtacaaaagttacaacttagaaagttttgtcttttggtgtttcttcataatgattctctctgtttgtttcaaacttgaaggcgctcgttgcccaacgccaaatgcccaaaggtgctaggctgggccttaaagattttactcacactacttgggcctacattacaacattttccctattacaagcttaagtaatagaggcctaaagaaggcttatattgtgtagctagtttatacaatatttcaatctcttaatttggtttactgatgaatgagtagatatacaatttttttgttctcactgaatgagccatatccttgctaccaaaccaaattatttgtgaaaaatgtaatgcaagtatcctacatagattataggagtgaccgcaaaaacacaaactatgtttcgtaataaaaaataaagtatttttaaaaagatgtaaatctttgtaaataattgagtggtagtgtagtgagtgttacgataatataaaagtttgatccgtatatctcggtggtgactcatatatacattttacaatcacttgctagaccaacgggcttcacttgtttctctcccaaagtttcttcatcatccttgcgataaagaaaacaacaatcggctgtttcgtttcgatccaaaggtacgtttttttttcttttgtcatcgttctaagatcatcaaagtttgatgcttttccatgtttaatcttctgggtattttgttgcttcaaatctcaatcatccatcgagtctatagagaaaaagtgaacagatttggtatacatcttttcagtaatcgatacgttaacaatatatgaatccataatttgggtatgatcgatctcaagtctgctttaaggattgttttcccttgtggggtcttgattcgctttttccatttaatactcttgattcgattgattctctctctgccaattagggttatgatgttagattcagtcaatatcaatgagtgatgaaacgttctgattttgacagatg

SEQ ID NO: 10471 - DNA, 3000 bp, Unknown; identical to SEQ ID NO: 10468
  misc_feature (1)..( 3000): cDNA_ID_2715777_gDNA_ID_2213653_Annot_ID_181641 3000 nt of promoter + ATG

SEQ ID NO: 10472 - DNA, 3000 bp, Unknown
  misc_feature (1)..( 3000): cDNA_ID_2994649_gDNA_ID_2213653_Annot_ID_132483 3000 nt of promoter + ATG
caaattaccttaagtatacgtaactgcatccactgagccctctttctaaagcttttcctgaaaaaatgtcttttcttagctatacgtcgcatttttataaactttgatggaatgatgcggaaaattattaaaaagcgactctattttgtaacgccaggaaagaaaaaaaacaaatactttctactatgattcatattctcaataacttgtttcaaaataatcattaaaattttactttttttaggactgaaaatgtgaagattctaaagaccaaagcaggaatgttgaaggtgattggaactttgatctgtataagtggagctttgttcttaacattttacaaaggcccacaaatatcaaactctcactctcactctcacggtggggcttcccacaacaacaacgatcaagacaaggccaataattggcttcttggatgtctttatttaaccataggaacagtgttgctatctctatggatgttgtttcaagggactttaagtattaagtacccttgcaaatactcgagcacttgtcttatgtcaattttcgcggcatttcaatgtgctctcttgagcctttacaagagcagagacgttaatgattggatcatagatgatagattcgttatcaccgtcatcatatacgctgtaagttacaaacatcatatctttataaattaactttttaaaaattataagattagtatgtaagaacttaagatattaatgtgggtttttttatgtggtttttttttatcatatattatagggagtggtaggacaagcaatgacgacggttgcaacaacatgggggattaaaaaattaggagctgtgttcgcatcggcgtttttcccacttactctcatttcggctactctatttgatttcctcattttacacactcctttataccttggaaggtatcttcttcgataatctctatcaaattaattttgtctaggcataacactaattacaacattaaaacttttggtctacagtgtgattggatcactagtgaccataacgggtctctacatgttcttgtgggggaagaacaaagaaacggaatcatcaactgcattgtcttcaggaatggataacgaagctcaatatactactcctaataaggataacgactctaagtcgcccgtttaatttaattatattgttgttaatgtatgtttcaaataactgttatgtcctagttaatgtttaaggagaggtaatgagagataaaattttataattccaaacatcaacgtagagatttgtgaaatatttaaatccggtttgtttggttattttggaataatttcggttatttcaattagattcgggtagttcagttcttcggttagtaacaaaaactggtctattgttttttggttaacctagaaccgaaccgaactaaccaaagttctcggtaaccttttgtagtggcttcctgaccgatgaggccgtcaacttcaaaaaatattgcaactaagctctgctccaacattagagtatctataactatgttaaacgcttctgctttaagcaaaacacagttgtaagctggaatctaaaaaaatgagtgtaatgatgtttgctgaattccataaataaatactacatgcttcggttaagacttaagagtaattaatgttccttaatttctacaaatgttatataagcaagttgaccaaagttctcgatgataatttgttgaaattttgtataggcattgcatgatattatatgaaaagatgaagatttttatacagacgcaagttccccgagcagtccaagcttgtcgggtttaattcaactatgttaatacgcaaatttatatagaataggcgtaaaagtgaggcccatacaatgtcttattacaagcccagatccagcatagccaatacgtagcagtacaccatcacagctggcaccgtacccacttgtttagtcgtccaagtttgtaccaataatcgtttacacgtaagcaattgtggaccaccacactcacttttacctacgtgagcttcacattgaagcttctggctcgtagagaagcaacttgagatataccaaaaagtgcagtagacagccactacaatatcaccacgtgtcgatctgcgatgacttctgttttttccatttatacccttggtgctgttccagcctcaaataaacttttcaattaaaatttttccaaaaattaggggaaaaattgttgtggctgagattgcttctggcttctcttcttcttcttccagtcttcttcagcctaaaacagtcttccttcttcttcttcttcttcttcttcttcttcttcttcagttatcttcttccttcttctctctgttttttaaatttatttttagagatttttttttgttttgcttccgatttgattatttccgggaacgatgacttctccggggagttcccggtgagatgataagtcagattgcatacttgtctcctccatggctactctcaagggtataacagtttacattatgagcagtttctaggattcctataacatactaagatctctgtttggctgctgagaaacttatagaagcgattaactaaatcttattagctctaaaagttagcataaatgatacgaatctggtgattgattactgatatgaagatttgtgaaggttttggctgcggtggattcgtttgggtgaggcttttgtgaataataataaagggaattcttttgagttctgctggagaagcagcgactgtttcacggtggactttgaaaagatttctcttttgaatttcgctcatcactcttatcttagtgtttgtggataaatatttctcataaagtactttctcctttgcagtttctctagaatctaaagaggttatcacaacggctttgcaatttgaaaactttcatgtttggggagatcaaagatggtttcttttttatactttacttgttagagaggatttgaagcagcgaatagctgcaccggtcctgttatg

SEQ ID NO: 10473 - DNA, 3000 bp, Unknown
  misc_feature (1)..( 3000): cDNA_ID_2715754_gDNA_ID_2213653_Annot_ID_132484 3000 nt of promoter + ATG
aatttaccttttctccctaaatcctttttcctctagtaaattagaataaactaaacagtaattatctctttccctacatctatgttgaaaataagaagagaaagtttcgatgttgcgcggagttttgcaggaaacacatgcatgtctcttcttattgatccaaaatttaaattaaaaacagaaagcaaaattagaactataatggagatcaagatttaccaagttactcaacctttattcaggctggaagtatatataacccacaaaattcttaagaaagtttttgaattttgtttaacctaaaattaataacttacttggtggatgaagaatcaatcatatgctaagaatttccgcgagagatgtaaacctttttttaattatgtgaagttttatgctgtgatatagaatccgtgagtaatgttgtactatagtttagtgttttgaacttttgatccatccatttatttaagattaaaatataaaaaagaaaatcaaagaattttagtggtaattattatcataatctgttagtattcaataaattttgtaatttcagtcctcacatcaaatataatagtatacacatttctttgcgatattagtggccacaaaattcccaattatgctcgaagatagaagttataaattagaaaacttagtgaggtacatgtcgacccacactatatattcttaacttttttaaaaacgttattcttgtctcgttactttcaattgcttttctgctccctccaactatttttagtgggtttgttcgatattatgttcaaaaattctcttcttttccttaaaaacatgtcgtgaaaaaaaaacacaaacatttagtttccgactgagttttcatttgccaaagttgtatagctagcgcttgtttagtgcttggtgttaagaaaagcaacatgaggtaaatggaggatgatttctgtgccttaacacctaaaccatttaatcgtttagacaacattaggttgtttaaaaaaaaaaactattaagttgttcatgcatgtataagataaaattattatatattgatgcatttaatgagttaaataatttataaacaatgtaataaattacattttataagttgtaagaaagatcaatagttgtagctagttggtaagaaaaaatattctgttaatttaacaagtacaaatttgctcgatttatagttttgtaatatcaggaaaacaaaatttcaacttcaagttctatattttcagtgttctaaatccaaactatatttgaaggagtaaactaacattagttttaacttcaaaaagatacttgtctagatagaaaaaaacgtttagacttcttagagcatcattatcaataggttgttaacaatatcataagaactattaaaatattatattaaacaaaataagaataaaaaaaaataaaaaagtgtgcttgagatgaaaaatggctcttagctaagagttttcttccttattctcttcttttgtaagagcctttctaatatttaaacattatgttatatatcaaaattgtttagaactacatgtaagagtccattgataaagatggtcttagcccacttaaagtaactcatgaacatagagaaaatcagtctaacttctaaaatcaagacgtgtatgaaaggcttagacacttgtttctgaaaaattatgtcaaaccaactctgaagccatgcataagtaggcatatcccaaattaattccactttcacgaccactcatgcactcgaactcagatagcaataccaactcctttttgtcttttccttctttttttcgtatcacaaaagttttgtcaagttcaatctagatagattgcgatcaatcttatcaatggaaatagtaatgtttcttcttttagttttttttttaccacccacatgttaaaattaagggtcaatttgcaagatgattataaagagacataatctgcaaagaatacgcaatataatattagtaaatgagtggcaatttctcattcgtgtttgatttaaaagacaaatagaccgcaacttagaattttctgttaaccttaacagaaaatgatatttgtaatatatatgacttgtcgtgatagaattcacaacctttttttttttcctttactaacacttttattttgatttctattttaaattcgagtcgtatattacgataatatataataaaagttctaaaaattttccttaatatattatcatttacataacaccaataatcattttttcagtaaaaccactaataaaaaaacttgtcttatggggttaagggagtttaattgatatatatatatatatttacaactttactatagcatttgaaataatttaaaactccgtaattatttttgagctttgatttgtctacggcactgaaggcggtgaaaaaaattatggtaaaggccaaatttgccggacaaaacgaaatttacatactgtgctgtggaatcaaaaaaagaagaaaatatatatatatatatatatatataacaggttgtgggaacattaatctatgccaagttaacgaattcgtaattcaccaaaaaaaaaagttaacgaattcgttagattaaaatcaaatgcttcggcgtggtaatgtacctatgtaatttccttagaatcttgcaaagagtatttggatatatgatgaatatagtaatatgttatgctattttaaacgtttgaaaatcctattgtacacataaaaaattaaagggtgtagtatgaagtgcttgattaacttttcattaaaacaaatgcatatgctgtagtaagattttagataagtagttcaggagaataaaaatataggttaacgttaacgtcaaagctaagtaagtccaaagtggaacaacacatacacacttttcttataaatatgggaagctttgtggttgccaaactcaaagcacattggggcttatctctctctaagtaatacacacaaaaataactcacatatagagagagatatg

SEQ ID NO: 10474 - DNA, 3000 bp, Unknown
  misc_feature (1)..( 3000): cDNA_ID_2715750_gDNA_ID_2213653_Annot_ID_132485 3000 nt of promoter + ATG
aagttgagatttaggtatttagctgtagatttttttttcagaaataaggagtgagagagaaacagaaagtacagataacctttggttgctttgtaagaagttgctctgagtctgaccacctcttttactgcaaccacgacaccaataactgtgtttctttctctttaataaattttatcttttcaccaaatacatagtattattaatttattttgttggcatcgatattaacatgaatatattcgtttttgggtccatattgattatataccgtgcgggacaatatacgtagactagataaggagagagattgcacgttgttttagctccataatctacatttttatttattttttttctgttattctactaaatgccaatatttggcttagcgcatgcgtaatttttactactattatataaagttggttggaatggtagtaggatgaacaagtatttatcgagattctaaacaaattgtataaatcattttttttattaattgacaaatataatcaaacttggtgtctacaactacatgattttgtgaagtttggggttaaagaactaatcaaactcgtgatttttggaccaagacgaatgtacaagaaaaaatgaaaatatattggatcgcatatgatatgtttattgaagactataaatatgtcaaatgaagaattatgttactagtgcgaaaaggacatccatcaagtattgcttgaccaagctcgtgctgtcacatgcatgatggaccacggtggtcgttccctagaaaccaaccaacaatttctggtcaaagtcaaatctcttaatttgggctcttatcttttatttattcacggctattaggtttgaaggcccaatactgaaaacaaatatatgtaaaattaaaaaatgggcctagcgaatatttatgcggcccatcaaataattggataaaagctttataaactctgcatctcccgtctccgcatccaaaccctagaaattttgtctctctcgccgccttgcgaaaagcattttcgatcttactcttaggtagtctatgattctccatttgatccgtttatacttgttattggcatttcatcatcgtctgggttgttcgacttactctaattttggtttaaaacggatttaaagtttgtttttttgtgaataagcaattaatctattgttactgtttttgaatcgtttcaggataaaaaaatgtcgacagttggagagcttgcttgcagctacgctgttatgatcctcgaggacgagggtatcgctatcacggtatctttcctttgactcctgcttgtctatttctaaatcttgattggtctctttgctttagtcagtagggttttggaaccgtttcttttgacttgatagttagaaacttagtgaaaatgattcttatggagtgataaggatttggtatagtattatttggtcaggaattgaacaagtattttatgtatctgtctaaatgtgttttgaattgggtaaagatctttacttgtgtttgtttatgtcgttgataggctgacaaaatcgcgaccttggtgaaagctgctggtgttagtattgagtcatactggccaatgctattcgccaagatggctgagaaacgtaacgtgactgatctcatcatgaacgttggtgctggtggtggaggtggtgctccggttgcagctgctgctccagctgctggcggtggtgcggcagctgctcctgctgctgaggagaagaagaaggtaaatgaaatagcaacgatagacgaaatcattcttctaactaataagtgatataaaattgatctcattttggtattgcaggatgagccagcagaagagagtgacggagatttgggtttcggtttgtttgactaaacgcagtcacttgtctttcttctttgtagttggatattggagactatattttgtcgtatgagttattattacttgtttgatctggctaaaggactattagttggtttatgatgcgtatgttgtataactcaagtttcctagcaaaccaatcggctcgggcttttgttagaattgattttgtttattttctaccaagtcttcgttcatcaaatataggtctttaatttcgaaaacgtcaaaccataaatgttaaatccggtcatacaatatttagaattgtcatcaaatataggtctttaataaaattggcttttgcagtaatgttaggccggcccaatgcctttattatcggaacatgttagtgtttgttcttcttcttacccagcagcgtcttcataacatttgtacgtctattgtcatacattccatttgatgaaattgagataaggataaatacgataaaaaagtaatgggatttttcgtaagagaaataggaaaaccaaaaaatgttgtttagaggattaaatatgtttcataataatttagtagtaacggtaggaattaggttttaaattcaattttctttcttttagagtcaaaagtagttgcatctatagctctacctgataacaaaagatttatgggattatatacaaatcttaaagaaaacggatctattcttaaaactcaattgaaaagccatatttctaaatggttagaattttatggttattcacctgaatttgttcagatcattttgttaatttgatgattccactattgattaaccaattcgagttaaagaagaaaataaattatgttgagcatacttaacaaggattatatttgtagatcggatcttgaaattaagagatgaaatgaaaagaaagaaaaaaacattggtgttaacgaagaagggtgggtccaaaattgattaaatatttttcgaacaaacaaataaaaatatatataagtatttagagccgggatcgtctgcctcctctgcctctcatctcttgttctctccgcccatctctgctctcttttattttcccagaaagttttttttttttttttccgaattccgttaatctcattggggtttccattgatagcaatg

SEQ ID NO: 10475 - DNA, 3000 bp, Unknown
  misc_feature (1)..( 3000): cDNA_ID_3594146_gDNA_ID_2213653_Annot_ID_132486 3000 nt of promoter + ATG
gctagttcttgatggggaactaggtctttggccacgactcgggcttcctgctcctgttcttgagtaaggctgagaagtgtcgatttcaacggttttaactgaaaccctttggtcaaccgaagctctactactagctcgtttatcccacggtctagtagccatccaccggtcaagccattttggcctttcctcttcaagttctacctcgtggtgtccttccgtggattggttaccaaccgtcctccacatctttccattgaaacgaaacgatgttatcaacaagctcaatatatataacagactatatgccggtttaattaattttaccttttgagagaaagcttgtgacaaattagtcttgtcatgtctcaatgctgtgtcccgtctccgttgtagcatcactttcactgcgtctatcgtgtgtggtcggtcatcccaatcttccgcggcgctgcttccttctcttgactacaacaaataaataaccataattccaaaagacgttagccaccatatgaaattacaaacgcaatttacaattaacaaaaacagaattgcttaaagattgaaaaatatacaaaatatgtatacctaagagtaaagaaataatcaaggcacacctatgtgaatgcaccatttgaactagataggcatgctaaaaacagcttaaccttatgaataaactaaaaagcaaaacatgtctataactaaaaaacatatcaattgattatgctatagtttaggcaaggcctaggaggctatactaaccatggattgtcgatctgacaaatcttgaagatagcgagattcaaaaacagcgtgagagtcactgaacgcggatttgcgactaccgtcatgagacaagcgtttgcgttggtcaagcacacgagactggactcgaaccagagcttgcatacaccttaatgtcattttagcttgctttctcacattatgtcccctcaccaatgcttgtagcttcactaacccttttaatgctcttaatgctcttcttgccttaccaaattagaaagaacaaaacttatatcaagacccaaaaaaaaattatctaaatgaaatcccaatcttttaaatggtagatcttgtataagcaatgttaattttatagacatagacacacatcattgtcactaaaaagtggtctagaagtcaagttggttaaaaaaatgaaagtaaaaatataggtcattaataattgctcaccaaatatcctctgaaagaagtctggatgacaacagcagcgtaattttctcttgcgtaataaatccgcctcggtgcgagtgtcttagatgctgacgtggcgatggggactacggcggacgggggtttaccggcgttggatggcggcgtcgtagttgcgtaactcggtgctgtctccggagagggttttgagtttacgttaagtgaatcttcctgaggtgctggtggagagataccggaagacttcaccggagattcttgagtcgccggttttctaaaccaccgtctcttctctctcttctttttttaaaaaaacagagaaaaatgaaaaccaataatcatactttgaatatagtaagcaaataataagatctaagaataagaaaccttttcttcatcttcttcgacgtcattactatgatctttcttcgtcggagatcggaaagctcgctttacagcggtgagccaagaagaagagccgttctttttccccatgtgtaatgtgtttaattacttttggtctcaacaaattattaccactctattgtctttatgtatcggtgttccgtgaagttgagatttaggtatttagctgtagatttttttttcagaaataaggagtgagagagaaacagaaagtacagataacctttggttgctttgtaagaagttgctctgagtctgaccacctcttttactgcaaccacgacaccaataactgtgtttctttctctttaataaattttatcttttcaccaaatacatagtattattaatttattttgttggcatcgatattaacatgaatatattcgtttttgggtccatattgattatataccgtgcgggacaatatacgtagactagataaggagagagattgcacgttgttttagctccataatctacatttttatttattttttttctgttattctactaaatgccaatatttggcttagcgcatgcgtaatttttactactattatataaagttggttggaatggtagtaggatgaacaagtatttatcgagattctaaacaaattgtataaatcattttttttattaattgacaaatataatcaaacttggtgtctacaactacatgattttgtgaagtttggggttaaagaactaatcaaactcgtgatttttggaccaagacgaatgtacaagaaaaaatgaaaatatattggatcgcatatgatatgtttattgaagactataaatatgtcaaatgaagaattatgttactagtgcgaaaaggacatccatcaagtattgcttgaccaagctcgtgctgtcacatgcatgatggaccacggtggtcgttccctagaaaccaaccaacaatttctggtcaaagtcaaatctcttaatttgggctcttatcttttatttattcacggctattaggtttgaaggcccaatactgaaaacaaatatatgtaaaattaaaaaatgggcctagcgaatatttatgcggcccatcaaataattggataaaagctttataaactctgcatctcccgtctccgcatccaaaccctagaaattttgtctctctcgccgccttgcgaaaagcattttcgatcttactcttaggtagtctatgattctccatttgatccgtttatacttgttattggcatttcatcatcgtctgggttgttcgacttactctaattttggtttaaaacggatttaaagtttgtttttttgtgaataagcaattaatctattgttactgtttttgaatcgtttcaggataaaaaaatg

SEQ ID NO: 10476 - DNA, 3000 bp, Unknown
  misc_feature (1)..( 3000): cDNA_ID_2715738_gDNA_ID_2213653_Annot_ID_132490 3000 nt of promoter + ATG
atcatatgggaattatggatataattttgaagaacttaaaaataggttaatcttttaagactatggggagataacttgtcgcacaagtaccaaatgtttcggaaacaaaggtgaaaaaatctacaaacttaacaataaaaccacaagtcttccatttgtacggaggttaataataattaataccaaataaacgacaacacttgaagtagtcaaaacttttatagaattatcttgatttggttgaggtcgagattgacatcatcatcgtcgtcgcagagatcggagatcaaaatggagagggaaagaaacgcaggagtgatgaagaagatgagtccaacaggaaccatccaaagattagaatttgtgggatggtatttgtaaagccaataacttagaaacaatcctccacatatattcacaatcatcgaatacaagaacaccattgacgacgtactcttcttctccttccttgtcctcttcttcatattcgtgttcatgctgctttcgtggttcatttgcaagaggatctaaacaagttatgattcgcctttttattaattaatttactgggagttaggtgaagtgaaagaaaagatggatgacaataatagattctatattgttagagtgtatgagtaagtaagtatatatgcagtcgggttccggttcgtgtaggtcggtttagaaagtatatttcaattaaactcggtttttagtcgtttttctaacgaaatgtgtttggtttttagagattatttatgagcaaaactgagtttgtgtttgggttttagatagggtacctaaaactcgattaaacatttagaccagtttccagctggtccgactccgatttaggttggtcaatgtatgaaaggcaaatctaaacataagacacattttatgttatgtattactaaattactacaaaaaaaactcctacaactccaaaatacacaatggtttagatttagatatacatgtttttagaactaaaattattgaggtattttataatagtactccaagttataatttctgttacgaggcgagaataaacgtgggagaggaaggaaaaaaaggtgccgtgcggtgcaactagattttacatatttgtacacatatttcacgattgaatctttcaagacattatatgctttatcaaattttatatatataacaattagataagaaacacaatctgacccgactctactatttataattatacgtatgaatctctaacttcgttactaaaacggcaaatactaaaccctgaaaggaaactgtgtgagaaacagttaggccccttgaccatctttgttcaacgttgtcaacgaaaaaaaaatggaaccataaaggataattaattgtatcacaaaaagacaaacacaaattattgaatataccatcacttatcagtatataattttatacaaatgctttaaataacaaatattatgtagaaaaagagaaaagaaacttaacttggtcaatttgatcatttgtgtaaacgatgatgcggaacatatgcgataataatgttattggatggcaaaaaaaaaaaaaagtattttagttgggccctaatgttaattcacaatcaagcctaaatttggttaatgggccaatctttcttatatatgtaggactcggatgttcggtctactcgaactatctacaaaccaagctaaaccgaaagtaaatacaaaatcaaaccaaataatagtttggtttatataggttttaaattttaatccatataatccaataagttccaactcataaccaggaaaataaaaaaaatgtggaatgaagaagttcaaattgataaccaaatgaattgctttcatatgatggtgacgtgatgtttttgtaccggactcaattattggaacgagtggttcattgtgcattatttgcattttcttttgttcgtaatatactaacatatctaaaaaattattgtatcattattactagtcatgcaataaatcatcaactcacactgtctgccacacttttttaatttttctgcgtattttggcattatcatatgaaagaaaataagagaaacaaataaaggaaagaagaaaaataaaaacattatcacattctgtgaaatctctgagtttatcaggaaggatatgtggggttcatattcataccgttccctttactcacatcgtcacatggaaagatcaactatttcaattatctatttatttattatcatatactttaaataatcaaatttagaaccgttacaaacaaaaataaacagctacatcaaatttaaacaaaagtaagtatatgcgaatattatcatagatttaaacaaaatttgaccaagatataacaatcatcatttaactaccaacatttgatatatgtatttattgttcttaggtagtttccaacttctaactaaagacaaaaaaaaaagttatatttagagaatatttctacatgaaaagaatacaactatatcaaataatatgataacagtcaactttgaacatcagtagaatggaatgaatcactgaaagatatactcatatacacataaagattaaggacatcaaatcacatcccttacaaataaaaccatatccacataaatttaaaaccccaaaattttcataaaatccatatacttaaacaggagtttctgtatatagttaccacacaagaacaaaattatggaatttttttatatgaatgaagaatgaacgttacgaacgtacacaagtacaaataacacgggactgacgcggaacagagcaaaataatgatttttgacattacgtggcatacgggacccacaatacgcgcgtgactcccagtcgcgcctattaaatctctcgctcgtccactttctctcgtcagccttaaaaccaggcagccactagaagaaggagagatattgagggagaagaatcacattgatagattcgccgccgatctagagccgttgattttcttaatcggaaaaagaaaatg

SEQ ID NO: 10477 - DNA, 3000 bp, Unknown
  misc_feature (1)..( 3000): cDNA_ID_3098512_gDNA_ID_2213653_Annot_ID_132493 3000 nt of promoter + ATG
aatacttctttctttctcaaaaagatgtttcagccaaaaaggaaacccggttgctacatacgattggcggcgatcctccattgtcacgctcttggcaataagatgagctccaagattagagcttcttacttcaccacacaattccaatccaaaaaattacttaattctcccaacaaaaagtgaatctgaaatttatacgaaggccaagacggcagtcgcgtaacagctccaattagatcattgtcttcagaggcaaagatgattttatcaactctgagacttttcatactctccatggcccattgccaacaaagaaaagtagcatcaagcttgctatgaacagatgcaaaagatcttctagcatgaattaggaccttaccgtgttcatctctcaaaaacccgcgcagcacctccaatctcaccaaatctatcccatgacgatctaatattgcattttaaccaatcatggggaggaggagaccacttaaccttaaccgaaatgtgaacagcttgctcattcaccaaatcctgattctcaagaacttgagcaaagaaccattgattggcatcctctttaatcttcgcaacagtttttgagatcgcaaatcttgtccctttattaattacctttttcacagaaaaaaataatattctgaaaatacacttccatggaacacttcatcaatttgaagtaaaaacaaaaaaaatgatgttttttttgtttcacctgatcaatcaaatattttttctcattacacaatcaaaaacctcaaatccattaattttcaaaagatggaaaaaaaatatgaattgactatgcaatattacacattttcttattatttatacatcgaattttttcattccttatgggaaaaagggaatcaggttactttgaccgaatcaataacccaatgttgaccatcggttttgacctttaaccggttaatctctgcgaacagattcacggctctcctcactcctctattatccgccgccgtgaaataatcgtgaccaaatataacaccgccgggtcggagtatccgaaccgcccggtttatatccgcccatgccgaattaaaatcgtgacccgcgtctatctccaccaggtccgccgtcactccccactcacacagcttctccaaagccgaaccggtcgagaaaggaaccggcaatatcgaaccggaaaaatccgagataaccacgttttgcataaactggtacataagcagaacgtcaccgttaaccaaagccatgtccttaaaccggtctcgaaaaccgggccagccacggaagtcgtcgacgcatagaatctgagtctcctcgagcccaagtcggcgcgtgagattcgccatgtgtatcgccgacgcgccgagaaaactcccgacttcgacgatcgtcttaggtttgactcggcggattagattctcgaaaacggccccgtatgatccccaacctttgattctttttggccggagaaacttcttggcgtgcggtggtgggaaatcgatgtacggagaagttccgttaaagatccggtcaataacagtctggcgaatcaattccggcggaacaagattgccgcatggagtcgtaactcggaagttgtcgattgaacaaacttgaggttttgtcgtttccacggctgtcgtagacggtggcagctgctgctgcagcggttgatgatagtggtaggcggagaagtaaccaaaggcgtaggttagaactatgacgataacgtacgcagccttggttttcaagaattggaaggcgtcgcgtttgtgaggaagacgacgatcctccttcatggtcaagatttctgagaatgaagaatcaagtaaaaacaaaataggattaaggaaggataattgtttttgttattaagtttatataattcgaattatggaaatttatttatgattattttggcgggtcagtttgttgagacgtttaaatacagtcggataaggaaattgctcacgtcgtgatctaatttatttgtatttatttgactttacgtgtctagaaagctacatgtgatgtagtcatttacaatcaaaatcatttgctttaatccttgacttaattcattctgtatttcgggttttatgagtttagaaaaaccatataaaacaaaaacttatttaactcccctagacctattaataaatgaaactacgaatctctaatctttagtgtatttacagttttccaacgaaatcatatgttataacacgacacgacctcaatagtcaataataagtagaatcatgttttgaacatgtcaaatgcagcactgattcgaaagaataaagaaaaaaagagttttgaatcgtaattctgcaagaattaaagtgtagtgtttaatatatgtggcattcgccgagatcatcttataatagagtatgtgtcatacgccgaaaacaatgttggacacttggacctttccttactgataaataaataaattcatatcaactagcaaattagcatattacaggttttggttataacaattactcgagctagacgtatgatgaaattcagcaaactagtagatttgctattatatcttcccttgtgatgattgtagttttgtctcttaataaaactagtaattaacgtttcagaaaacaatgcccattttggtaatttcacagagatttatccaaagtttttaaagagataagacgatagagttggacgaccgtcttccaccgttgaattcttctggaactggagtccactgtttaagcttcactgtctctgaatcggcaaaggtaaacgtatcaattattctacaaacccttttatttttcttttgaattaccgtcttcattggttatatgataacttgataagtaaagcttcaataattgaatttgatctgtgtttttttggccttaatactaaatccttacataagctttgttgcttctcctcttgtgagttgagtgttaagttgtaataatggttcactttcagctttagaagaaaatg

SEQ ID NO: 10478 - DNA, 3000 bp, Unknown
  misc_feature (1)..( 3000): cDNA_ID_2715730_gDNA_ID_2213653_Annot_ID_132494 3000 nt of promoter + ATG
ccctgctaacaacatcactaccgaacagatccaaaaggttccttctttctcaccctatatctctccctctctcttaatttgttcaacactacttaggaggctcttagagcttttttgtactgacaaaatcattggcttctgagtgcaagtaatactcttttgactgtaattggtggcaattagggttttcatttgaatctttctcgttaattccacaacacttgagagtctgttgttggtgatgatgagaagagacagtttctaggactaggaaattagtagatgcttggtgggtcaggaaactttgaatccggttttcaagaatggacattgaagttagatgcttgcttgatgttgttgttttgtactttctcttggcttgatgtcttccatggtaagatgataggctgcatcgtcatttccttgtcattctctttcctttgcttaaacgcagtaccttgatgagaacaagaagctgattatggccatcatggaaaaccagaatctcggtaaacttgctgagtgcgcccagtaagtctcaccttttctatccatcttcttatgtctcttagatagtaatggaagcttagaattactattattaatggtgaggtttatatagttattctatcttttgctctgttatattttcaggtaccaagctcttctccagaagaacttgatgtatcttgctgcaattgctgatgctcaacccccaccacctacgccaggaccttcaccatctacagctgtcgctgcccaggttgtttgtgatgataaaactcaattgcgatctatcacagaaatttaatgttgtttgggggtttgcttactgttgggtatgatttctgttagatggcaacaccgcattctgggatgcaaccacctagctacttcatgcaacacccacaagcatcccctgcagggattttcgctccaaggggtcctttacagtttggtagcccactccagtttcaggatccgcaacagcagcagcagatacatcagcaagctatgcaaggacacatggggattagaccaatgggtatgaccaacaacgggatgcagcatgcgatgcaacaaccagaaaccggtcttggaggaaacggtaactctctttacattattaagacaatactcaatctcataaattgtaacttgtatccattacttctttctttgctaacagtggggcttagaggaggaaagcaagatggagcagatggacaaggaaaagatgatggcaagtgaaaaggatccaaagaagctttgttttgttgatatttaggacttgtgagtctcgtaagggctttttgcaatagcttgtttgagttttttaacagaagatagactgtggagtagttccgcaaaccgtgttgtaatgtattgttatttagtacaagctcggatttagaaaacatcgtcatcgttcatcttattctgaaaatcaaagcattgaacttattattttctcattccggacgagtcttgacgatgaaattctgacggctaatgggattcataacaacgggaggaccagcggttcttggccatgcttggaatttctcatccgttgctgcccaccattctttgttagagacagttcctggagtagtccctgaaattttcacaagaagataaccattaagatcgtccctaacttgaaaacacacacaaaactagataaatcttgagcagaacttgcctccaaagatcttattatcagagataactttgtcgaagatgtatgagattccgaaagaaccgatgagagcaccgattatgtacttggctttacctcctgatgccattttcttctaaagctgaaagtgaaccattattacaacttaacactcaactcacaagaggagaagcaacaaagcttatgtaaggatttagtattaaggccaaaaaaacacagatcaaattcaattattgaagctttacttatcaagttatcatataaccaatgaagacggtaattcaaaagaaaaataaaagggtttgtagaataattgatacgtttacctttgccgattcagagacagtgaagcttaaacagtggactccagttccagaagaattcaacggtggaagacggtcgtccaactctatcgtcttatctctttaaaaactttggataaatctctgtgaaattaccaaaatgggcattgttttctgaaacgttaattactagttttattaagagacaaaactacaatcatcacaagggaagatataatagcaaatctactagtttgctgaatttcatcatacgtctagctcgagtaattgttataaccaaaacctgtaatatgctaatttgctagttgatatgaatttatttatttatcagtaaggaaaggtccaagtgtccaacattgttttcggcgtatgacacatactctattataagatgatctcggcgaatgccacatatattaaacactacactttaattcttgcagaattacgattcaaaactctttttttctttattctttcgaatcagtgctgcatttgacatgttcaaaacatgattctacttattattgactattgaggtcgtgtcgtgttataacatatgatttcgttggaaaactgtaaatacactaaagattagagattcgtagtttcatttattaataggtctaggggagttaaataagtttttgttttatatggtttttctaaactcataaaacccgaaatacagaatgaattaagtcaaggattaaagcaaatgattttgattgtaaatgactacatcacatgtagctttctagacacgtaaagtcaaataaatacaaataaattagatcacgacgtgagcaatttccttatccgactgtatttaaacgtctcaacaaactgacccgccaaaataatcataaataaatttccataattcgaattatataaacttaataacaaaaacaattatccttccttaatcctattttgtttttacttgattcttcattctcagaaatcttgacc

SEQ ID NO: 10479 - DNA, 3000 bp, Unknown; identical to SEQ ID NO: 10477
  misc_feature (1)..( 3000): cDNA_ID_3098656_gDNA_ID_2213653_Annot_ID_181661 3000 nt of promoter + ATG

SEQ ID NO: 10480 - DNA, 3000 bp, Unknown
  misc_feature (1)..( 3000): cDNA_ID_3098661_gDNA_ID_2213653_Annot_ID_181658 3000 nt of promoter + ATG
ctatggggagataacttgtcgcacaagtaccaaatgtttcggaaacaaaggtgaaaaaatctacaaacttaacaataaaaccacaagtcttccatttgtacggaggttaataataattaataccaaataaacgacaacacttgaagtagtcaaaacttttatagaattatcttgatttggttgaggtcgagattgacatcatcatcgtcgtcgcagagatcggagatcaaaatggagagggaaagaaacgcaggagtgatgaagaagatgagtccaacaggaaccatccaaagattagaatttgtgggatggtatttgtaaagccaataacttagaaacaatcctccacatatattcacaatcatcgaatacaagaacaccattgacgacgtactcttcttctccttccttgtcctcttcttcatattcgtgttcatgctgctttcgtggttcatttgcaagaggatctaaacaagttatgattcgcctttttattaattaatttactgggagttaggtgaagtgaaagaaaagatggatgacaataatagattctatattgttagagtgtatgagtaagtaagtatatatgcagtcgggttccggttcgtgtaggtcggtttagaaagtatatttcaattaaactcggtttttagtcgtttttctaacgaaatgtgtttggtttttagagattatttatgagcaaaactgagtttgtgtttgggttttagatagggtacctaaaactcgattaaacatttagaccagtttccagctggtccgactccgatttaggttggtcaatgtatgaaaggcaaatctaaacataagacacattttatgttatgtattactaaattactacaaaaaaaactcctacaactccaaaatacacaatggtttagatttagatatacatgtttttagaactaaaattattgaggtattttataatagtactccaagttataatttctgttacgaggcgagaataaacgtgggagaggaaggaaaaaaaggtgccgtgcggtgcaactagattttacatatttgtacacatatttcacgattgaatctttcaagacattatatgctttatcaaattttatatatataacaattagataagaaacacaatctgacccgactctactatttataattatacgtatgaatctctaacttcgttactaaaacggcaaatactaaaccctgaaaggaaactgtgtgagaaacagttaggccccttgaccatctttgttcaacgttgtcaacgaaaaaaaaatggaaccataaaggataattaattgtatcacaaaaagacaaacacaaattattgaatataccatcacttatcagtatataattttatacaaatgctttaaataacaaatattatgtagaaaaagagaaaagaaacttaacttggtcaatttgatcatttgtgtaaacgatgatgcggaacatatgcgataataatgttattggatggcaaaaaaaaaaaaaagtattttagttgggccctaatgttaattcacaatcaagcctaaatttggttaatgggccaatctttcttatatatgtaggactcggatgttcggtctactcgaactatctacaaaccaagctaaaccgaaagtaaatacaaaatcaaaccaaataatagtttggtttatataggttttaaattttaatccatataatccaataagttccaactcataaccaggaaaataaaaaaaatgtggaatgaagaagttcaaattgataaccaaatgaattgctttcatatgatggtgacgtgatgtttttgtaccggactcaattattggaacgagtggttcattgtgcattatttgcattttcttttgttcgtaatatactaacatatctaaaaaattattgtatcattattactagtcatgcaataaatcatcaactcacactgtctgccacacttttttaatttttctgcgtattttggcattatcatatgaaagaaaataagagaaacaaataaaggaaagaagaaaaataaaaacattatcacattctgtgaaatctctgagtttatcaggaaggatatgtggggttcatattcataccgttccctttactcacatcgtcacatggaaagatcaactatttcaattatctatttatttattatcatatactttaaataatcaaatttagaaccgttacaaacaaaaataaacagctacatcaaatttaaacaaaagtaagtatatgcgaatattatcatagatttaaacaaaatttgaccaagatataacaatcatcatttaactaccaacatttgatatatgtatttattgttcttaggtagtttccaacttctaactaaagacaaaaaaaaaagttatatttagagaatatttctacatgaaaagaatacaactatatcaaataatatgataacagtcaactttgaacatcagtagaatggaatgaatcactgaaagatatactcatatacacataaagattaaggacatcaaatcacatcccttacaaataaaaccatatccacataaatttaaaaccccaaaattttcataaaatccatatacttaaacaggagtttctgtatatagttaccacacaagaacaaaattatggaatttttttatatgaatgaagaatgaacgttacgaacgtacacaagtacaaataacacgggactgacgcggaacagagcaaaataatgatttttgacattacgtggcatacgggacccacaatacgcgcgtgactcccagtcgcgcctattaaatctctcgctcgtccactttctctcgtcagccttaaaaccaggcagccactagaagaaggagagatattgagggagaagaatcacattgatagattcgccgccgatctagagccgttgattttcttaatcggaaaaagaaaatgagtggaagcagaaggaaggcgacgccggcgagtaggacgcgagtagggaattacgagatg

SEQ ID NO: 10481 - DNA, 3000 bp, Unknown; identical to SEQ ID NO: 10475
  misc_feature (1)..( 3000): cDNA_ID_3594146_gDNA_ID_2213653_Annot_ID_181652 3000 nt of promoter + ATG

SEQ ID NO: 10482 - DNA, 3000 bp, Unknown; identical to SEQ ID NO: 10474
  misc_feature (1)..( 3000): cDNA_ID_3036734_gDNA_ID_2213653_Annot_ID_181651 3000 nt of promoter + ATG

SEQ ID NO: 10483 - DNA, 3000 bp, Unknown
  misc_feature (1)..( 3000): cDNA_ID_3036738_gDNA_ID_2213653_Annot_ID_181650 3000 nt of promoter + ATG
aaccaaaaaatgttgtttagaggattaaatatgtttcataataatttagtagtaacggtaggaattaggttttaaattcaattttctttcttttagagtcaaaagtagttgcatctatagctctacctgataacaaaagatttatgggattatatacaaatcttaaagaaaacggatctattcttaaaactcaattgaaaagccatatttctaaatggttagaattttatggttattcacctgaatttgttcagatcattttgttaatttgatgattccactattgattaaccaattcgagttaaagaagaaaataaattatgttgagcatacttaacaaggattatatttgtagatcggatcttgaaattaagagatgaaatgaaaagaaagaaaaaaacattggtgttaacgaagaagggtgggtccaaaattgattaaatatttttcgaacaaacaaataaaaatatatataagtatttagagccgggatcgtctgcctcctctgcctctcatctcttgttctctccgcccatctctgctctcttttattttcccagaaagttttttttttttttttccgaattccgttaatctcattggggtttccattgatagcaatggcgacggctttcgctcccactaagctcactgccacggttcctctgcatggatcccatgagaatcgtctcttgctcccgatccgattggctcctccttcttctttcctcggatccacccgttccctctcccttcgcagactcaatcactccaacgccacccgtcgatctcccgtcgtctctgtccaggaagttgtcaaggagaagcaatccaccaataataccagcctggtacgcttcctctcctcgtctccttcttttggaattttacaagttgtgagatttgttgtattgatttaagtaatttgaaatagttgataaccaaagaggaaggattggagttgtatgaagatatgatactaggtagatctttcgaagacatgtgtgctcaaatgtattaccgaggcaagatgtttggttttgttcacttgtacaatggccaagaggctgtttctactggctttatcaagctccttaccaagtctgactctgtcgttagtacctaccgtgaccatgtccatgccctcagcaaaggtgtctctgctcgtgctgttatgagcgagctcttcggcaaggttactggatgctgcagaggccaaggtggatccatgcacatgttctccaaagaacacaacatgcttggtggctttgcttttattggtgaaggcattcctgtcgccactggtgctgcctttagctccaagtacaggagggaagtcttgaaacaggattgtgatgatgtcactgtcgcctttttcggagatggaacttgtaacaacggacagttcttcgagtgtctcaacatggctgctctctataaactgcctattatctttgttgtcgagaataacttgtgggccattgggatgtctcacttgagagccacttctgaccccgagatttggaagaaaggtcctgcatttgggatgcctggtgttcatgttgacggtatggatgtcttgaaggtcagggaagtcgctaaagaagctgtcactagagctagaagaggagaaggtccaaccttggttgaatgtgagacttatagattcagaggacactccttggctgatcccgatgagctccgtgatgctggtaaatatcgacttccttctgcttcttgatgcttgtactgattatctaagggttgaaacaaccttctctttaatttgaatttttttttgcagctgagaaagccaaatacgcggctagagacccaatcgcagcattgaagaagtatttgatagagaacaagcttgcaaaggaagcagagctaaagtcaatagagaaaaagatagacgagttggtggaggaagcggttgagtttgcagacgctagtccacagcccggtcgcagtcagttgctagagaatgtgtttgctgatccaaaaggatttggaattggacctgatggacggtacagatgtgaggaccccaagtttaccgaaggcacagctcaagtctgagaagacaagtttaaccataagctgtctactgtctcttcgatgtttctatatatcttattaagttaaatgctacagagaatcagtttgaatcatttgcactttttgctttttgtttggtgttactaaactatcacaaggttcttcttgtagttcgttgggttttcattggttaccacttaccagagaattgtatttttttttttaaagataattattttgcaacctcgggtgattacactctaaacaagatgggctctgcaacaggagccagtaccaccaattacacacaatctcgtataagaacaatacatgccaatacagcttccacagcacagaaaactcttttcctctttgcttcatctctgcatagcttgcttataatatagctttaaacctcaagatttgcagacttcttcatagtaagatcaaagaagacagtgttgtggtttgcataacgatcatttgggtcaaaatatagcttcaaacctctgagggagttcaaacatagcagattctatcactaccaccttccctcagagccaaggagttgtagatgtagtggtcagaatgaagattgaggatgaatgggccattagacaagattgcactggttctaatttcatggctcctactttctttgtaattaaagtgtttggtaaagggaataagagacttgaagaaatgaaaatgtttgaataattttttattttttgatttataactttgggccttttgtttatttcatgaaaaacaaaacctgctacgcgaaagagagtgtctcatctgacgtagcgaataccgagcaggattgtaacgggttaaatgacccgacccgatttgttctattaatttctatttcatttcttttttttttaatcattcttctcaaataatttactttctggtccttcgataatg

SEQ ID NO: 10484 - DNA, 3000 bp, Unknown; identical to SEQ ID NO: 10473
  misc_feature (1)..( 3000): cDNA_ID_3036742_gDNA_ID_2213653_Annot_ID_181649 3000 nt of promoter + ATG

SEQ ID NO: 10485 - DNA, 3000 bp, Unknown; identical to SEQ ID NO: 10470
  misc_feature (1)..( 3000): cDNA_ID_3036750_gDNA_ID_2213653_Annot_ID_181647 3000 nt of promoter + ATG

SEQ ID NO: 10486 - DNA, 3000 bp, Unknown
  misc_feature (1)..( 3000): cDNA_ID_3036752_gDNA_ID_2213653_Annot_ID_181646 3000 nt of promoter + ATG
tatatattttttaagtatagaaaatagaaatatgacgtgctaaattgagctatggacaaaatcatatatgagaaaatgaatgtagatggatagagtcgtcccacacttaaggttggtccacaatgaataccgttggaggcttcgcaggcttttgttctgtccttgtctctctctcccctaaaaaaaatttgttacgaaaaattcatttgaattaattttggtcggtatgtgtataatattatacaattataatatatttctaggtttagacatttttttattttatttttcatgaagtaaagaacacaaacaaaaacccataaaataatgtaagatagataaaacaagaggatgtcgtcataaataaattggaatttggcatttaatgaaaaagggtgaaaggtgcttgacatacacgcgccgtagtttcttacccggaaagggattggtattgatgttaactagaccgggcccggtttaggctggggcggcggccgaaccgaccacctggctactattcttgtttgtattcgctgattctgcaaatctaaactcggatcttttatggacttggattttcgggtgggtggggttctgctaaagagacggcgctcttgtcattttaagtcggtcactgcaaaacgtgaaccctgtgactgtatttagagtctcgttacgttggatctctctccatgaaccgtccaaagtaggtcaatttttgtgggttcactcacgtatacaacgaagtacggcgctatttaattttccgaaaattttgaaagagacttttataccagaaaagtttgtaatccaaatttttaatatattgcagatttggttcgttttgggcttaaagagcttttattggtgtggtggctcaaatcgtttttgtaggcgtcaggtcaggcccattttcaatgtcgcttgctcatttgatacgctaatatagggctttgcttaagatttgaatgggccgtacccccattttgcttcatgagaatgggatggtaataaagaaaaaaatgacaggaaacaatgaattggtcacgaaaaaatgttgtattactttttccaaaatgcacctttgagaatcttaagattcaatcatacagtgaggtccatgtccacaataagaaatcaaataccaaacaaagtataaacgtgaattgtaagctaggcagtgtatgaagatgcatttgtcttaaagttacgaatctgataaataatattattcgatcgactttagatcgctttccatgcagatttatgcaattatctggaagaagaacaaaacaatatcttagtttcttcggcctcactattcgacttctatcttcaatatattttcgcgtatttttttatttgaattatttggtttttggttagttaactaaacgagcaacagaaccaagatcgaattgcgtttgccgtttggattcaattattgtagaaaattcgacttttcagacatttgttacgttctttctagtagttatattagttattatatgtggagtggaaagagatgaaagtagatgtaaaacataagtgatttcttcatagtgattttaaaactttttgttgattttcaaaattatataatatccataaaaaatagcctatgcgtgttggatgcttacaaagaagaatttgttttcggcgttagccaaaagtcgatggcatttgctaaaggtgttatttgagtggaaatgatctagaacaaaaacgcattgatataccaccactataatgatttggagacgtatctagttctcatcaacttttcaatagtaaacgcattatcaaggtaaacgaagagttttgctttatcagtgtaccatacacacattaatagattgatggacgttagtgactttggtattgactttaacgccaaatggacatcaattctgcaaggcaatgcctagtttcaaagcagcgttacttaacatttaactaaaggtagtgcaaactggttaatactttttaacggctttgcaggaagagtctcgactaaaaggagaggaagagatgagatcgacgaagattttcatatcataaaaagtaatataggtttttgaaaatagttagaataattatttttatttttatttttatgggaaagaagttgcacgagtcggtccacagaatgacagaacaaaagcattttagaagtttagaaccaaccaatcactatagttttccacttgtccgtatctcattggttcatcgaatattaacttacatggaaacagtaaaaagcgtggaataagtcgtaaaactgaaatctaaaaatgaaaagatttcgatttcgatataaatacttaatctttataaaataatatcgaaatcttttcatttttagttttcagttttacacttttacttgataaatttaatacatctgttaattttttttcttctaaaattaacatatgatatctattcgggagataaccctaagaaaactgataaaataaataagttactttttacaaagtcgaataaattatttacccttctgctttaatggcaattatcttaatattgcaaaaaaaaaaagagagaaatattactacaaaacagaagcaagcaagtggaaaacagaccagaagagagaggaagacgaagagagaaacagaacagagtagggatcgatagaccgtggaatctcagaatcacaaacactttgcaaaagggttttcaattcctatttatttacaaagaaatcatcaatagtagtggtctctagggttttgcttgctcttcttcgtgacccctttttacctgcaaacaacaacttcaaaattggcgtgtttcgtacggtctatctaaccctaatctgtcacaaaacactcttcttctctcacccctttttctgggtttattcaattctcgtgcttttggttctgttttcttctctggggatttggttttcttgagtgagtttttctcctctttcttatgttcttgatttgattattatatagaattatggta

SEQ ID NO: 10487 - DNA, 3000 bp, Unknown; identical to SEQ ID NO: 10478
  misc_feature (1)..( 3000): cDNA_ID_2715730_gDNA_ID_2213653_Annot_ID_181662 3000 nt of promoter + ATG

SEQ ID NO: 10488 - DNA, 1855 bp, Unknown
  misc_feature (1)..( 1855): cDNA_ID_2715726_gDNA_ID_2213653_Annot_ID_132495 3000 nt of promoter + ATG
cttcgtgctcgtgttgaaattttgagtgataggccataaaatcaaaagccaattattgggcctttctttaagcccatatatgactcggatctttgtttgggtttttcatgtttagagaattagaggtggtgcttatagtaaaatcaaaaagctattcatgtgtcactcgtaatctctttgacattcttgtatatgtaaagaaaaaacaattcttttattctgtcaagttccaaggagtttcttctattcaatcaaaatgttaagtaaaaactagagttttatcaatatttctagcaaggaattttttaaaaaaaaagtctaaactatatggtagtgaaatgatggagatttgttttcaaagattaggatagtgaaatgatcagaaccacaataagttcattaagtagatatttcgtgacatcaattgtgagtgtcacgttagaatctggaatataatccaaatctaatggaagatatgattctatttatttttgcatgcaaccgaatcatttgaagtgctccaatcacaaactcgcttttcctcttatgacctaaaaaggagagtatattatataatcagatatataaaacatcacacattaatatttacattgtatctaagcacatatgattaatcggccaccaagtgctttgtgactacttagttttctatgctgatacctctgtattatgtgtaaagttactaattagtttatgtatattagcaaaagaaagattcttatataagaacaatgtaaattactcctttgaacttttatatattttcaataaacgataggatcgagttaagataagtatatgtattaactgaattaaacaaatactataagaagaaatttggattcagggccacaatgttatgataaattttgctggtgtcttaaacacttcgacgatctatatattttactaaagaggtgacaatttttgcaggagatagctataaaaattatatttagccttgatagttacagattagtagctatctgttatttacaacgaaatttacatgttataaattttcttctaattaatctatttatattgtttggaatgaaaaagcgcatacatatgtaagttggaaagtatataaaaaagtagatgattaaaaggaaaggtcgttgactaacaatagaaaaagtcaaatggtaagcaagcaggagaatagtcgtacgttcactgttcccaacttgcaatgagactcatcagaaaattggcatctttgaaaataatagtaattacgtatacatgttattttatattgtttttgttaattaagcactacgtttagatacgcaaattactttattaagatgcatatatactcacttttacttcacattatgataataaaaaaatcatgatttataaaccgtactattttatacgtaaattgtatacgtatgcgtttccttagaaaaaaacttgtagaaatagaatactcatgaatgtataagaaatagttaaaataaattaaaaaggggacgatagcagacaattattcagaactgacgtatatatcggacatatgcaagtataatcttcaatacttgtgtttatttagattaaaattctatgtaggggatatagtaatttgagtgtaccaaacatgtcataacttattagcatatacccatgagcaccaacagatgactttgaaataaagtatttataatttcaagtattctctgttttgcaattggctaagaccttcatagttcgtacgcctatttaaagcctcacaaagacccaaacataaatcacaacctataaacggaaaaacaaaatcacaaacaaaaaaagaagaagaagaacatttatcctatccataatg

SEQ ID NO: 10489 - DNA, 3000 bp, Unknown
  misc_feature (1)..( 3000): cDNA_ID_3036843_gDNA_ID_2213654_Annot_ID_181690 3000 nt of promoter + ATG
atagagtacggttttgaaagttagtaacttacgagatcatgacacatcttaatttcatcgatattagattttaaatgtcttctcaaatcttatgttattgaacatggaacttacttaatatcattcaacataacttctaatcacatgttattcaatcaataattaataaaagttttaccaaatcctatgttattcaaaaatttgctataatcttgtgatttggttttataacggatttttggagactttagacataattttagttaaaaaaaaaatatagatccataaatctaatcctcaactatgatactttgagagatttcaatcaaaatttaaaatataacgttacccacataaacttgtataaaccttcgtttattgaaatcttaagataatggcaaattctccaccattgtcagatttgttctgtaatcttccataatatattagtgaattcaaaacttgtatatcgtctataatagactagtagaacaagcacctttttcactatctattgacatcatcaatctctttccaatgatgatgacgcatcttggtccatgtggtttgctaattccactgagcatagatttctcataccctggcttcttgtttctaaaatccctgggttgcttgtgatgctttgaaacaagtaaataaaaagtaattttgttttcttgcaggcagcttggaaagagattaagcgataatctctcccggtaaatctgatcttgtcggatcattgttacctttttatctccttaatggagcagtttctcttcccaatattccctcatatatggactggattggatgttcaaggtttgtcggtattggaaagatcttcctcccggcctatacactttgctgcctttgttgcagtggccttaacccctcgggttactttggatacttgtaacacccctattttacaattagactatgaggccctagtccagcccgctaatgatttgaatccaagtgaaaacctaatgatcccacgtgattataaaaggagaacgcaaactccaaatcaagtcacaaaaaccctaagccggcaaccttgcaccactcagaccaccggagatcgttgttgtgttgagccggagtcaccgcgtgaatcatcctcaccggagagataacgcacgagaatcgattctggttttgatctcttagtttctttaggattgtttttctttaggattgttgaaccaatctaactagtgaatggaaccatcgtagatctgtgccactccgctgttccaaccgccaagcaaaccgtaagggagactcgtcgagaaaagtcaccgagaaaggtaatcgggaatcttctcgtgttgttatgtgattatgttatttgattattaaaccatgatctaaattaaaccagttaaaaccaatgaatcgtttgtttagttagaagttacgtgaaattgtgtcgtaggaagaagaagttgacttcattcattggtttagttgttagagtaccggttaattgccaaaccggaagctatcattcacgtgaatgcatggatccaattgtggacgtagtgttacatgtagtgaatgaatcaatatttaattactagatttagttggattattttattaaattaagtctagttaatttattgaaggatatatagtttgggttgattatgaaattaattatagattattaatgaaaaataatctttgatcgattatttaaaccgtcgcagattgagatcgttattggaccttttcttgttgctgttatttcgaaaccgtgttatccaaccgagttgctaaggtgagggcgggatctgtggaaacatagtatcacctttctacttttgtacttttgaagttcatttgtataggattagacattgggtgttgattgttaattattaggaattaattgttaaaacattataagatgtgttgtgtgatgttatgcgttaggtgttagcgtgatatacatgttgatttgtttgacgtctttaagacgtatttttaaataaatatataaagataaataaaagagaataatgatattaaagaaaggataacattgaggatgttggactgtaatggaaccgacgggttcattacaggtcattaatcgctgacgtgcaatgagaggaaggatcgagctacgggccgtggtcttccatgaataggcttgaggagccataaattaacgtacgttaaaaactaagaaaagaaagtaaaagatcttgtggtgagcaagacgaaagcttgtctgttatagcttactacgaaagtttaagctatttgcttgttgtttgagtctatgcttatgaaatggaaattgtgtataagtataatcgtgttattgtgattcggtggacagttttgactgccttcactgagtaattaattactcacccccttttcttttccctcaggtgaggaagagaatgttgagtagctgctcgtttggtgttatttcgggaactttgggttttatttgatttatcgatatttcttatatttctaaacacggtttctttatacatttttatccaacgattttaatttatttatgctattattttgagacaatttatttctgattcttaataaaagaaagtttcccgaaattatgatattttatttcaagatttgatttgaagaagttgaataaatgaatggaaaagatgaaagtacgccgtctcaaggttgagagagacgggtattataaatggtatcagagcagaggttaaagtcaagccggtgttgacccggaagactaactatatctgtatttatttttattaaaaaaaaaggtttttctaataatatatatttttagaaagcggtttaaaaaaaaaaaaaaaaaagttttcagtattgaaatggggaaggggattttaaaaaaaaaaaaaaaaaaaaaaaaaaaaaaccaaatgagctagacttgattttaaagtagttgtgtaaagtttcggttattgtaagggtcctaatgtttagttttgtgtaaaacagaaa

SEQ ID NO: 10490 - DNA, 3000 bp, Unknown
  misc_feature (1)..( 3000): cDNA_ID_3036823_gDNA_ID_2213654_Annot_ID_181695 3000 nt of promoter + ATG
gattcaaaaaagaatttcacagttatgagtgtttgaactggaatagttttatgatgggtgaccttccgataaatgattgtcggaactatgcgagtgaggataaagcaagagaaaatatcatgtggtaacaagtctttaaagcttctcggacgtggcataccgaccgtcggacaggggtgtgctcatggggctgagagaggacgtaggatccacatataggaacggtcggggcgttaaatagggcttcactctccttttattagtctattagaatagttattagcgtaaggcgcagcaagccggcaaagatataatggtgataagaaaaataaattaagaattttagatttattttagtgaatttaaaaagtgccaaacttattacccaaaatatatgaaatatttactgaaatgttatagaaagttggaatattgttagaatatcatacattctctaaacattacttatatattttgtgcaattgtgtaattaaaattaacactcttgattagttttttttaattaagattttttattattatttataactaaaaatgattaatgaaaattatgataatccacctcattaagaggaacgttttggtttccctccctgttattgtttcgcagcaaatttacatgttacggctgaattataatgctacacataagatgaaaggtcgcggaaatctacatattacggctaagttattacgaatatacatatttttcatagccttgttcgagaacatgtagctcagctttaactgatggctcaactcattcaaaccatagtcatcgaacaccaactttacaagcttatcgtgcgttctttccgcataaatttgcacaactcttcaccctctatcgttagtgttaaatacaaattctttacccagttaccacaaataacaatttctagaaccggattgattatatcgggcgaaggatgtaagaaaatgaaaaagaatgaggaagacgatgacgaattggaagttccagtgatgtgaaaaactcaggtgaaaaagacgagttgaaaaaaagatgtttcgtatttcttttaatgatgatgaaatgaaatgttacatcgacgtaattttttaattgatgaagtagcaagtaagccaccaaacaaacatgaaaatttgcctaaataaattagccattaaacaaaactagaagtcagccgcaacatgaatactattacagtaattaaaaaacaaaaaaaaaacgacaagttaattcagtcgtttaatgttgtaactcaacctacaatctttaactcatctgtattgtttaataagtcggtcgtaattgcttgctattaaagtaattaatcttttgctactaagtcagccgtaactaggccgagttatccgttaatccagctcattacggctgatttatgacactcgaacataaatcagttgtaaggacatcccataactaagccgtctttgataactcagccagtcgaaaaagttaactcaaccgtgtcaagagaataactcagccaaagttttgacaatcaaccattaggtaaaaactcagtcgtaacttaggctgggttattcttgaaattctcataactcagacaaatctctttaagtcagccgtaatgtaggttggattatctcataactcataaaaattttcattaagtcaaccgtaattctacgctcagttatactataagttagctgttttctcataactcagccattttttcttaaatcagccgcaacatatcgtaactcagccgtccctgccattatattattttacggctgagttcattaatacatgtcagcgattactgacgtggcgacgcggttttgctaacatggcaatgaaactgaaaaatcgatttggggatttagggatttgaagatttggggattttgagatttagggattgaaaaatcgaattgggattttgtggtttgtgttaagcacaaaacgacgtcgttttagataataacgaaatgattaacttctgttatcgtttctgttaacgacatataacgttgtggtgtttttggctttttggccaagtcaacgtttttgtatttgtaaaatggctggtcaacatttttgtgttgttttatttggccacatacgaaattcacgtattaaatggtcaacattatcatatacacatgatatatcacatgaacaaactaatattttaagtttagttatagatagttcaagattacctattacatatatttttatgggcacatatcgctagtgtacactacttaccaaaattcataatgcatgaaagtattttactaacggctaatatcgctagtgtacactacttatctcaccaacaatccatgagggtaaaaagtattgtcaccaaaaactatttcccaagattttctttcgatgaaactaaattaaaaggattaccgacttataaatctcttttattcaaattagaaaacatgcttatattgctcactaagatccacatctaatcaaatcaatgataatcaataaaatatttctaaaacactattaaaatctcgagagattgaaaacacataaaaataaaaaacacgttaaaaaaactgatcattgtaaagtatacggtcatcttaacacaagcaaaaatattaatccatcaacattggataaacagactaacaacatttagaatcaagcaaatctgaataaatcgaagagaggttatggatacctgtgttggataagcttgaaaagagtaacttgaggagtaagttattaaagaagagaaaaggaaattaagctttagtgttctaggagttatctagaataatgtatttggaaatatctaattacaaatcctaggatacatcaaggtgtgatagaacttatgagatttgagagagatcgagactttaggttttgagagagtttcctaaagatactaaaaagagagatattcgtttatacttgtgttcttaatctttcttgaatactagatttggtatcagagccttgcaacg

SEQ ID NO: 10491 - DNA, 3000 bp, Unknown
  misc_feature (1)..( 3000): cDNA_ID_3036831_gDNA_ID_2213654_Annot_ID_181693 3000 nt of promoter + ATG
acgacagatggagaatatcaaatcacatatcctaacaaacgggcaagtttctttattagatcacacataggtttttatcattcctgtatatgtatattatacgatgttattaattattgtaaaggaaagtgtaataatccagccaaatatacgagagaacatgtagaaacgggaagtttttttgaaaggtatgtatgtttttgatataaaactcgtatgaaccggttttggccttataaactttcttcttttctaaaatagaattaatcatgaattgtcagggctgtagcattgttctcgttggctcgtagaaacattgagaatagaatgaaatctggagcagagatgaagaattcctcagaaatcgtagcatgtgtatcctccaaggagatacataaagagatggagaatattaagtcccatatcattacaaatagcaaccatataaaggttaagcttgagaaagacttttagtatgttatgttacaccctgaccttttatgtattgatttcttgggtcttgtccatacctatgtttttttttaatatcaaattaaaactgagtttatcatttattgcctaaaaagccgagtaaaagaacttgggatcgtcgatctcttccttcaaaatttggatgagtcggtccatggtctgaaaacactttctaatgtcgaattctaaaaacaatcgagaggttccccactcttccttgatccgtcgtaggaacgagtgggaggcctgactaatgctaatatgtatcgcttgtccaaagccacaaacttattaaccaattagcaaactgggtgttggtcattttggaacatgattatcatcctttattgatcttaaaatatgtaaaacatttcattttgttaacataaaacattttaaaataaaagtaaaatattattaaaaattaaaaaggaatataaatgaaaatgaattacaggaaaatgtaaaattaataaaagagtagtcttgaaagagaattcatagcaatttctatagaataaaacgtagaactcatatttaactggagtgaaatatagaaaaacaaaaactaataaatccaaaaatatttttgtgaaaccttataaagatgaaacattagtaaaatctagcaccagaatttaaattgatgagtgaaatgaaaattaataaaaaatatagaaattgtctttgaggttttaaaaaaataactttagataaaaattcatatgattttttagaaaaataaatataatctgtcacttacaaaataaaataattttgaactattatgtatgagtttatatcaataatttattttgtaatttaccttattgtaaaagtaatatatcttatttttattaatataagatatcaaatcataaaagcttttaaaatattttttagtcatctacatatattaaaacaaaaaatactttataaaaaataaataaaaattgagccacgtaactcggactattatctagtaaccaatggaaaaaggcaaatatattgaacgtatcaaaactttatatcatcgattgagataatagatctgttttattattcttgggatacgtagtatttaagaattgcacaaatacgatcctttgatttacaaagcaacccctagaaattattttattcgataaagtggagtttttctttactttattccacaacagacccaaccctaattcgtttcattctctcgtttcttccccaaaattctcaacttctcgcgctcctaaccctagccttcccaatttcctcatcttctagatccgcttttgtgatttggtaaatctcttctctccctcacttctaatttcgttacagggcaatgttttttacttttgatcagccaatttcaaaatcctcgtttgtttttcagaaatttctagggtttttttttggtgtgtgttttatggattgttgctatgatttagctgaattttgttgaattaaactgttttcttttgctgtttagttctattcaaagttttgtactttgtggtgaagacccaattttgttgtttctgagtcctaattcaaagactggaactttaactctttagtaaatgtctctttgtgagtaaggcatttagctttctctcctctatatataaaggtgagattttgatgagttcttgagtgaaggaagagttaaaaatgtagggtattatctagagtgtgctaatctggtatcagagtttgtgtgggattgatttgtacagactattgcttttgaaattccaagatactcagtttgttttccctctcttagtgtgtatggaattgttgctatgattttagaggattacagaagttacttggtttggtagctgacttttgtgagattcaactatttccttgtgttcttttgctcttttgttttgcttagttctaccaaagttttatcctttatggtgcagctagcctattcaaagactaaaacttaaaccctttagtaaatgagcaactctttgtgattaaaacattcaagcttctctaatctactaaaaaggagagattttgatgaaattttggttaatgaagagcaaaaatatgcattttagttgcggccattgtgcttatctggtgtcagaactcagaatttgtgtgggtttgattatatgctagctacatttggcttttgcggtgatttgctattctacgtgtgttctctatacgttatcaagtctcagtttagttcaaactgattgtgaattcttacagttatatgcgctttttgtttatatttaaacatttgcacgcttgacatttactaaaatgaacttattgtcctatcccggtttgctagactgacccttttaccggctatggttgtagtttaggcgtattacttaagacgatacaatttgcttgtgtatctgatgtaacttttttcttccgtttcgagttcctcaggtttctgtgggtatgggaaaaggtaagcttatattgatttgtcaatctggcggaaaatttgtgactgatgatgatgggaca

SEQ ID NO: 10492 - DNA, 3000 bp, Unknown
  misc_feature (1)..( 3000): cDNA_ID_3036827_gDNA_ID_2213654_Annot_ID_181694 3000 nt of promoter + ATG
gatcctctttatctacgtcccctgtttcttgaatctccatggtagcttgaatctgtactagtgtacattagtttgctttgatcctcttgagtatcttcctcatcatcacacacacgttcttcgtatacttttatacgtccgacattgtcttcaaaacttgtgtttttcaagtctaaaacttgttagagagaagctacgatctgtatatacttctttcttggaagactcttgagaaacttcttgactaacttctctgttttatgttctctcccaaagcagctgactttgaagctatcttagacaattttccagaaaaagcatagatggtttaagattctttcatcttgagacgatcaaattcattcattaggttctgcaaccttgcctcttttacactatctgctccaacatgtttttcttttattgcgtcccagaccttcttcgctgttcccagctctccaatttgtaatgtcatcacctcgggtatggatttccaatttgtaatgtcatcacctcgggtatggattggaacaagagatgcatggctatattattattctcttcacccggttctcctgtttcaatgatttcccaagctttgtgaaccttgagagcgatcttcatctttaaagcccatattgtatagtttgttgtattaagcatagggaattgaatcgatgtagatgctccagattcttttgttcttcccgttgaaacagcgagttctgacatcgttgcaaggctctgataccaaatctagtattcaagaaagattaagaacacaagtataaacgaatatctctctttttagtatctttaggaaactctctcaaaacctaaagtctcgatctctctcaaatctcataagttctatcacaccttgatgtatcctaggatttgtaattagatatttccaaatacattattctagataactcctagaacactaaagcttaatttccttttctcttctttaataacttactcctcaagttactcttttcaagcttatccaacacaggtatccataacctctcttcgatttattcagatttgcttgattctaaatgttgttagtctgtttatccaatgttgatggattaatatttttgcttgtgttaagatgaccgtatactttacaatgatcagtttttttaacgtgttttttatttttatgtgttttcaatctctcgagattttaatagtgttttagaaatattttattgattatcattgatttgattagatgtggatcttagtgagcaatataagcatgttttctaatttgaataaaagagatttataagtcggtaatccttttaatttagtttcatcgaaagaaaatcttgggaaatagtttttggtgacaatactttttaccctcatggattgttggtgagataagtagtgtacactagcgatattagccgttagtaaaatactttcatgcattatgaattttggtaagtagtgtacactagcgatatgtgcccataaaaatatatgtaataggtaatcttgaactatctataactaaacttaaaatattagtttgttcatgtgatatatcatgtgtatatgataatgttgaccatttaatacgtgaatttcgtatgtggccaaataaaacaacacaaaaatgttgaccagccattttacaaatacaaaaacgttgacttggccaaaaagccaaaaacaccacaacgttatatgtcgttaacagaaacgataacagaagttaatcatttcgttattatctaaaacgacgtcgttttgtgcttaacacaaaccacaaaatcccaattcgatttttcaatccctaaatctcaaaatccccaaatcttcaaatccctaaatccccaaatcgatttttcagtttcattgccatgttagcaaaaccgcgtcgccacgtcagtaatcgctgacatgtattaatgaactcagccgtaaaataatataatggcagggacggctgagttacgatatgttgcggctgatttaagaaaaaatggctgagttatgagaaaacagctaacttatagtataactgagcgtagaattacggttgacttaatgaaaatttttatgagttatgagataatccaacctacattacggctgacttaaagagatttgtctgagttatgagaatttcaagaataacccagcctaagttacgactgagtttttacctaatggttgattgtcaaaactttggctgagttattctcttgacacggttgagttaactttttcgactggctgagttatcaaagacggcttagttatgggatgtccttacaactgatttatgttcgagtgtcataaatcagccgtaatgagctggattaacggataactcggcctagttacggctgacttagtagcaaaagattaattactttaatagcaagcaattacgaccgacttattaaacaatacagatgagttaaagattgtaggttgagttacaacattaaacgactgaattaacttgtcgttttttttttgttttttaattactgtaatagtattcatgttgcggctgacttctagttttgtttaatggctaatttatttaggcaaattttcatgtttgtttggtggcttacttgctacttcatcaattaaaaaattacgtcgatgtaacatttcatttcatcatcattaaaagaaatacgaaacatctttttttcaactcgtctttttcacctgagtttttcacatcactggaacttccaattcgtcatcgtcttcctcattctttttcattttcttacatccttcgcccgatataatcaatccggttctagaaattgttatttgtggtaactgggtaaagaatttgtatttaacactaacgatagagggtgaagagttgtgcaaatttatgcggaaagaacgcacgataagcttgtaaagttggtgttcgatgactatggtttgaatgagttgagccatcagttaaagctgagctacatgttctcgaacaaggctatg

SEQ ID NO: 10493 - DNA, 3000 bp, Unknown
  misc_feature (1)..( 3000): cDNA_ID_3036788_gDNA_ID_2213654_Annot_ID_181705 3000 nt of promoter + ATG
ttctttgaatataggcagaatttctaaggcgaatctacaaatatgcaaatcttcaatactttaataaaacgcgaaatcgaattgtcgtcaaatattagtgtcaagcgtcaccaggggtggtgttgatcgacagttacgccaattttggtctctggattgcttctgcaacataagtcctctgttttgctcctaaattctccataatctccaaatacatctcaaacgtataaaacctggaaagtactagaaatgactctagaaataacaaaaagactctaaaaccagtacctaaatcattactaaaatcggtaaaaatcgaggtatatcatcctgcgaataagttagcacatttgaatggtaattttgatcatatgataggttcatcgttccctacatcatctttggcccaatgatactttgaaaacaaaaaaaaatgttttgttaaaacgtattgatgtaaaagtggaaaaggtctcaactcaacaaaataaagagtagcattagtagtaaaggattcattaacccccagacttaaatcacactacctttggtaggaaaaataaacatagggatgactctgtaagaaagataagttaagaacaatgtcactttgattgtggaggcaaaccgtatgatgtttctacttgcttaacaacgacttagctcggcttagtttggtcaaattccaagatataaatctctattcgcatcttccttgaaacaaaaaataaactaaaaccatcaatagtattaacaaaacataataaataaaaacatactgataacatcgtattttagcacacttttactatgttttttttaggttttccatggaaaaatcaggagttaatggatacttcaaggcatatttcgagtatttgagcttcaaggaagaataatgagtttttatgcaaaaagaagtagaagtcgacaaaaatccgtttcaagacaatttttgtgcctcagatgaagacgttcaaaagttatggcccgaagagtgaagacatgtcctagaatcgcggttttggaaataatcaatctaaaaccgccgaccgaagagacttgaacccgggcaagaaaaaagggcaagagaagaagaagagagaatggtgcgtgaaatgagaggaatggccgagtattaataattcgcggaagccagagaagagcccaagtctcgaaaatgtggagccgaatccattcgggcagagacgacttggtgagcaagttttgtcccgagcgatgcaagccaacttcgaacccacgccttagccaacttggagccgaatccacccgggcgagccaacttggtgagcaagtttcatcccaaagccgacttagtgaccaagtctcatcccactccatatgtccgaaccttgagcctataaataggaccttaacccccttagttaaaccttagaagctttcgcaccaaaactctgcccaaaccgagagagaaagaaagatcgtctgaaccttaaaaccacccaagagagagagagatcgtccgaacccttaacccgagagagagagagagagtccaagctagagatcgtcgagccttaggatagtccgagagagtgagttccggtttttgttttgcatgtttgattttccttcttgcatgttctcgattctcccttctcttagttttgtggttgttgtggttgagtttgttgaggttgttaaccgaatagctaggattgttgaaaccgaagcaccttcccctataggagtggttgtgatagaatagcaccattcgcttgagagggatggttgcgttgtcaagacattactcgctagtattcgggagacttttagagagaagtttatgaacatgtgtgttgaaaacgaaccgcatgtttcatagtgttgattggaagatcgtagtgtgtggagcttggagagtatccaagttaacgacataagcatgctacggttaagtgggatgtatctgaccttgccttgtgattccgttctttcgtggggtgtgcttgacgagatgcaagtgacctcaaggggttcgaaagacccggagagactgggttagctacccaagggccggtgtcgcttacacgacggtgtagccaaggtgatgctccggttatatgcctttgtggttataattcgggtgttcacgatgtgctgaggaaggcagtgcattcgggtcctaattaaaactttaagaaacgttatcttcttgttgtgttgtgtgttgcttgctaccttctctgtgtactctgattatttatgttatgcatgtgggattatgggtggtgattagactaatgtttccttggggaacccgagctcattgagtaatgctagattactcatgactctacttgttttgcaggtaaccttagaggggattagagggagtggtgaacactagggaacccgcagtagtttttcagtgtccttttgtataacttaaagtatgtattttcgtatcatgtacttttgggcctcatgccttggccataaaaacgatgtttatgttgtgatttttccttgtattttcgtaactctatgatattgaaatcggtatttatttaaaattatacgggtttcaaactgataaaactttgtccgagtcgacacaacatttgggtgaagtgagggttggcaagcctaagtggatctcaaatggggaaatgagtaaccttaagtgggctaaagatcggaatgtgtttctgaacctcggctactctatgggaattcatttccattgtggtgtctccgggccgtgccggactggccgagttctagtacggaccgggggcgttataacaggaaggtatatgagcatggttttgatgcttttgggatccggtttttcaaaagttttatcgagtaaatagtcgcaaaagacacataggataatccgggtcgttcaccactattaggatagaggggggaaatattagaaacctaagatcgttgttggattggatgcagatatcaaggcaagggtcggacgagaaccagtagagagatgtg

SEQ ID NO: 10494 - DNA, 3000 bp, Unknown
  misc_feature (1)..( 3000): cDNA_ID_3036960_gDNA_ID_2213655_Annot_ID_181714 3000 nt of promoter + ATG
tgtcacatgggattgccgttacaatcatgagggcactaaatatcacatgttgacaaacacctttagccatctcgtaccagctttgttttgaaccatcacttttcctgtgtatatattctgaatttgtgctctaacatgttgaaaattcaactgtctaaaccaatcagttgaagactgaaaatttgattgctgctggtagacggatacaatcatttctgccaatgtatagaagaccaatctctataataacaatattagttatgatgactcattgaactcttacgtaaacaggtcgggtttgttcttctcagctgtgccttcatgtatgacatcttctgggtttttgtttcaaaatggtggttccgtgaaagcgtgatgattgtggtaagtttttcttttttgctccagaccatcatgcaagaagactttgttagatattccaactacacatacttatctgtctgctccacactgatattatcggagaattgtacgtcttttcccattttcccacatataggtagcccgtggtgacagaagcggagaggacggaattccaatgctactaaagatcccacgaatgtttgatccttggggtggctacagcataattggatttggtgacattatcttaccaggactgcttgtaactttcgcactgaggtttgcactgttacaatctcctcttgcgctctctcacattattactatatcaagatctcaactaaactgagttattagaagcatacaaaagtatgaaatgatgcgcaaatgcggatatcaatgtaaatcaggacaacaaaccaatagaggtgctcagcgaaaacaacaaaatgtgaaaagggtttatcagaaacattggggtcatgatatacctttatatccgcatttgcgcatcatctctgacagattttttataaaacaaaatcgcttgaacctggcaaaaaaatcttataatccgacattctggttcaatttaaccttatgtccttatgctttgtgtctgtttaatgtggtttgcaattttttgaagaacttgtagatagaaatatacattacatagtctagtaaatagatgagtgtgaatgaatcaaatgtcttcagagaaatcagggtaaggttgcactaggtagacaaatggagacaagatattgtttagaaaaagaattgataactgtagggatgtgttttcaggtgatccatcttatcattttcagtaataaaaaggaaacctattatgataagtaccttaatctaatgttaaatccgatcaaaatcgtgcaccgttctgcaggtacgactggctggcgaacaagaggctaaagtcagggtacttccttgggacaatgtctgcttatggtctaggtatgatccctcacgtaggggagaaacgaataagaaatctagtaaaggttttttaatatgattcttgacaatcacaggtcttctcataacatacatagctctaaacttgatggacggacatgggcaaccggctctgctttacatcgtcccattcatactaggtaagaacactgaacccacaacagatgttttggaaccaaaagctatgtatgttttgaaactaagaatggtttgtggtgcaatgtgtcaggtactttgttcgtgttgggtcacaagagaggtgacttgaagacgctgtggacaacaggggaacccgacaggccatgccctcacgttcgtcttcaacctcaatcgtcttaaaacaacctgctatgtatcagatgggaacagataaaaatcagatgatcctctagtttttttttattgttaatacaacacaccccttcttaggtcaatatatatgtctctgtacgctttcacacaactagacaggagagcccataccacatttgccttaaataactcttttaacctctcttgctagtttctctctattattagacatgaaaccatgaatagacttggcttcttttcctgagtcatgatgatcagattttcttctataacatacatatgtccaactagtattttacagattactaatgtaaaagggtcacaagttttttagaggaattatatatagtagcaactaaaatttttcattaatatgactgatagtaataaaaactgatgctaacacttctaatataaagttgatgttgataaaagtctagcttaactgaaaagaaaagaaaaaaaaacgagtcttgaaaataaatcagaagttgttgttgttggtttgttatgggccgataccggtgacccattagagcacgttggacctatagttaaaatgctggaaaagatcttaaaaaaattctagtgatatttcaaaatccgatattcacctaaactttcgctttaaacatttgcttttccgaatttttttgataataaatattgctccactaaaaatataatcttaaattatatcgatatcacaagtaaagtaatcatcaagtcaagttcagagtctctcagatcatcgtaccgaatctatagaggaagcagccgatctcgctatcagtcggtaatatacactatcattctactttcctaatttctcttcttctttttgttttctttgagaattgcatgacaaacccttggaaaagggttgttttaaaatcatcatgaaatttgagaatatgatcggtggcttgattgaattttcgttttgtgtgagtggtctttctgtttgagttttaaaatttcggagagtggcgttttaagattcgataccatatccttggataactattagccagaacaatactttcaaattttaaagctttgattagagttttaaagcttaggggaggatcacaaatttacaatattgatcttatgaatagagaacctctctactactactcttaagatttgttgattaaaataaacaattgtggcatgtatggttaactttgatcttcttggtatttcgttctctgtttggccaagtaatactacatactaaagctttttggttgtgacattagtttgaataaactaatg

SEQ ID NO: 10495 - DNA, 3000 bp, Unknown
  misc_feature (1)..( 3000): cDNA_ID_1010689_gDNA_ID_2213655_Annot_ID_181728 3000 nt of promoter + ATG
gcatctgttccgtccacataaacgaaagctgcgtttaaacatgtcacataaagaagccttcatgggatgggaagcataaggattctaactctaaagtggtaaccgtaaagcatgacgacttacatcttcatcgtctttgtaaccaattttttccaagatctcaaccatagacgtcaggtcttttcccgagcaagcctcagcaaaaggagacggaggtgacgcaaaagtaccactttgaggcagacccattagaacatgagacagaacctctgtgtctttctggagagatatcagtgcagtgaccaaagattttatgtttggtcgctcacgagcttcatactgaagacaacaagatgtcaggcgtactaactccgtaccatcactgtctgaaaattgtccctccaagcaggaatcggttagagtctgaagatttctgtctcgaatcaaatcaagggcctaaaacacacagcaaaaggctgagataattaataaagagaattcaagaaacgattaaagtagctaccatgggcacttacatggctaggaggaatatgctttccggtgagaagatcaagcagaagagtgccaaaactgtaaatcacactctctgctgtgattctccctgtatcaacacacacttaagtctcaagttgtagaaattgttggaaataatatgacctacgaggagggtgcaaatcaatttcaccagttcgtagatactcaggtggggtaaaagcaagatttgtgctataacttttcccatcccgactattcttcattaacccaaatgttgaaagtcttggattacattccttataaagattcataaacgcattagtgggggaatatagcataaaacaaaacatggtttcccggacaagagttgcgtttaagtaattacctcgtcaaataaaactctgtaagcattgagatcatgatatagcgtgtgtccattgttactacagtattcaagagcttctgaaatgtatagagcaacccttagtcgcatcgcccatttcattggctctgtatcccctggtagatgataaaagtggtaagcaaatcttaggagaaaatcttgaaagaaaatcgaaagacaattgatcaaaggcattttctttttacagtggaaaaggtgtttggctagtgtctcattaggcataaactcagccacaagtaacctctcgccgccttcacagcaataaccgagtaaattggccattcttttgctgcgtagctgaccaaccaatcttgcttcttcctggaaacagacatatccaaagttaatagatttgagaattggcaactagataaactgaaaggtacatgccataccaggaattggcgaggatcaggccaggcagttccagaaaagcgcttgatagcaatcttcatatgattctccaatttcccttgatagacaacatttggagctgtttctccatgttcagatacaacattctccaaagcaaaacaagaggtggcgatcttaagctgttctagtgagtattcacgaaaagaatgcacaccgtttacctcaccattctctttgttttctgtaatattgtaaaaaggggattacgatatcagccaaaagagggcttgtcgttgtagcaagagagaaaaacagagacgtcaccaacatctggagcttcaagagcagtagtcttgtgtgaacaacatgtaccaatctttgagctttgacctcccatggatgcgttgcttcaaattttcaattataaggtaactggggtaaatatgtctggaaacaaggagaaatttcccaatcttactacttacagagagatatcacgcagagatcaaaattgaaaatggggtacagaaataggtcgtaccttgtcaagtcgctaccattctagtgagccaactcggcggctagtgacagcgagaccagttactaatttggaccagatgaaagaaagaagcaaaacacagctgaactaggaagccttcttatctagtcatctagatacacatttgccgccggtattcgtatcgatgggattctatttctcgcactagctagtagctaaatccacgaagtttccatatataactttctcgatatcaataagaggctttaaaaaacactccagaagaagagagactgtattccgatgttgaagtagccaaagcagaccgggaagtgtcgctagacaaatagtataccgacagagtataaatattatggttggacttggagaaggcaaacaaagaatctaaagccgccacaaattttctcaatttaattgatcacgtacaaaaaatattggggttttatgtaagcgagtgtgtctgtctttcggtgggataagcccatgggcttatgttaggccctcattgaccaacaatttttttctgtttggtcctcaattaaccaaaacaatagaaaacgtttttgtgagtccaaaggttttattttctcgacatgacactgatacaattggttgcttattttgtccaaatccattctttggataatatgatgatcaatatctgcagtttatcatagcgcaaaacccgtttgaagagaaatgacgaaatcgaaggctaattattgtttttttcgctaaattctaattaaatccgcacccaatagattagcaaagtctacgaccaattgtgaggaaagaaaaagtcaaaaaaattgaaataaaaagaaagaaaacatgtacatcatgaaacctcaactccccaatgatgtccggaacaaacttcaccacatgtgcttgcatatacacatagatacatgtgtattatgcgaatgcgtgaataactgaatataatatagactcactctaatatatctaatgaagtaaatatggcaacaacgtgacagcatctaagtcttcttggttttaagacgtgaccagcctaacgacccaaccaaactacttgtctattcttcctcccaccctctaaaacccccctaccttctctactttcagatcatcaagccccaatttcaagcagagaaca

SEQ ID NO: 10496 - DNA, 3000 bp, Unknown
  misc_feature (1)..( 3000): cDNA_ID_3036913_gDNA_ID_2213655_Annot_ID_181727 3000 nt of promoter + ATG
acaaggttcactagctgctttataccaatgtatcatggaaattgcagtagttactagcatatatcgtgctaattcctttccagccactgttttttgtagctccagtaccaccatcagagtttcagcattcagaaactgcgcaagctactttaacatgcgggttagttttcaatactcttcctcacatgacatgtgtgtcctttctttgtttcttaaaaggtggtgtgatctatttgttggctcttagatattccttgtgttggaactattctggcttacacgaagttattcttggaacaaccggtagaaagcaaggcacatcagctaaaggagctctgtatccgtctactcaatcatctatatgcaagtaaggggatgagccttgttatccaagcatgaccttcattatttgtagttgatatcatattcatatatttttctagacagcggttactggagctattcttgaaagaaactcatggacacaaaagggaatcttccaagtcaaaaaaatcgtaccgagaactgaaggtgtgtgcgatgctgattcttttctgcagctttaacatgcttccactggaacaactaacatgctaaagtgtataaatctcatagtgagtttttgacatgtatgctgcaagattgtgattttgtgatattgttctctggttaattctgagatgatttacgtttcttttttgttttaattgtatgcagaacaaagctacggaatattatttgatgtcaaagatttttaaaggaaagtatccattcaacaattggctaagaaaacccttgaattgcgaggattttctgataaattagacgtgaggtatgtcatcctatttactctctcttttagcgtatgttctttgcatcattagttcattagcatcaacaagttgcttgaaattgccagctttgttcagggaagcaaagtaattatctattgggatgattattgcgtaccgaaaaggaaaaaagaaagaggtgagatcttgaatcacagaagatacaaatagtaaagaagttaaatgaaaaatacccaagaaaacgaaagcagaaaatatgaattttgactgaaacgaattaagatgcggtaagttccattcagagattgactcgtcccttgatgatgtcgaggctcatctcgctaggatctgttgcttgcaattcaacttgaatcccatccaattccctcttgaacctgtcctttgagcttgcatacaacatcttactcctcactcttgatgtatcaggtgacctgaagcaagttgatgtctcaattataacatctaatttttcaaatcattaaaaatacaagggcagggagttgtaccatgcgatgaaaaagattttgctcttctggcagttctcaggggtggtgaaatcatagtcatagacagcatatcggcactcatcctcgggaatagatctggtgaaatcttcgtaagtttcttctggattcccaagcttgtctatcataacttgctgagccttctcatcaattttgaacacaatgaacctatagttcctctttgcttttaactccaagaacttgagcttgcactcatcgctaacgtgcatcccagacgctgaattagcctgcacagtcaaacacatgcatagtcagttaacttatatgatcacaatacattacatgaatggcaataccagattgataaaaatgaaatgtaggaagagaccattgttctctgcttgaaattggggcttgatgatctgaaagtagagaaggtaggggggttttagagggtgggaggaagaatagacaagtagtttggttgggtcgttaggctggtcacgtcttaaaaccaagaagacttagatgctgtcacgttgttgccatatttacttcattagatatattagagtgagtctatattatattcagttattcacgcattcgcataatacacatgtatctatgtgtatatgcaagcacatgtggtgaagtttgttccggacatcattggggagttgaggtttcatgatgtacatgttttctttctttttatttcaatttttttgactttttctttcctcacaattggtcgtagactttgctaatctattgggtgcggatttaattagaatttagcgaaaaaaacaataattagccttcgatttcgtcatttctcttcaaacgggttttgcgctatgataaactgcagatattgatcatcatattatccaaagaatggatttggacaaaataagcaaccaattgtatcagtgtcatgtcgagaaaataaaacctttggactcacaaaaacgttttctattgttttggttaattgaggaccaaacagaaaaaaattgttggtcaatgagggcctaacataagcccatgggcttatcccaccgaaagacagacacactcgcttacataaaaccccaatattttttgtacgtgatcaattaaattgagaaaatttgtggcggctttagattctttgtttgccttctccaagtccaaccataatatttatactctgtcggtatactatttgtctagcgacacttcccggtctgctttggctacttcaacatcggaatacagtctctcttcttctggagtgttttttaaagcctcttattgatatcgagaaagttatatatggaaacttcgtggatttagctactagctagtgcgagaaatagaatcccatcgatacgaataccggcggcaaatgtgtatctagatgactagataagaaggcttcctagttcagctgtgttttgcttctttctttcatctggtccaaattagtaactggtctcgctgtcactagccgccgagttggctcactagaatggtagcgacttgacaaggtacgacctatttctgtaccccattttcaattttgatctctgcgtgatatctctctgtaagtagtaagattgggaaatttctccttgtttccagacatatttaccccagttaccttataattgaaaatttgaagcaacgcatccatg

SEQ ID NO: 10497 - DNA, 3000 bp, Unknown
  misc_feature (1)..( 3000): cDNA_ID_3036921_gDNA_ID_2213655_Annot_ID_181724 3000 nt of promoter + ATG
ttttgtgtgtctgggttaaattttttaattacattgaggcattattccagtagggatcttccagataagtaactattacgagttactattcctcatttggtttgcaggatgtggtttcaccgacctctaagagccgacgagtggttgctctatgtggtagttttttctatccttgtttcttatgaacatttcagatcaaatgtttgttcagaataaatgaaaatgatttttggtatagagttgttttataaacttgtttgctgtaagaggttcacccacttacaacacaaaggatgctgcttgcagattgtgagtccaactgcgcatgagacccgtggttttgtgactggtcaaatgttcaacaggaaaggagaggtactctttctctattcttttgaaccctattatacatacatatctggaaatgataagtgataaaagaattccttttggtatgtgtttttgaatatgagaacaacagctggttgtatcattaacgcaagaggccctattaagagaggctagacctccaaaaccctccggcacgtcgaagctctgaatggctctcaacgtaagttaaataagatacattattacgagtacaaggcgacgaataaaaagatcaaaaaccaatctgggtgggtactaaataaaagattttattagacaaactcataatgtcaatgtagcacgctgtatgtacattgtttgattccggccttctcacctctatcatcatctatctataaattctcttgttttttttttttgttttaaaattctttctcacaagaacacctttagatcgattcgtgggccagaaaattatgggcccaagtatcaaattagttttcgtacgacccattttggatccgcgggggtatctttgatggaaccggtacacctgcttaaccggccggtttatagttttgtatccatttgtgatttgcgggtttctgttgccacctccccactctcctcgcttttgttggtcttggaaaaaccctgggattttgggtatctctgagcacgaattctacattctcatggctttcgaacacagaaatgaagacctaaattccttggattcggaagaagatctggagaaaatggagtcagaggtggagcaaatgtcgcgcaaggtttccgagtacaggaaaagcctaccgagtaatctgagcaattctgtgatttcttctcgtagatccaattttcccaacatcgattctttgggctttcgcacaactagcacaggttcgtacgtttctttgcttatatttagttagataccttccttctcctttggtttcagctggaattttagtctctttttctttctagatgatgtaataatagattgatcctctacattattcgtggatcattcttgtgaagaccaagttgtttagcagcagcagacttgccttttgattgtgatgtcgttttttgcatttaggtttgtgtcatgccatgcgtgtagaatattgtgatacttgctactataccctctggatgattatgttcatgagttattacgcttaattctgaggtgatgatacatatacaaggcttttccattacaataaatcatgtatttttgtggcttagaatcgacaagcatgagactatgtgatgatatgtttagctaagctgagagaaaatgattgtttagccaatttttgtttacagataccatgagataagtggccacattaggtgacactaagatttcatagcattgtaatatacacaagtctctagtgaactgctgttgtgataaccaactcatcagttattttgttccttgcaagtttggaagaacctctagtgtcaagagatggagcacatataggtggaatcgaacaagaatctcgagatagcctgattcagctcaaagaaagagtgtacgagaacattgccacagtgcctctagttgtagagagaatgcgagagagtaaagagagaatcgacaagtccatttctttcaatggaactactatgcacccggctttcacaaggcggaaagctagctaactgatcagtttctacttctccctattggctttaccactcaaagaaagctaatgcataggaggagatatggctggtatttctttctactatattagtatcaaccaacatctctcgcatttagaataagagtataccataacctctgttttgattgtgttctacattgaaacaggtctttctctgattttaatatggactcttatagaatcttgggctgattctacaccctgtatgtatatgtaagaatcacataatcagatggttgcacaattgtcaagaacacccaaatccaagcttgcgatttagcaatctcacccgtgtaagaaacttaaaaccataaaaccaattgatataagagcttttctagcaaaaacttaaaaatataattaacaccgtcgaaaatggtggaggctactagagcgagatataaactttatcaccgtttaatcgtgtgggattttgaaatgatatgaacctattgcaaaaagacaaaaaaaaaatataaacggaggaactaggcagtgggaccggagatccaccgaccggaaacgaagaatccatagtaagatagagcccaggggttcggtcgtatcggaccggtcggatttggattctaacgacaagtgagtggacccccagaaacgacagacgtaagcaatgacaacatcaaactcatcgccacgtcagcaacggagttctacttgcgaaacgtgtcccggcagcgtcatccacccacgtgtgttctagaagctcttctcctcctccgtatctcgacacgtgtccactccctctccttatataattgacttttctctcattctttccaagtttcaaaaacgccaagtttcagaggtagagagagagatactacaattgattaggataggatcaggatcatcctcaacaacctcctcctaattcctcctccattcatagtaacaataatattaagaaagagggtaaact

SEQ ID NO: 10498 - DNA, 3000 bp, Unknown
  misc_feature (1)..( 3000): cDNA_ID_3036925_gDNA_ID_2213655_Annot_ID_181723 3000 nt of promoter + ATG
ctgacttttgatatatattccaacgacaagcgtgtccaagtttcttccctcacttgtcattgcagcttacgtgtttggtgttgccgcgtgatcactgtcatttgcttgagactaattccatctggcaatcggatacgtcacttgacaaatgctctttagtggaacgcattttgcaactcgaccctttagaagtacgtacggacggtgttcttctttatcacatttctttctgcttctggcaactgaatctctttttctctgtgcttctttcttctagttgaatatcttcagggggatcacactacctgatgctcctatatttggaaaggtttttggaggacaatttgtcggacaggtatcgcattttctctaggaaggttacattattatgtctctgtaaaccttgctgatctgattcatgtgcatatatatattgcttgttaacagtgataaccgtaaccactactaagtcacttttaccaacattttacaggctcttgctgcggcgtcaaaaactgttgattttctcaaggtcgtccacagtttacactcctattttcttctcgttggagatattgacagtatgtacataatctcactggggcactttctagccaccaatgatgcctttcttccctattgaaacccaccctgctgttggattcatctgattatcatagtttgttgctcttgcttgcagtccccattatttatcaagttcaccgcatacgtgatgggaacaactttgccacccgaagagttgatgcagtacagaaaggaaatatcatattcatcttgctggcatcatttcaggtttcccattttattctttacaagatagcttatgaatctctacgtccacctgccaccaagagagaatagcctttcacaaaactgggaaaattgttttcttaaattttctcttttattactttcatagaaagaacaacaaggatttgagcaccaggagtcaaccatgccctctgtaccagatcctgatacggtaaatcatttctccagatttaagggttccaataaattgttgtgtgttttatttttcaccattatctgctacagcttctatcactggaggagttgcgtgaaagccgtataactgatcctcatttaccgaggtaagtggtagtgttttccaatgtatgataacttatatcaaaagctcaagttggaccaatcttccaattgtttctttctttcaggagttatcggaacaaagttgcaactagaaactttgttccatggcctatagagattcgattttgtgagcccagcaattcaacaaatcagacaaagtctcctccgaggttaacaactcgctgaaataaatcaattatatcatagagtactcttgagtgtatactcataaattccattaagtatttcttaaaaaaaaaatcaagaaactcacaatgccttcttgcagattgaactattggtttagagcaaagggaaggctttctgatgatcaagctttgcaccggtaagtaactccatctatgtatatcaaggtaaccatctaaaaattggtattattcatctggtaacaatcctttaaactttaaaggcaagaatgattgtagacaagtgaatcaatggtgttttagtatcccaagttgataggttgagacttgtaaaaggccaaactttcttaatagcattgaaaaactgacggtatattgaaattcaatttatcattcttagcaaactaatcatttggcaaagccatgttgatatgcagatgtgtcgttgcatttgcctcggatttaatattttgtggtgttggtttgaaccctcaccggagaaaaggggtgaaatccgccgcacttagcctggaccatgcgtaggtttttattttctcttggtgatgtatgagttttgtgtgtctgggttaaattttttaattacattgaggcattattccagtagggatcttccagataagtaactattacgagttactattcctcatttggtttgcaggatgtggtttcaccgacctctaagagccgacgagtggttgctctatgtggtagttttttctatccttgtttcttatgaacatttcagatcaaatgtttgttcagaataaatgaaaatgatttttggtatagagttgttttataaacttgtttgctgtaagaggttcacccacttacaacacaaaggatgctgcttgcagattgtgagtccaactgcgcatgagacccgtggttttgtgactggtcaaatgttcaacaggaaaggagaggtactctttctctattcttttgaaccctattatacatacatatctggaaatgataagtgataaaagaattccttttggtatgtgtttttgaatatgagaacaacagctggttgtatcattaacgcaagaggccctattaagagaggctagacctccaaaaccctccggcacgtcgaagctctgaatggctctcaacgtaagttaaataagatacattattacgagtacaaggcgacgaataaaaagatcaaaaaccaatctgggtgggtactaaataaaagattttattagacaaactcataatgtcaatgtagcacgctgtatgtacattgtttgattccggccttctcacctctatcatcatctatctataaattctcttgttttttttttttgttttaaaattctttctcacaagaacacctttagatcgattcgtgggccagaaaattatgggcccaagtatcaaattagttttcgtacgacccattttggatccgcgggggtatctttgatggaaccggtacacctgcttaaccggccggtttatagttttgtatccatttgtgatttgcgggtttctgttgccacctccccactctcctcgcttttgttggtcttggaaaaaccctgggattttgggtatctctgagcacgaattctacattctcatggctttcgaacacagaaatgaagacctaaattccttggattcggaagaagatctggagaaa

SEQ ID NO: 10499 - DNA, 3000 bp, Unknown
  misc_feature (1)..( 3000): cDNA_ID_3036928_gDNA_ID_2213655_Annot_ID_181722 3000 nt of promoter + ATG
gaagatctcctcatcaacgatcaggtttgctacttaatctaaaagacttaagagttatcttctgtagatcgtctcttcttcttcttctgaagaaaagttaattaagctatgattgatttcatatttggtgctgacttaagacttaagagatgttatacgtttaatatgggtttacacataatttaaaattttagcacttgtttttagtatattaataaatatttaaaaatatacttttatttaactcttaacacttgttttaaaacataactaaatgttaaattctccccactaatattattcccggtatctaataatctatatacagcgttcgtctttcttacataaggaaaacaattcttaatatgattttacttcaatttgaatcttactaggtagaagaaattaaaagtaattatactcatcattcttctcctctcattgttttgtctacataaagaacatcatcaatccaagcaactatgttaaaagctaaaccttcaagaactcttgaataactctctaacacagcttttccaacatcctgcaaaccacaaaccataaattgttataatattcaataaaacatgattcaggtcactgtttgtttcttaattaccttgttgcaatgaatcttgcaaatatctaacgatgtctgagacaattctgggtaccgttgtttcaaacagaagagcaaagactctgctctctcagccaaaacatagttcttgtcacttctctctgtaattgacattaaatctttcaccatattccatgaagacttggaattgttaagacaagctttgcgtctccatgtgtacattgaagcttctactctatctgccagctgaagcgcttcatgttctgatacaatcttgagacgatctagaagtttttctggtgaaaaccgccctgaactcgtcatgtgtcgatagattgcatctcctgtgctcgcttttccgctctgcaaatgcataatattgtaagcaagaaaatgacaccaaaaatagaaaaccaaaacttcaaaatcatcttaagtgtggttacctttggaagagttgccatgtaagaatcaggaatatccatttcaccgagtatgctgctattgatggccatagcagctttatggatttgattagtgctctctcgcttgctcttaagttgtttccttgccttctctgataaaccttgtaatggaaccagaggaatcggtaaccaccatttctcttctttcctctgcacaatcactttcctgaatgatccagttgcggaacgcgttgacttcatcgacaagcttccttcttctgcataccaaaactctgtcttttgaaaactatccaatgcctcctgcagaaaacaaagagaatgacttttatgaggaatattaaccgagtcaatcttattgatgatagcttcttgttctggtgtagtaactaccataagcatggaatctagttttctgagtgcaggcagattgatgtagatatctgctcttggtctactctccatgacctgacaaaaaaaccgcaacagctatttttaaactattgatgtttatttcagtttttggacttatatctataagcaaatcttgtttacctcaacagtggctccattgcttagattctgtgactttgggataaactcgaaaatatagtcacacacagagagaaggcaattcatttctctcttccacgtcgtcttctgctctatctccaatggttctaatcttagattctgtccaaaaacagtagctgcaaatctcaaaatcaaaagacattaactacagtttctctagatggcttagtttgaaagtcacaaaactgtgaggcgtattagtgtttagttaccataaagattggttatagcgtttgagattgtcactgcggtgcaaacgcctttgccgcttcctgacatatcttccccaagcagaagcttcgagaatctttccttcatcgtctccagctctgctacgaaaccgataacagtttcatgattataatgacaaagaggaaatacagacacagagaaagagagagagacggagaaacacaaaacctggctctgaaatttcttggaccgcaaggtgctcatcagtctcaatctgattatgtttcaagtcgaagacagttggaaaatttgagctcgcagagttgttggattcggttaagacaggccaatcactaggagaagcctcagtgcagaaactgctggtttcatctatttggtctgaaaagcctcctccagaggtttcagaacatgttcgatgataagcaaaagaatctgtgctcattgttgagtaaaccggagtttcagatgctgaatgatcatttggatcgatgggaccaggtgactgatgatagcccacatcgtcgttttcttcgtgatttggcaaattctccatcttctcaatgttctgtttttgaaaattcctctgcttttgttgatctcttgttttaataaaagaaataaagcttagaactttcgttgtgatgtatcaggaaaactttagaatatgaatctaaatccgacaattagaatcgggaattatttttgattcttggatagtgaaattttgaggaccagatagcagtaaagtagaagaattgttttgtttttttttggccaaaagcagagaccgttaggcgtgccaaaatcaaaaagcaaaacaaaacataaagaaacgaaaagaaagaaatgaagtaatcacaacattatttatcgaaactttcacgaagatttattttattactataacaaacatttcgcttatgtcgatcaagatacatgaaagtctgaaacttgaaattttgaaaaacgatattaaggaagaagaaaaaagcaacggtctttattttatttacctttaaggctttaaagcttctgcaaatttgtctttgaatttgaaacgcttgaatcttttataacgtttataaaacactctcttttccgcattaagctttctacacaatttatcggtgcccggaaaaaacttgaaca

SEQ ID NO: 10500 - DNA, 3000 bp, Unknown
  misc_feature (1)..( 3000): cDNA_ID_3036932_gDNA_ID_2213655_Annot_ID_181721 3000 nt of promoter + ATG
ttgtgaaaggctattctctcttggtggcaggtggacgtagagattcataagctatcttgtaaagaataaaatgggaaacctgaaatgatgccagcaagatgaatatgatatttcctttctgtactgcatcaactcttcgggtggcaaagttgttcccatcacgtatgcggtgaacttgataaataatggggactgcaagcaagagcaacaaactatgataatcagatgaatccaacagcagggtgggtttcaatagggaagaaaggcatcattggtggctagaaagtgccccagtgagattatgtacatactgtcaatatctccaacgagaagaaaataggagtgtaaactgtggacgaccttgagaaaatcaacagtttttgacgccgcagcaagagcctgtaaaatgttggtaaaagtgacttagtagtggttacggttatcactgttaacaagcaatatatatatgcacatgaatcagatcagcaaggtttacagagacataataatgtaaccttcctagagaaaatgcgatacctgtccgacaaattgtcctccaaaaacctttccaaatataggagcatcaggtagtgtgatccccctgaagatattcaactagaagaaagaagcacagagaaaaagagattcagttgccagaagcagaaagaaatgtgataaagaagaacaccgtccgtacgtacttctaaagggtcgagttgcaaaatgcgttccactaaagagcatttgtcaagtgacgtatccgattgccagatggaattagtctcaagcaaatgacagtgatcacgcggcaacaccaaacacgtaagctgcaatgacaagtgagggaagaaacttggacacgcttgtcgttggaatatatatcaaaagtcagcaaatacctgggacatagcaacaatgtctgctgaatgaacgttcccagataaacctgtaggaggaagaaaaaagacaaggaagctgagcatatatcaccaaacccaaggttgaacagaaagcattcatctctcaccaacgccgaagtaatcatactgtttcaagaggaattcggaacggttatcttcttcgtctggtccggaaacctgagcctgcaaacaagaatcaaattataacaatggcgaagatagatacatcgatatctagtctcagaaacaaacctctccttgcaaaataaaataacatccatcccaagtttgatcttcacgaaccacataatcccctttcccttcaataatacaatagagaacaacacagctcaatttttttatatcgtgaaatcagagagaagaataaatccgaaattgagaatggaccgaccgtaacgtttcggcacaacaacttgagcaattttcttcagagaagagctcggtaatttctggagtaaagggacgtttccaaggaactcgacaactacaaaaacagagcagcaacaacatggaattcgccgaaaatctcactacgtcattcctcaatctcacgttataggcttacctgactcggtgttcatggcggattcggctagtcggaagaaatcgccggttggatgatgatgattaggtgtgagaaaatgtggtttcctcccacctggcaaggtaaatcaattgtatcaactaccagctccggtttatggaagaatacgtggactcggttcgatttttatttctctcacgtgttataaataaaataataataattagtattaataaatgaagaaatatacaaataatattggtgtgatgtaatttaattcttgagatgaaacaaaaagcaataaacaaatcctacaacctcaaggcccattaatggctttaaggccttaaaataaatccgaactaagtaaatttctaaatggcccatgagaagagacgataataacagaatctcagtcagctgttattttaattcgtttctagtctaatgtttctatttgaatcagtatttatttttcttttcgtttaatttgcttgtttaaaaccaatggttactatatgcaagttatagtaaccactccggacgggttttcgtcttgttcgattatcactcagtggttaattaaattgttaccaactcctgaaagctgttatttttcgtttctagtctatgtttcaatttgaatcagtattaattttctccaaatcatggatgctttctcgatcgattgggtctcactgtcacgatggattttcctcctacttaatcttaaagcatatgtacatttggaaacagatattctctgtagctatgtgtttctcgcgtaacacgctaggtacctttggggtttatgatttcgtatcttcaattagttgttttagttgaaatgtttgaaaaaacatttcacaatctcaaccgtaggatgagtcatccttccccatcggacggtccacattgttcaagttttttccgggcaccgataaattgtgtagaaagcttaatgcggaaaagagagtgttttataaacgttataaaagattcaagcgtttcaaattcaaagacaaatttgcagaagctttaaagccttaaaggtaaataaaataaagaccgttgcttttttcttcttccttaatatcgtttttcaaaatttcaagtttcagactttcatgtatcttgatcgacataagcgaaatgtttgttatagtaataaaataaatcttcgtgaaagtttcgataaataatgttgtgattacttcatttctttcttttcgtttctttatgttttgttttgctttttgattttggcacgcctaacggtctctgcttttggccaaaaaaaaacaaaacaattcttctactttactgctatctggtcctcaaaatttcactatccaagaatcaaaaataattcccgattctaattgtcggatttagattcatattctaaagttttcctgatacatcacaacgaaagttctaagctttatttcttttattaaaacaagagatcaacaaaagcagaggaattttcaaaaacagaacattgagaagatg

SEQ ID NO: 10501 - DNA, 3000 bp, Unknown
  misc_feature (1)..( 3000): cDNA_ID_3036936_gDNA_ID_2213655_Annot_ID_181720 3000 nt of promoter + ATG
aaacagtgaagagctcaaaattccatcttttggtagactaaagtaagaagatgttcatattctagattacaaagctgtgtattgttacttcaggaactaacttcgaatgggacgcagagaaggaaactgaaaggattctgaggacagcgaggaggacaaagaggaagttcggtaaccccataataattaactgaaattgaggtaacttagaagtaggaggagcgtagcctcctctgttttacatgtctatatctgaagcatgtttaagattatttaaaattgggatagattttcacagttgtgactctattggtacttttttattagaaggtatgtcaggttcatcaattagtaattgagaaaaaatccaacaaaaagttataagaaccacttgtttttttttttctaatgtaaaatcaaagaggtgttcattcaaatttggatgttacttttacaatttaatattcttaatacaaagaaacaaatcttaccatagttgttcaattaactaccaaaagtttgagttgtcttgaaatttttgtattgattttgaatagattactttctttttggaatttgaatagattacttaatgaattaatactggtactaaataattaaatattttcaaccataaatgataaatgcaagaaccaataatacgttcatttttggaagatgttaaataacagtagattgtgttcagatttgttctataaacaaaagcgatgatacaatgaccaatcaatctgttagtgaaaaatttcaccagacagaaataataatttcctctctttcttagtaaagagtctcatcgtcgaaaacttttggcttttaaatcttttgttgtcagtgtttgtaagagatctgagattctaaagtatatcagaactcgttggtcagttagtatatatctgaaatgccagtcgaaaaacatgtggaagaaaagcttcgctcaaatagaaaagagagaggctggatatctggtattttcagaaggaagaagagatcaccacaagaagaagaagttgataatgaaaataactcatctgaagattctcgtttgatgggagccaagaatttgcatttgtttctctctgagatcatgagaaaactgaaacatgcaatcagaaaggagaaaccggacaagagattgttagggaagaagaaaagctttgagaagagtttgtcaactaaagatcatttctttctcgagcgcatgacttcaatatctcaaaagagatttcatcaagaacataatgatccaaacttggcaacaagcaaacaggttcaaagaaatcacgaaaggattgtatggcttcccgagtattcgtctccttttagcagcccgggaagaatatggaaacagaattcaaccgtgcttttgaggtcttcttcatatgatttcatcaagtccgaaacaattgcaggtagtttatcttttctctcatttgagatttaaagtagttattgactatccaatgattctttgagactctgcagatgattcaataactttgaaagagataggaactgcttcatcaagtgaaggtagtagtagccctcttctatctaaaagcaatcagattgttgatgagatgtcaaaagttgcagcttatggtgcagagaatgaaggtgaattcttggaagaggcaagttcacttttgatttctatacaaatttttacatgaaaaaaacacagagaataactataaactaatttggttgcttttgtttcttctaacagacactgtctctcccctctgtgggctcaccatctcactatatatctaaaactgaggaatatgactttgttcttgaaccactattcataagtccagcaagaggtatgaaaagaaaggtccaatattactggagttagattttaacatgaactaacattgactcatcttaacacttgctcaggtgaagcaaagatacaacctttgtgtaaccaattgcaagaaaagaatcgtcacaaagaatcagtgtttaagtatgtaaaagcggtgttagaggcaatagactcaaactgggaagagctgtatctgaaaacagaaatctctgaccagcttctatatccggcattgatcagcaacataccattctatccaaatcagctttgtgttgaacatgagctcctcttcgactgcatcaatgaagttctcttcgaattctgcaggtttcctcaatgggtttcctttgctgaaaccaggacccaagtcttgccatatagtgttgaaagcattgttcccgaggttcaagaaaaggtttattgtcatctcttgccaatgcaactccgtcgatcgttggaagaaagagttagagaagatatggctaaacacaggagctggttagacattagatgtgaccttgagtgtattggctttgagactagcgaattgatattgaatgaattattggaacagctgatgcttgagcttgaagataatcacaaaaatggttaaattgcattaagatatgtaaagtaacggagatattaaaaaaattattatccaaatcaaaatgtcaaatgggtatgttgggaattttcgtctctttctaagcaaatcagaaggtctagttaattagttatcaaacatatttgggcctaatacgagattgtattactaagtcacatgggccatcgaagaagtcacattgagtgatttaaaaacgataaccatattgtgggggtagtttgggaatttcgtctgtccatattgatttcctttttcttctccccgctcccgttacaaagatttccatttttccatgtttatgaatatagcagtaagtagtaaccaaccccagagagacctaatcgatcgcaatttcctctctttctcatcagcaagccatcttcaatttcttttctctctttttacttagatcactcatgatctctattccacttttcaaatcaagtaatctatttgtgtgtgttcgatttatgaagaataacaacaaaatcgcttttcgttgtttgggggcatgacg

SEQ ID NO: 10502 - DNA, 3000 bp, Unknown
  misc_feature (1)..( 3000): cDNA_ID_3036948_gDNA_ID_2213655_Annot_ID_181717 3000 nt of promoter + ATG
tgaatcaagatgttcgagaaagtaaaaaaactttgttatgggctttgaaaaatcttcaagtcaagaagattttccttcttcatgttcatcttccattttcgttgaccacttcttgtaagtctttttcttttgttggtacattctctacgttaacttttgcaaattttgttttgttggggctgccggggatactttcataaggggaagtagcttgtttatggacgattcaattatatataacttgtcacgttgatcggacgaaataatcaatttatttaataattcttatatttacttgaattctgacacgtcttagattagatgattgatgatatagtttgttttaacaattaaaaccaaatttggtttcaaccctacctacttccaaaacaaattcgttttttgggcatatacggctattactagctatttgtagttaagtcacacatcatgttttaatttgacctttgctttatctgttcttctagtgggagttaaaaagtacataagatgttccagggagattgcaattgcacttatgtcacatatgctaagaactaaccttgaatcaatgcagatgttaggattggaatttttactctgtttttgtttgtgcattttcagcaagtaggcttgaacaaagtgagatcgatgcaatccaagattcagaactgaatacttcagtaaatagcctctacaagtaccgtgatatctgcataaacaaaggggtgagttctcttttcggttgatggagctaaaaggaaaacataatgttgacttattttatttaatagaaatctatattgatgcaggttaatgaaaaagatgtggatacatcaatgatctcaggacatgatgtgggggaagggattgtggaactcatctatcaaaacattatcacgaacctcgttatgggagcagcagctgatcctcactattccaggtaaagataacttgagaatccatcaatagtgaatcaatctaatgtaaaccaaaaatatagcaaaagactctaaccttctctttgataaagcaggggaatgtctatcacatctaggaaagcagagtatgtgagtcaacatgcacctcatagctgtaaaatatggttcatctgcaaggggaaactcatcaagcaaaggttagcttgggatattacacgtgtgtgtgtgtgtgtgtttatagtactaattgtagagttctaacataaactttcatttgtttaatagagaaagaagtttctacctcgggaatccatcagactcattctcagaattctctacttctgctgagaaaccaattagcaaaggaagaagaagggatgaggaagaggaacccgagtcacctaaagaacatccagtaagtagcaagattgtcataaagttagacaaaaccctatatataatttagtgtcaagattaccaattgagattcttgtcgtgtaaaaccaacagggttggatactagaacctgaggaatcaccaaagaaaggaaggaaggaaactatagagaaatcaaaaagcaatgagagcgatgaagacccacgtctcgaagatttcaagtgtcccatttcaatggttaggatatttgaagtatatatatatatatatatatttccttgattttcagctcttgaaacaaaactagacttgttccacatcatcaacgctgttgttcgatttcatatgtgatgttgtaggagataatgcgagatcctcatgtggctgctgatggtttcacctacgaggcagaggaattcagaaagtggctaaggtcaggaggtcgaacctctccaaagacaaacaagccgcttgagaatcacaatctcgttccaaatcacactcttcgtataatcataaaagattggctggagaagaacccaaattataaacgttgattcatctatctatatgagaaaaaacaagaaagtcaatgattatgttgtgatttttggaatttctttgtgaaataacaaataaaaccttcatgtatcttactacgaaatccatggagggtattaatgcgattctctatgcaatcaatctgtgtataaatttatcttttccattttcttgtcctccttacgaaaaagaacagagaaacagaagaaaaaagaaaccctaaatactccgtgcttattcagcacactgcaaatttacttaattgaccccgatgtttgtaagctttttggatcttaaataagaagagatctaggcgaagtaattctaatcgttcatactaatagcttcgtgacgtgtcgtaacctgaatcgttaaactccacgattatttctcgaggaaaaaacttttgctcagtagtctgttgacttcttcactggctccacctcatagaattgctcttcttcagctctccggctaattgaacggcggttgatcggacattattggtctgaaaatcggatatagaacaggtaaatttcgaaacgaaatttctcactatcaagccaagctctctacatgtatatattttttgtttctacttctccgtgacttcgtcaaagctttccccgtcactaaaccctaaaattatcttgtcttcgatttcggattccacgtatcatatatatacttttaatcttctctgagttgacattttaaattaaaaatctggctttaaaaaaaaaatctaaaatgatcgtaggaaatgtgtcttttacggtaagaattaagaaatgttctgcgattagcttaagttgcatttaatttatttgtgagaattggctcgttctgaatgatgttatcctactctgtttagatcatgtctttcgttctaatcactttctttctcataaaagacgattacgattttgaatattatataattgactaagaaaattgtcggaaacatctttgcagtgacttggtaagcgaacgatacatatgtatattcatgtgttgtttgtgtattatcttcttgttttggaaaaagagagaatttgtctctctgcgtatctatcttatagagaaaagtggagaatccatg

SEQ ID NO: 10503 - DNA, 3000 bp, Unknown
  misc_feature (1)..( 3000): cDNA_ID_1393342_gDNA_ID_2213655_Annot_ID_181735 3000 nt of promoter + ATG
ctagacatgtaaaagctcaaaaagtttttattcttctcttcgtctttcattgcaggttggagtcgaccaatcattgatcgagctagagaaatctggctacaattcaatttcagatgaggtaaagttcttttgtttccctatagacttggaaaatcatggctcagacatgtatataaggttgtaaagttttgatttttctcttcaggttttcaaaaacacagaagatgaatgttcaaatagcataagaagctgtgaattttcttctttcttttttgtccaatgggaacaatggcagaattgggaaccatgggaaaatttggagccatggcagaagagcagcaagttaaccagatgatcatggataaacaatcagtagaagaatggctatcgcgcgtcaactcgctaataccatccgtcctcagcaaggcaaaaacggttaagaagtttacaggaagatggaagacgatcatctcgaagatcgaacagataccagcttgtttatctgacctctcaagccacccttgcttctccaagaacaagctctgcaacgagcagttgcaatctgtggctaagacgcttagtgaagtgatagagcttgcagagcagtgttcaactgacaagtatgaagggaagctgcgtatgcagagcgatctagattctttatccggaaaactggatttgaatctaagagactgtggggttttgatcaagaccggcgttctcggtgaagctacgttacctctttacatttcaagttcatcggaaacacccaaaatttccagtttaaaagaacttctagcgaggctacagatcggtcacttggaatcaaaacacaatgctctcgaaagcctccttggtgcaatgcaagaagatgaaaagatggttcttatgcctttgatcggacgagccaacgttgcagctttagttcagctgctaacagcaacttcgacaagaatcagagagaaagcggtgaatctgatcagtgtattagcagaatcaggacactgcgacgaatggcttatctccgaaggtgtattgcctccgttagtgagactaatcgaatcagggagtcttgaaaccaaagaaaaagctgcgattgcgatccagagactgtccatgacagaggaaaacgcacgggaaatcgcaggacacggcggaatcacaccgcttatagatctctgtaaaacaggggattctgtgtcacaagctgcgtctgcagctgctctgaagaacatgtcagcagtttcagagctgagacaattgcttgcggaagaaggaataattagagtctcgatcgatcttctaaaccatgggatattgttaggatcaagagaacacatggccgagtgtttgcagaatctcactgcagcgagcgacgctctacgtgaagccattgtctcagaaggcggagttccgagtctcttggcttatctcgacggtccgttgccgcaacaaccggcggtaacggcactgagaaatctaatcccgtcggtgaatccagagatatgggtggctctcaatttgcttccacgattgaggcatgtactcaagtcaggatctttaggcgcgcaacaagcagcagcatcggctatttgccgtttcgcttgctcgccggagacgaaaaggctagtgggagaatccggttgcatcccggagatcgtgaaacttctggaatcgaagtcaaacggatgtcgagaagcggcggctcaggcgatcgctggattggtagcggaaggaaggattcgacgggaactgaagaaagacgggaagagcgttctgacgaatttggtgatgttattggattcaaaccctggaaacacggcgaagaagtacgccgtggcggggctgttggggatgtcgggaagcgagaagagtaagaaaatgatggtgtcgtacggagcaatagggtatctgaagaagctgtcggagatggaagtaatgggcgccgataagcttctcgagaagcttgaaagaggaaagctaagaagcttctttcaccggtaaaacgaacgatgcggagacattgaagcagccaagataaaaagtgtaatattgtctgatgtaagtttattaaccgttagttaaactttactagtaattaaaaagtgttctttgggctgtttctctgaagctgataaatatgggctttatattaaacaggcccatgaagttgaatatctttcagtagtcaactaggtttattcccagataatttatgtggccaactattaaatacaggcccatgaccttaacaaaaaaaatacaggcccatgaacgtaatatgattctgtttatcaaaattaattaaggagacaaatatcagttgtgaaactcccaagtttatttcacaaagtcgtaatcgatgtgcttaatagaacaattttgccactagataataattatctcacactatattttaactttttttttttaggtctatcttgttgctaggaaacataataataacacacacacacacacacacaaaaaaaagaacgatagagatatttagtgataattttgttgggtcaacgtaatcaacggtcagaaatagatcacggtgcgttcgtctggcggcttcatttggcacaaggagtttactagtctggacaatatgtccttaattgctcttatcggagaaggcttactctgtttttcaggcgaactctgtttatcttctccgagctcgtacgagaatattcgtaaaggtaaagtatttacttggatctcaaattgcttttatcctttgtttgccttatgaaattgcaatgaatatgtgtttgcaaagctgattatcactttgggtagaaatgttagggcttcttcttagactctgaaaatcttattacaaaagtaccatctttgctcgactaagatgagattttgttgtgaactgactaataaaaaatcgggttttctttgttttgacttttttggatatggttacctcaaacctaatttggtgttaaaataaaaggtttcttgtgagcttaaacgatg

SEQ ID NO: 10504 - DNA, 3000 bp, Unknown
  misc_feature (1)..( 3000): cDNA_ID_3036893_gDNA_ID_2213655_Annot_ID_181733 3000 nt of promoter + ATG
gtcaatcgtacactaataatacctcgatcacaaaaacttttaggttgtcccggagactctggagcctagtctacagttggcagctgctgttcttgctcaggtaaaacataaatgtttccttatttagttgaagtagtaatcctaaacagtgtatgatcattttttgggttgaaacatgtcaggcaaaattaccgacatcggaaattgcaaacacgattaacgagttcagaacccgtcacttgtctgaactgaccgaggtgtgtttcattgtcgatatatccatctatatttatcagaatctggtttggtctgattgatgtgtattgggaaatggtgtaatgataatggcagctatgtgaagcaagcggaagctctctaggctatgggtactctaggacgagtaagcctaaacctcaaccatcggatgcatctggcgataaccagataatcgaaggaggcacagtcgtaatctgatgacgttctccattctggtgagaaaaagaagagtatttctcctttggtgttcttcttaaaccaccatcaccaacttgggttgcagtgcgtggtgaagtgatggatccatcagatgatgtgtagtgtgactaatatattcattatatgttcagtacatatctctcatttaagtctttgatctcagaacaattagatttgaacaaatgcgtagcaatcgattctcggcggcagtaataacaaatgaaactacatcccgttcttgtactacagatgtgaacaccttgcagttgttggtaaaagactgaatgggccttcttttctttgacttcgactgaatgggccttaaatacagttggttttatggtccaaacaagatttacgtaattgtttgaccatcgatcattacaaaacaaaatagataccaagccataaattaaaccaaagattgggttaatgtcatgttccagaagcgagaatgataaaggcatgtaatatgaaaaatgtccaaaacacaagtgatgccccaacggaaaaaaaaaaaaaaaagaataagaaggaaaactactgatacaggaaaagccccaatagacgatgagaaaaaaacagttgctctcttttggccatttctatttgtagcttcatcagagcaactgtttttttttttgttaataatatatattgatatatttgaaacgttatttaggtcaaaagagagatttttaacaaaggaaagggccaaaagagagatttttaacaagaataacgctgaccaaaaagggaccaccaaatcacatttgccgaaaccacaagtacctcaacattataaaaacatccaaacatatatccaatgtactgtgcatgtcattattatatttgaggtcaaatatttaactaatgttttttttatgattaacatgcgagtttacataaagagttagtatatgataaactgttggaaaaaaaaagtagtagggtacatgttacgagaaaactaaaaaaaaaaattattacattgtactgacatatatgttaagaaaaaaactatatgtagcataaacgaaggcaaacgaaaatacagctcgaaaaaactaaaaaattccgattttggtgttaaaagagccaccagaaccgataacacaatcagcggcgactaagtttctttaagagagaagcatgagggtttttgaagagagaaagggtttggtttttgtacagtatttgttcgtttattcgcagaaaaaaaaacaaaacatagcagtcatggattctctttcaacgcctccgtcgactatgcaaaattccaccagaggctctcaatccttatcgtccctgctaacgtcaaatctccctccaccgtcgtttcagccaccaacgacaaatctcagtctgaattctctttcaacgccttcgtcgactatgcaaaatctctcactatacctcgggattctctagctcttgcacacttacaccatccatgctaacgtcaaatctccctctgctgtctaatctctctccactgtcgtctcactcaccaacgacgaatctcagtctgaattccctttcaacgatgtcgactatgcaaactttcaccggagactctcagtccgtaccgtctctgctaacgttaaattttcctctgctgtctaatttagggcttttattgtgctctatccaatagtgccaattctagctatggttgggttctccgtgtgcgagtgtattgtttgtctactcttctggtttcatttaggacaaaatgatgttgcagagcctgaagaagacatgtgatttggtctacttccgaagattttgatgattataattactcctttttattatatgagaattatatgttatgcacttctttctattctatgagaattatatgttatgaactcaaattaattctatactatgttttagaaacgaatgtttgctggatatttcttattaatattatattttgtgttgaaaagtgtttctagatgcgcatacaaattagttgagtttgagtagcaaatatgtatgctgcttttttcctacatttttcggtttgttatgttttcacatattcccttgggaatcgatccaagcggaaagcctaaaaagaagaatgcatcaattcgtgttgatttgtgggcttaagcccaatagctttggaccctccacactgatagcattttcttagggctatcaatgctaaaggctaaaacgagactgataattaaataagttgcattaattaagcaagtgtcacgcttcttcttgttaaaacgtttagtctgtgactaaataaatatagtatgacactgaaaaaactcctttcactttttttaatatatactataatgatgatccattctcctttgatgctaatttggaaatattggtcttatcaaaaaatataagaaatatagcggtgtctaatcttccatgtgcacacacttgtttatccctatttttttgtatatacttttttagttaacagcatgaggcttgacttttctctgtcctttcaacaattca

SEQ ID NO: 10505 - DNA, 3000 bp, Unknown
  misc_feature (1)..( 3000): cDNA_ID_3036897_gDNA_ID_2213655_Annot_ID_181732 3000 nt of promoter + ATG
accttacaatgagaggctatcaatctggatttcatcactctcctgctccatctggccaaaagatcccactctactctgttgcacatagccgggctggcgataaaggaaacgacataaacttctcaataatcccgcattattccccagatgtcgagcgtctgaaactcataattactcctcaatgggtaaagcatgtgatgtcagttctgttatcaacctcttcgtttctggaattggatgcaaaaccaatggatgaaaatgtgtcagtagagatatatgacgttgaaggcattcatgctatgaatgttgtcgtacggaacatattagatggtggagtcaactgttccaggaggatcgaccgacacggaaagacaatctcagatctcatcttgtgtcaacaagttgtgttgtaagactactttaactttgcatatcagatttttctattcaaattctgtggtaatatgttaataaaaagggagacttgaactacactatagttctaaaagataatagaaaaagaaggaatcgacttagtggtgcttcactttcttttacttctatacattaaaattactttaatttacaactggatatcttgatagatacgcatacagataagtattaaaagcattgttttgattgagagagaatgatattatatatttgtgtaatgttaggttgttgttatattcttttgcaggatctgactgacatgggttgcaccacctcagagacagttggcttaaagtaacaatcccttattggattgaaattgtcagaaaccacaacccttcttttgctcaactccaatcactttgccacccaattttatctcattcattttgcaaaaaagatcaaagagagagagagagagagagagaaagaaaaaaaggaaaaaaccttcctccgttacaacctcacaattgcaacaaagtttcatataaaagaggacagaaatttcgcaggttcctccgttgtctgaggtaaaggtttccttctttaactaattcctcagatgacctcttgatttgttggaaaaaaaattaaaaaatctgtttcatacaggatcttggagaaggaaggaaacaacaacaaccaaaaaaaaaccaaaaaaaaaaaagataaaacaaaaaaaatgtctttcacaggaactctcgacaaatgcaatgtttgtgataagacagtctatgtggtggacatgttgtccattgaaggaatgccttaccacaagtcttgcttcaggtgtacccattgcaaaggaacccttcaggtgcactcattactcattttcttgttagatcttctatgatcatattatatcaacaatttatctatgtgttgatggcagatgagcaactattcctccatggacggagttttgtactgcaagactcattttgagcaactcttcaaggaatctggcaatttcagcaaaaactttcaaccaggttcgtattataaaatctctgacatcgaatctctctatctttcaaatcatcatgatcataacaagtctctttcttttctcaggaaaaactgagaagccagagctggtaggttcatcattacatgtccttgtatatgattagcgtgtcaatatttcattttctttcttttatgatcgactaataggatctgtgtactgatttaaacattacagactaggactcccagcaagatatcttccatcttctgtggaacacaagacaagtgtgccgcttgcgaaaaaactgtttaccctcttgaaaaggttagtggtatacgcatctgcaaatgttctcatggcctaaaataccaacgaactagtctcgtagagaaatttatttgctctagaatttgttttttgttttttcatttccgtagaatttttctgttcggataaaatcattactagatcaaatggaaataaaattttgattttggtttggtttagtatacttttggttcgatttgagaacgtgatgttggttggtccaagcaaatgtggaatcaattttggcttggttctaatcgggttatttggtaacagatacaaatggaaggagaatgcttccacaagacatgtttccggtgcgctcacggtgggtgtacgctgactcactcctcctacgcctccttagatagcgttctctattgccgacatcactttaaccaactcttcatggagaaaggaaactacgctcacgtcctccaagccgccaatcaccgtcgcacagcctcaggcaacactcttccaccggaacctaccgaagacgtcgccgtggaggccaaggaagagaatggcgtttcagagtcttgaatatctcttacatgagtgtttttgagtgaatgattgaatgaatgttgttgcgggggaaagatttgatttcatttgtaatgagttgtttccatatgaagacatgattttttttgttatttttttaattcattcgttatacatttattattacacacgaaaaaaaggcaagaattgatgttttttcactctatgtgtgctgcttatgatatgctttccgatggtgatgatgatattcgatgtaatatctgttcggttcaaagataccaaactacttatataccggatcaaaccaagtggttatcgggtgatgtgaatcattcattatttcgttaggtgagagagggtgttttcgtaaaagtatctaaaaacggccttagcaatgatgtctggttggcgagaaactcaaaaaggaggagacagagaaagttgtttgactgggaaaatttgaagagacgagccaaaattatctgtttgaaacgaacggaattgaagacgagagccactcctttccgtttccacctttcttccattcttactcaactttccatgattggttagcctctctatctgtccgtggcttgtcgttgattttttttatcttggtcgtctgaatgtgtggaatttcgttttgcttcacaggagttgtatataaggttcgaggaataaagtaaggctactttttttatttgatttccgat

SEQ ID NO: 10506 - DNA, 3000 bp, Unknown
  misc_feature (1)..( 3000): cDNA_ID_4262286_gDNA_ID_2213655_Annot_ID_181731 3000 nt of promoter + ATG
ttcttgtcgtttcctgtttcgtgattaaatctgatcattcttgttgtgtcatcaggtctatgaactaggttggaattggaatgacttggagctgctagctcagggaactctcgctggccaccttctggagtgcggttgccagctcactggtggatacttcatgcatccaggtgcgttttacgcttattggctcagggaagatatgatgaactactgttttccattatcagtatggtcatttcgttcctcaatgttctttaggtgatcagtatagagacatggctttccctcttctccaggatttgtcacttccttatgcagagattggctatgatggtaaagtatgtgtatcaaaggttgaaggtagtggtggaattttaaataccagtacttgcgccgagcaacttctgtatgaaattgctgaccctagtgcctacattacacctgatgtggtaagttagctgtacaaaatctagaagaaataactgtaaaaacggcggaaatatttgatttgaaaaccttctttgcaggtaatcgatattcgaggtgtttctttccttcccctgtcagactgcaaagtacaatgcagtggagcaaaaccatcttctaacacttctgtgcctgagaaactcttgcggttaattccaaaggttgttatccatagaaaatgctggtggtatttgattgatgctaaagagcaacctatgtttggttctataattcgtattttctttgcaggagtgtggttggaaagggtggggagagatatcttatggaggaaatggttctatacaacgtgctaaagcttcagagtttctggtgcgcctatgattaatatgtctatgatgtagtagcattttttggccccatcgtcgcttgaaatgactccttatggtgccttaaattggagttcatttcttatcaagtgtatgtacgtattttacttgtgttttttccttctttctttcaggttcgatcttggatggaagaaaccattcctggtgttaaccattgtattctttcttatgtgattggggttgatagcttgaaggcgacaagcaacggcactgaatcttggcagtcatgtggagatattagattacgtatggatggtctttttaaactgaaggaacatgcggtccagttaacaaaagagtttactgctctatatacaaacggaccagctggtggtggtggaattaggtaatttcttcacgttgatgttcgctccatatatcaatccaatgctaattgtagctttacagtagtaccaaatcctgttgagttgagacatcttatgactagggacaatgtattgaaactagttatttgttatgagattcggggtggtctttttggtttgacaaaactgcttgtaaattatatgcagtaccggacacaagatggaaattgttcttgaaaagcgtttggtaggtcgtctccatcaaaaaatttaaactaatatagccttgcatcaatcaattttacggattctgatgttatatgtttggttatccaggtcagccgtgaatctgtaatgtggaaaactggacttcagcacaccaacacttcagagccagagacctctgaacatcattctccagagaaaatgccaaaggttagctcgagagttcttactaaactaattgtgatgactgatagataatggaaataaacatgacctgaattcaaattccttggtgaatcaatcctagtgtgttcgaacatcaaactaactctgatgactgatagatatgttttactatttgaaagctgaaaatgtgaaagaactctaacatgtgcatttgtattaacaccttgttattacttccatttgtagttacctaaggaaaatccaaagaaccttacaatgagaggctatcaatctggatttcatcactctcctgctccatctggccaaaagatcccactctactctgttgcacatagccgggctggcgataaaggaaacgacataaacttctcaataatcccgcattattccccagatgtcgagcgtctgaaactcataattactcctcaatgggtaaagcatgtgatgtcagttctgttatcaacctcttcgtttctggaattggatgcaaaaccaatggatgaaaatgtgtcagtagagatatatgacgttgaaggcattcatgctatgaatgttgtcgtacggaacatattagatggtggagtcaactgttccaggaggatcgaccgacacggaaagacaatctcagatctcatcttgtgtcaacaagttgtgttgtaagactactttaactttgcatatcagatttttctattcaaattctgtggtaatatgttaataaaaagggagacttgaactacactatagttctaaaagataatagaaaaagaaggaatcgacttagtggtgcttcactttcttttacttctatacattaaaattactttaatttacaactggatatcttgatagatacgcatacagataagtattaaaagcattgttttgattgagagagaatgatattatatatttgtgtaatgttaggttgttgttatattcttttgcaggatctgactgacatgggttgcaccacctcagagacagttggcttaaagtaacaatcccttattggattgaaattgtcagaaaccacaacccttcttttgctcaactccaatcactttgccacccaattttatctcattcattttgcaaaaaagatcaaagagagagagagagagagagagaaagaaaaaaaggaaaaaaccttcctccgttacaacctcacaattgcaacaaagtttcatataaaagaggacagaaatttcgcaggttcctccgttgtctgaggtaaaggtttccttctttaactaattcctcagatgacctcttgatttgttggaaaaaaaattaaaaaatctgtttcatacaggatcttggagaaggaaggaaacaacaacaaccaaaaaaaaaccaaaaaaaaaaaagataaaacaaaaaaa

SEQ ID NO: 10507 - DNA, 3000 bp, Unknown
  misc_feature (1)..( 3000): cDNA_ID_3036905_gDNA_ID_2213655_Annot_ID_181730 3000 nt of promoter + ATG
acaagcttgggaatccagaagaaacttacgaagatttcaccagatctattcccgaggatgagtgccgatatgctgtctatgactatgatttcaccacccctgagaactgccagaagagcaaaatctttttcatcgcatggtacaactccctgcccttgtatttttaatgatttgaaaaattagatgttataattgagacatcaacttgcttcaggtcacctgatacatcaagagtgaggagtaagatgttgtatgcaagctcaaaggacaggttcaagagggaattggatgggattcaagttgaattgcaagcaacagatcctagcgagatgagcctcgacatcatcaagggacgagtcaatctctgaatggaacttaccgcatcttaattcgtttcagtcaaaattcatattttctgctttcgttttcttgggtatttttcatttaacttctttactatttgtatcttctgtgattcaagatctcacctctttcttttttccttttcggtacgcaataatcatcccaatagataattactttgcttccctgaacaaagctggcaatttcaagcaacttgttgatgctaatgaactaatgatgcaaagaacatacgctaaaagagagagtaaataggatgacatacctcacgtctaatttatcagaaaatcctcgcaattcaagggttttcttagccaattgttgaatggatactttcctttaaaaatctttgacatcaaataatattccgtagctttgttctgcatacaattaaaacaaaaaagaaacgtaaatcatctcagaattaaccagagaacaatatcacaaaatcacaatcttgcagcatacatgtcaaaaactcactatgagatttatacactttagcatgttagttgttccagtggaagcatgttaaagctgcagaaaagaatcagcatcgcacacaccttcagttctcggtacgatttttttgacttggaagattcccttttgtgtccatgagtttctttcaagaatagctccagtaaccgctgtctagaaaaatatatgaatatgatatcaactacaaataatgaaggtcatgcttggataacaaggctcatccccttacttgcatatagatgattgagtagacggatacagagctcctttagctgatgtgccttgctttctaccggttgttccaagaataacttcgtgtaagccagaatagttccaacacaaggaatatctaagagccaacaaatagatcacaccaccttttaagaaacaaagaaaggacacacatgtcatgtgaggaagagtattgaaaactaacccgcatgttaaagtagcttgcgcagtttctgaatgctgaaactctgatggtggtactggagctacaaaaaacagtggctggaaaggaattagcacgatatatgctagtaactactgcaatttccatgatacattggtataaagcagctagtgaaccttgttcaaacggaaggaagtcagaagttcatccgataatgggaggatcctctcatacaaagatcttcgcaagtgatcagctaaagaaaaattgtcaggactgtgcagagattgtccaacggtgatggtagaaatatacacaggctggaggacttggtaaagcaatgcccctgaagtaagaacacacaaagagagaaaatcccaataagcaaatcttaaattacacaacaaattatctgtcaaaattcagggtacagaaaccttgaactccaagaacattccatcgagctatcttatccgaacagctaacagagagtgttgtttcaccgcgaccaggctttctttgcaccatatctgctacttgtgagccattacctgaaatagagacatccaaagtaaattgataccaacatgagcctaatccgctttctcccagcttctaaataagaggaaggcaagctgagagaaaactcttgcagcattacctttgttgctattactacctatctctggaacatcagaatgccgagacgagcaaatatcagaagcttgaactaacaatgagtcatctacttgtgttgatggaatctttttcagggcatacaagggtgaactagtagaagcataaccacctacatatgacaaacacgtcaatgccaagtatattcttgaaacagataaagaaacgtaatgaggcaaattgaaggtaaattacatggcaattgagaaatgtacaaatgcaagaggcacccagatttgagcttatatttgacttctccaggacagcttgaatctgctgactctagtattgagcttgtttcgctatcaattctctgacgcttggcttcattactcttacctgaagtcaattgcatccgctgaatctcggaatagaagaacctgatgagagctcttctggcgacaacttcggcatgagaatcgttcacaatgtccccacggggactcagcagcgacccactaacgcacttggtccccgtccctaacgctatcactttcgggtctgcacaaaatcctaattagctctaaatcgaaaaccaaaaataaagcaaagagtgacagagaccttgggaaggagaagagacgaggaaagcggagaggacggtgacttcacgtccctgaggttttcccttcttcgggagagacatgtaagccgaaataaccttctctgatactgtctttccccaatcctcctccattgctacgattcccacaaacaagtccgttgattcattcatgctactcaaaaaaagcagattcaaggacccgcatgaaaatagttataagtttagggatcgttttagtatatatactacaaaattattaaagtaatcaaaatcccaatgggataagcatctttaactcacttccgtcactcgcttccttcacgtctctctcccaaaattcaaattcctcaggcctaaccaatcctgtgatcgacgtcgtcaaatattcaaaagcagtccgtgatccattgcatgatcctcttcctgtgggattcttactctc

SEQ ID NO: 10508 - DNA, 3000 bp, Unknown
  misc_feature (1)..( 3000): cDNA_ID_3036956_gDNA_ID_2213655_Annot_ID_181715 3000 nt of promoter + ATG
gcgaggttatgtttatgtgtgatggacatctcatctacacaaagtgagaattttgaatactctctttacttatatgtgtcttgtctttgaagaaattacctgattgtctctgtgtattaaatacacagggaagccaatcttgaagactgtatgggtgaaacagaatccgaagctggacaatccaaaccgaagctctattcctctgcttcaccgaaatgctctgcagaattagtctctgcaattgtagcttacattgacacaaggagagacagagatatgttggagccaaatgcatcagaggatcaatctgtatgttctaaatattgttggtattgtgaattagatgcataatcgaatggtttgtgcaaaaaccaatatattcctgtgtctctgttatgttgcaggaaagcgacaggaatgatcaactgtatagacagcttaagcaagcacttatggaagttgaggaatcgaaaagggaagcttacgaagaatgtgtcaggcggtttaaagctgaaaatacagccgttgaggccattcgcagtgtaaaacacctgcacaaattcataatctcatacattgaaaatgtgtttttgcttagacttgtttccttttacttaaaaggcaagagagtacgaggccatgtacaacgaagaggcgaagctaaggaaagaaggtaaagaagcattagcgaagcagaggaaaatggtggagaagactaaacaagagagggacgacgcgctaatcatcattctaaatggaaggaagctatacaatgaggaactgagacgcagagttgaagctgaagagatgttggggaaagagaaagaagaacacgagagaactaagaaggagatcgaagaagtgcgagccattgttcaggatggtactgtcagaaacagaagtgaatatttcttctcagacaattagagatttcatttgaatttgtacaaattaggtatgcagctgtacaacgagcagctgagacataggaaagagatggaggaatctatgaagagacaagaggaagagcttgagaagacaaagaaggagaaggaagaagcgtgcatgataagcaagaacttgatgcagctatatgaagacgaggtgatcaatcttagatttaatttagaaactagaagttactttcatcatatattaaaagatcgttttgacaggtgaggcagaggaaagaggcagaggagttggtgaagagaagaagagaggagctagagaaagtgaagaaggagaaggaagaagcttgctctgtaggacaaaacttcatgaggttgtatgaagaagaagcaagacgtagaaaaggaacagaggaagaactcagcaaggtggcggctgagaaagacgcagcgagctcagtctgttcggagattctattactccttcagagttacactcgtcgccatggaactccttctggattctccgatgaggattccgttacacgccagcctccctcatatttcatatgtcctatctcacaggtatgtggaccaggacccccgtgggttcattgttcaaatgagagcattgtaacagaacaaacttatattcgatgtttagaagttaatgcttgtttatttattaattcaggaagtaatgcgagagcctcgtgttgcagccgatggtttcacctatgaagctgaatctttaagagaatggctcgataatggtcacgagacctcaccaatgacaaacctgaagctcgcccacaacaaccttgtcccgaatcacgcccttcgttccgcgattcaggagtggctacaacgaaactcttgagaatctttgcttttgttgtgtttacttaaaagctgttattatttgctgtgagtggtattcataaaaactgtttggttctctctagtacccatttacaaaaatgcttgctgttttgctctctctcttgagatacgtcaacatatcttggcgtttgtaaattgaattcacagacgtccctttctatgggccagtattactaaagatggcccaacaaatgacccacgaatatggtagagagtttaagcgcacgtgatattaagattaacaacgtgacgcgtgtacaaaaggacgaattggcttttttcacgtgcgagaatattattggccataacatttgatcttagcatgaggtcgaccacattagattttcagattataaaaataattatctaatggttaactgtaacatgccgtcttgtcggtacggttcatacggattcatattaaaatttgtgatgactaaaaaagtatttaataaaatatatatattattaaaattgaggtagccggtgatcggtggatttgaagtacatatcgcatgcatgttccacgcgcagcttgtctctatatatgttccacgcacatgcaattcattactgcaaatttttttatttttttctcattgaattatatttgatattagaattggaaaagatataatacatatgaaaataaagagtttagactttaaagatacacaaagctcgacccatgaagaagggtttttttcgagaacattgcaaaaaccaaactaatcttatctcgagactaaacaaagctctcgaagttcaccacaaggacttcccgcacaacaaactgagaagacgggcttcaacacttatggcaataacaagatagtggaacttggtcttctccgtaaatgatgcttctttttcaaagagtacctaacccggatgaaccgtaggataatcgagaaccacttaaacctttcaacaccacaacgatcaattaattaagctaatcgttgcttaatacaacaaaagaagaactgatatgtaatccaagagctcaaccccaaactaacaaagtctaacttagtcggggaagagaagctaagcccaaaaaagggagacaatagcccaaaagagggagacaaattaacctaagccgctgatgttaccagatctcatgaatacaaactgatcagagcaacaagtttcacaaaagcagaagacatgagagacaatg

SEQ ID NO: 10509 - DNA, 1345 bp, Unknown
  misc_feature (1)..( 1345): cDNA_ID_3037074_gDNA_ID_2213656_Annot_ID_181751 3000 nt of promoter + ATG
gaatttgcaaactgtgagagatattgatgaaagcaaggtgattgagttgctacagagaggaccagttattttgtgtatagaagtatcatatgaatttaatttttttacgggggtgagtaaattacacatatagacatatatttttcaattactatacattatgattttcattataatgtttcttataaccaaaacgacaggataaagttcttagaggatatcaaagaaagggtctataagatcatatgattgagttgacggttatgacactactctcgaatgcgctaactactttgaatttaaaaattcatacggtttttgctgggggaaaatggatttggaaaactaattcgaaaaagtaggcgaaaaaaacacgagccatctctaatcaatgttttcatgtatcgagagatatacataataatataatattttttttcttggtatatgaatttgtattgtttatagaatatatgaagataaataacaagattttacaagtcaaactcaaactacatccttctttcttagattattgtacatcttgttctccatatccgttgtcttctttggatcctacacctttttgtacatattctaactagatcattacactgtaagtcaaattgttcctgttttgcacttaaaatacatgtttagtacgaagtcttactagatcattaccttcaaattcgtttctagctatatttttaatatgcaactaattgtagaatcacttttggaaatagagttcttcaacaatatattaatatagatgcttaatgctaataatgtggagcagtcaacaatgtataaggtcctaactcctaatttaactcctaatccaaatcaaagcaagtttcataagttaccacatattaagtgggtctgagcccggcccacaattattacataaagcccagaaagagctcgacggacttgagacggtaaattaattttgttaattgccagcagcaacgacggacttcaaacggaaatttttatagcttctctcgttcagttctgcttccgacaatcaaacaccactttctttggatgatttggaatctctctgttcagcttctctgctactgccgcaactggagatgcataagtcgagttctagtttctgttcagaatctggagtctaatttcttcaggtgatacggttcttgttcttgaaaccctgagctcttacgttctcgaatttgagggatatactttgattcctagggtttgttagaattgacgaattgggttgttataaaaataggattttttttaagttgtgtgtagtttaggcgaagaattatagaaattgggggttagggttttgtgagagatg

SEQ ID NO: 10510 - DNA, 3000 bp, Unknown
  misc_feature (1)..( 3000): cDNA_ID_1009068_gDNA_ID_2213656_Annot_ID_181759 3000 nt of promoter + ATG
ccaagacaatggcttgtcaatcaagtcatcgatactctgtccaccaaatgggatggaaagaacgtttccaaagtaagtgttgtcttctttctccataagtcttctccttccgtcgacaacaatacccattttcgagttcttgttcgaaactagatctcttcctgtgtgtttcgccacaagtttccatagaaacgcgctgaacgactctagtttcgtcctctgaccataaccagtcttgggggagctaccgcttgctagagtttggagatcttccaacgcattttctttgatgtaatagatacggcttgtgaggatattatctaggtcatttgttgtttcttgtggaaggggcaaagacgtgacaggcatatacatcttgtctatagatgagtcgataatcagtggtcgtcgcgggtttagtatagatctccggaacgatgggacagaagagattggtgcattgaatctagagatctcagcccaagaaacaaggaacatgttcatggagaaagcatctgcaattcgatgatcaaatgtgcatcctaccactatgctcccacatttaagttgagttacctaattacacatacaagttagttaagtcgttataagaatatgtttctgaaactgaatcgatgaaagtatgatttcggtgttatattacctgaatagctataactccatgcttcttcttcggaacaagcttggcgatactttcatcaggatcatgcaagttaagctcccggagctccacgtcagcaaccgcctcaaggaagtctacgccgcggttgttgcagagaatctcgggttctccagaggagtttttcacgagttcaccggcaaaggcatagtaggagacgagagcctcagccaaagacgcttttagggtttcagccacggataagaaatgacgtggtttcttgtagcagaagcaaacgctgatttggacaggagggaggaggaggtcgaggtttgaaagaggaagccaatggtcttggaggggaagagcagccgtgactatctgcttccttatggtgatcacgtggaaaccacgttcttgctccgctgcatcttccatggtaggatgttgttttgtagagaagataaaaagaaaaagactgtggtgtgttggaaagctactgtgtgagtcagagaatttataaaagatgtaaatgtgtaggagagaaattacgtgactatttccattttacttggatattttttttttccttttagccactagtggccggttactgtatagtagtactgtgtgatagtaccttttaatttcggcgaatacccaccaatgaagaaaatgacttaaacgttgcaacttgcaaggctacttggaaactgcagattttgtgtaatacactattcccacatatctagtactatttctgaattgtcacacattttcatttaagtaattgatcttatatctcattttaaaaaaataactaaattatggaaatgattggagttatgttccaatgtttggttggaatcatagagatgataatcaccacaacaacatcatcagatccttgatgattccttgactcctttggttttggctagctcaagtggtatcctctcggctacatgtccaaatcttaacaataatttattgttccggtaaggtttacttcaatatggtattataagagagcatcgaattcggataataattagttccgagtttatttttttttcatatccgaatttattttttttatggtgacattttttcttctgactatggatttattagattgtcagtatgattatggtttttaatattatagacttgtgagacatgaataaacatggttttaaaaaataatatgatggaatttctgttaaaaaataaagacttagttttaaatttatgttaaaatgaagaatttggacggatgatcatgagattataatatgaaaatataaaatgttcatttcacgaatcataattttgtgtccgaatttaagaaataaaagttaacgtcaaaatgggccaaagactatgttcttgtggatgcgtgaaactgtcttggagagattgcaacatcatcacacgatctcctatgttgcgacaaatcactcctaaccgtccacaataaccaaaaaatataatcatgacattaactcctttctaacattccaagatttgttaaacaaattactacttaagatgtgactaatggaaattaaataacttaaagtaattgaaagggaaggaaaaatgatggtgcatgaaaaaattcttgaaataatttatttggctagcctctgatatatgtgaatctaaattatacatatatacgcaagaaacttgaaaattatgcaatcacattgacattatcaatttaaacttaaaaattgctatttagtaataatcagtggttaagcttacacaaaactaaataaataaaacatgacaaaaattctcgaccgtgaattttaacaaatgggccaagaaaaatgtcgtccaacggtacgttcatgaggatgcacgacgacaacagaaacacttgtgtaagcataggacccactaaaagagtcccagtttcccaaaaccaacaaatctcagccgtcgattcttagccactcggaccaaaacgtacgcatcaaaatatcgtcctcccaaagtataacctcaagattctcacatattctcaggcaatgccattgagtatttgagtattgaccctcatcatgtgattgaaaatcgccactcaacaactataacaacgccacgtgtcactcgtgtcagtccaagcctccactcttcttcttctctacataactgaccattcttctcctctgctctcttcactttctcatctcctccattggctcttatttcctcagttgccgtgaaaatctgtgagctttttcttctgtttaatgtaaaatttgtcaaagattgtatctttctatttaaagtatcgattttgattgttcatctgttgaatccaggtaaacgggtagttcataatg

SEQ ID NO: 10511 - DNA, 3000 bp, Unknown
  misc_feature (1)..( 3000): cDNA_ID_3037062_gDNA_ID_2213656_Annot_ID_181754 3000 nt of promoter + ATG
atattgttagcgctagtccaaatcctctcaaatcatatttctcttttgcccaagttttctcgtccattctcagaattgaatttgatagaacactgaatgcttctttacccccacggttgggctgtgtacatctcaaaatcagaagcatgctgcaatcttggcaaaggtatcttctcttttccatatggtgtcaaaagaattccttcagtcaacactactgcagcaagacacaacttttcttcatcttcaacagcaagttcaccttccttaggttttaaaaacaatcgatcttcgagatcaccaagagtataggatcctttactagcccaaaagtatggttcttttacaggatctttcccctttcgttgaagttccctatgaacaggttcacattgaattcttgtatgaacaaaagacagtgtagagactattattacaggttttatagtaaatactttaaaaacgattgtaaatcatgtttaacacttttaaaagcttttaaaatcccttataaatcattcaatgccactaatttatggtttaaaaacgattgtaaaccatgcagacacttttaaaatcccttgtaaatcattatatgacacttacttatgctttaaaaacgattgtaaatcatgtttaacccttctaaaagcttttaaaatctcttgtaaatcattctattcgacttacttatgcttaaaaaacgattgctaatcatgtttaacccttagaaaaggttttaaaatcccttgtaaatattctatgtcacttacttatgttttaaaatcgattgtaaactatgcaaacacttctaaaatcccttgtaaatcgttttaagacacttacttatgcttttaaaatcccttgtaaacgtggttaacacttctttaaggttttaaaatcctttgtaaattattctatgttagttacttatgcctaaaaacggttgtaaaccatgcataccctttttcaaatcccttgtaaatcattatctgccactaacttatgcttcttaaacgattgttaatgaagtaaaccccttttaaaagcttttaaaatcccttgtaaattatctatgacacttacttattttttaaaaacgattataaactacgcaaacagttatgcaaatgccttgtaaatcattctacgacagttaattaagctttaaaaacgattgtaaaactttattacatgttgtgagatagaactctctcaaggagaaacggataggttgagaatcaactctaaaccaaagagttgatccttttgttttcactctctgctgcatgagatagtgaaagatttttccagaaaatctgattcccttcttagccttcatttttggtcccaattcaactagaggaccaagaaacgaacttctaatcttctgaaataaacactcgcctaaagcttcctctactttactaactaaattccaatccgagtattgttgaacggttcccagtgcaatagattcctcaccttctctgtagatttgttcaggctatgtaaggatttcactctctgaatccatctgcaaaacatgttatgaaacagcgtcagatttactataaaattgactataaaattgactataaaatcgattataaaaacgattaccgtcggatctatcgatatctctggggattgtttgcgtcgtagagatatgatctgaatccttcagcgaagaacaggtttatcggagaggaaattcgtcggcgattttggggtttctcagaaagaaaattcgtcgacgattttgagtgaaatcggagaggaaattcgttggcgattttgagtgaaatcggagagggaattcgtcggcgattttgagtgaaatcggagaggaaattcgccggcgattttgagtgaaatcggagaggaaaatcggagaggaaaacgaagaagtttgtgccaaaacgaagaagtttgtgaaacgaacgtgaaacctaatcattcagagggtaagacagtcatttggcatattagaaggggtagttttaaaaatggtcttcaggaaagggcacttttacaaaagtttattagaataagggcagttttgcaaatctcccaagattcaatttaatgtttcagatttgttatctgtattcgtgcttttagcattaaaaggagttttcttgaaagtaatggaattgatatgcaattctaaatagaaacatatactatgtatctaacaaagacattatttcactaaatcaaagacaatttatttttgaacagaaataagccaattgtagaaaactttcttctctatattcctcttctagcctctgtaaacttccaaaataaataggaggaaatattctaaaataaaattttctaacaaggtaaaatatctatctttcatgacaaaaaattaccatttttattactcaaaaaaatgaaaggggccaattttttataggatgaaattgtatttacgcaaactaaatagaaaaacttagaggaaaaggcaaataatactatatactttgctttactaactctttaaaggaaaacaattctggtaaaatttaatataatttttttgtttttataaaaagataaaaatgttaaagtaagaaataaaaatcataagcatagattagagacattaatatatacaaatatatagaataataataaaaaaatgaatgaaatggccgttacttggtgaagacgcataaaaaggttgggcgtttctcttcttatcatctctgccgatttctctccgtcgtggtccgtcttctctttctctctatcttcctccaatatagggttcttctaaattctcttccttgtattattcttctttgtcgtcgtctttaacacagaggaaaaactgcttatctcgatttaggtttcctcgactttgttcggtttcttccggttcaaatgtacgttgacatattcccgcgtgcgtcattgactttttcttttttggtttgacggattttgattttgttgttgatcacgttgtagtttggttcggatacg

SEQ ID NO: 10512 - DNA, 3000 bp, Unknown
  misc_feature (1)..( 3000): cDNA_ID_3036987_gDNA_ID_2213656_Annot_ID_181780 3000 nt of promoter + ATG
gtccttaactcagtgatcattttcacctactaaactaggaatctttaagagctttcaagtggcaaaccaattatcgcacattcttagagaaaaaaatttgagaggaaaaaacggtaaacaaatactgatatagatcaaagaagaaagaaatagcactacaacaaaaatctagtgtaactattataaagctgtcgtaacaaatcaaagccattttgttttgttagcattttgtttcgaatttttcttggctatgctatagatttgcagataaaggtagaattattttttcattattatgatttttcaaaacaaaatatacgttgttttcttattttaacatttcttctaccgaatttttattcaccaaatttttttatgtagtataaaatttaaaactatttttctttcaatgtcaaaatctatactattaattgggaagtattgtaaataaacaaccttatgaagggtagaatattacatagaatgccattgattgttagtgtttttaaataaattcattaaggatacaatagtaatcacaaaattaatagatttaaattaaaaattgtaatattttttaaagtaattattagtttcccaaaattaaaataactttctctttcctattaattatggacgaaaaattaaactttatttcttaaaatttattaaccaataagaattgcaaaactaagatttgatatccaattatactattttattaaactaacatttttgaagttaatttttatttattttttttaaaaaatcataaaacttgcttgataccattaataaaaatcataatttgcgatagataaataaatttaattttagaattttgggttaagtattttgaaatataaaatgaaaacaattatttcacaatttctaaaaaacaagattagatataacaaagatttatatttactatgaattaaactaaaaataattaatttaaactaattatcattatgccattcatttagaaatatttaaacaagaaattatacatattaatttccatatattttgggggtttttttcttctttttttcaaccggatatttctttaaataaatccataatatattattgcacaaactttttttaataatgtaaataattatacatttttcattcaaaacatattatccagcaataatagattgcttttatgggtgtatttcaaaatgtaattatatttcaaaaatccaattaattatgattaaacaagggaaataagaatattgaaaaatgtagctaaggaaataaacattattaaatttcttacaaaggtatttgttaaaatgttatttatatttttgaatttgaagaaggaacaaaaatcaagaaaggatatttgtgtgtttaacttatgatatatttgtaaaccttaacatcatatatgtttatccacaaaacacagtcatatagtataacatgatatttaaaggtaaaaaaataagacttttggaacatacttttaatgtaatgaaatgaaaataggaattttgagacacaaacgacatgaaaagagacggaagcactatatataaaaaaaaatgaaaccaaactaaacatcaaattaaatatccaacgggtatgagtttgggttatgagcactatatataaaaaaattatttacacacataactctgcatgtatgtattttgtgacacaaattctatttgtgatgattacggataacgggttggtagtattttatttcacatatacagacgagttatgagacgaaaaatttataatagcacattatgggttttccgttccaagatagttatgcctagcaaatatacatgaaataacccaatctaaaaccaaatccatatcctattttacactgataatcaaactgttataatgttttgattagtttagaaaataataacgtacaagcacttaactttacaattaagtaatatcttaatttatcttactaatataattttgtcttgtgagtccggatcttaaaatataactatacacgaacgcaattgaattttgatcattactcttaactttataatatctataatattacaaagtttactcataacaaaatattatatatttttaaaatctattaaacaatttatactataatatatatcacaaaataacaaaataatctatattgaatttaaaatatgaaaccccgcacgtatgtgtgggtcaagctctagtgtcttgttaagaatggtttttgcaactttcgtgcaaacttgtgtgcttactaactctaacacatattggaataaacatgttttattaattgattaacatttttaaaaaatatgaaatccttaatcgtttatcataacaaaattacgaacttgtttaagaatttatattggtaatatattttaaaatgttttcaggtcgtcgtggctaaaacgtttgaaccatttggttgaactagaatctataagtttaaacgaggctttaggaaaagaataataattatttgatactggaaatcctcttaataaatatgataatcttgattcactaaataaactgtaattgcttaattacgttgatctcacaatcttgttagctagcacaagaatgtgacttgattcttgttttatttatttattatggtttttggtgaaacacatagtctcacgacctatgtgtaacaagaaatatgaataaaaccatagtctcacgacctatgtgtaacaagaaatatgaaaaattattcataattgttttggacaaatgatcgatgagagcacgatctaaggtgatcttaaaatgcatctatttcttaagagtattttaaccactcactggtcactgcaacacgaggcattgacggatttttgtatccccgctaaaacaaaactaaatacattaattataaagattgcttctcaaacccaaactctctttttctgccttctctcttctatttattgactacttctcccgaaactaactagtccataaaatacaaacatagactccaag

SEQ ID NO: 10513 - DNA, 3000 bp, Unknown
  misc_feature (1)..( 3000): cDNA_ID_3036991_gDNA_ID_2213656_Annot_ID_181779 3000 nt of promoter + ATG
taggcttcatcggacaaactcgagtaacaaattcgaaaattgaaaagcttgactatacataactcaaacttagagacacaagctgcagtaaacttcataggagatcaagagaagtgtcgaaactaactaacacaagcatgcccatgaggaaggaagggataacgaagaaactttatgagttggcaactctctgcgacatcaaagcatgtgcggtaatctatagtccgtacgagaatccagtggtgtggccgtcaatcaccaacttctgtagataacaataattcaacgttagagaaaaaagaagaagttaccatcaaaacaattaactaaaagtgttttgaaagatttacaagggattttaaaagggttttataagatttacaagagatttttaaagggttttaaaagatgtacaagggtttttaaaagatttttttaaagaatttacaagaaaaccctttaaaaactcttgtaaatttttttaaaaccttttaaaatctcttgtaaatcatttaaaacctttttaaaatttttttgatggaaaatagatttactagggattttaaaagagttttaaaatatttacaaagaatttttaaagggttttaaaagatttacaatggattttaaaagggttttaaaagatttataagggattttaaaagagttttaatattgataaatatatatttatatttatgacgagagaaataaaaagaagaaaaaagtaaacgtacgtcattttagaagaaaactttttcttttgctatatgtagaggaattaaatcttctactttactctgctttttgacttttcaaaaagaaaaagattttttatttacaatagaaaagtatattacattacataatacacaatcaaatttcatatttcaaataataattcagtaaattttgtaatttattacaatatctttatttaataattattttgtttccagcacataaagtatctacaatactattatttaataaaataacacaaaatattatgaatatttctgatttataagaaataaggttgaattttgatgaaattcaaagttattatatttcacatataatcaggttacctaaaacacgaatataacatatgttcttaagttaataacattatctaaaaactcttaaaatgatccaaaatgtcaactgtaactcataaaacgttaatgtagattttagtacaaatttaaattaatatatttaaaagttttatcaatcataattattatatattttggtgatttttaacaaaacttaactaatctttctttttttttgtaatcaaaacgcaaactaacgaaaccaattgtgaaaattttgatttacaatattaaagtatacataatttattaaaaacataacaaaaataacatcattgaaaacctttataaaaaatatataactaaatgctgtgactactttcctaagtttctctcaagtttttttcaagttttgctcaattatttatttggtaaattatatgcagaaaaacaaaacaattccacaactttttctcaaggttttttttttgtgtgctcataatttataaattgaaattagaaagatacatgaagattaggcttcatcggagaaatccgagtaacaagttcgaaaattgaaaagcttaaccatacataactcaaacatagagacacgaactgcagtaagcttgataggggaagaagtgtcgaaactaactaacacaagcatgcccatgaggaagggacggataacgaagaaactccatgagttgacaactctctgcgaagtcaaagcatgtgtggtaacctacagtccgtacgagaatccagtggtgtggtcgtcaaccgaaggtgtttaagaggcggttttaatgtttattaaaaggccggcgatagaacggtccaagctgatgatgagtcatgagacctacttgtagaaccaaattaccaaagaaacaaagaaactggagcgtctacgtcttgaaaaccgagaaactcagcttacacattttatgtttgattgtgttgagggtaagataagtgagcatcagtatggtgcaagggaccttcaagatttaagttttcatattgatcactatatcaatcagcttaattccagggtcaagatccttacaaacaatggtgagtcttcttcttccgttcctcctctacttcatacttcagttgcgggtgcgggtgcagctcctcttcctgttgcgggtgccgatcttccgatggatcagaatcagtatgagccgattcagctctatatccctattggtcttagttatcatattcaataccaacatgaaatctatgataatttcagtttggatccaaatcattagtatccgtttcaacatgatccactcatgaatatgttgatggaatatccttatcaacaagtgggttatgttggagagcatgcgcacatccttttcatgaacggaaactactacaactaccaccaaacaccaaccgttggtcttactaccaccggtcacatgccttccaacaacaacaccacccccaccaccgatgtgtgatgtgtttcaatagtttgcatttttgttttgttcgtttcaaaaaaccttaaactcttacaacaattaattggatttggtttggttataaaagatgtgtctattcaaacaccaacttttggtaaaatatttgtagaggccatacctcgctgtgatatatatttcgactatctcatcccattttttgggtgatttgttcaaaactagctatgtctttttcggtatgcaatgtataaatgtaaatgtaattttgacaaattttaaattttatttaaaatttatttatgaaaagtattcattttgcatataaaataccaatttggcaaattaaagaatcttaaaaagaggtgtaggccggcttttcatttcctccgtacgtaaataaacaacccaccaaacaaaaatctctcctcgctccatgccttctctactctctcttcattctctcctaagct

SEQ ID NO: 10514 - DNA, 3000 bp, Unknown
  misc_feature (1)..( 3000): cDNA_ID_3036999_gDNA_ID_2213656_Annot_ID_181777 3000 nt of promoter + ATG
aaataacttgtgagttataaatttatgatattgtagtatataaaaccgatttttagtgtatacctttcaataattgtataaagtatattttaaaagtcaaattttgtataaattaatattgcaacctcatgaaatcgtagtgatttacccgtagggtaccacggggtaattttaattttaattttttataaactgataaatttgttgattttagttaaaaataaaaaataaattaagttatatttgtttttttattgtttcagattgtataactatattttgattgttaattccatgattttatctatggcataatatttatcaacacccggctagtttcttttaatctagtgttgaccctgaaagaaaaatccataagaatacgcataaatgaatagtaaattaggagataaacatcattagaacatgaagtaatttacttatgaatctctatctatttttttttaaagaatcaatatactagattaattgtgaggcaatgtgaattacatattttcaatttaggatgacgaaaatattttttaaaactacaaaatagtttcagtatatattttcttttctataattcaaatttagcttagttatatatttttaaaataatgaatattacatgtttaaaaaaaataaaagtttatatcatttaaattctaatttaattgttaaatattttaatctatactgaaactattttgtacataattacaaatctaaaatccaaatctaaattattttttatgtgtactaatcaaaaacaattaacatagttttgttaaggaaattgtataaaatctaaattaaataataatttgttattaaattggattgtagtttccgaattatctaataacatattaccaaaataaataagtttgcatatatacaattcaaattaaaatagcctgatatgttatggaaacatttttaaatgattttcgaaaatattgggtagttattaatttattgatttaattcaatttttttaaaaaaaacaaaatctctgatatttatttagttgtagtagttgttaatttactaaattacgcatgctaaaatttatgcgtagttagttttaaactactcttacaatgttgtagtttacacaatgcttcccaattaatagtatagataatagtatactagatagtttatgtgcgggaaacaaagtaattattaaataaagatattgtaataaattacaaaatttactggattattatttgaaatatgaaatttgcttgtgtattatgtaatgtaatatacttttctatttatttgaaccagcgatattttgcatagaaattattattacctatacattgattgctattaatatcttcgttagcatatcatttttatgtttataaaaaaaaaggtatatatattaagttccgaaagattacttgcttaattattaggttgttttaattaaatttagtttttaattatttattacttttaattggaatttgttgatatttttatgttgttgagatatttatatataatactaatgacaaatttttgtaaataatctaataaatggtggacaattaatcaagtttgttgagaattgttctggttgcgacacgtcatgacatctctataaataacacagtagctaaaggttattctcttaagtgtatttctctattaagatatataggggatttctctattaattctagtttataattttagaagtttatttgattagttaaaatttaaaataatttagctagattcaattgttactatttgaatattaaattatatagctagattccacaaaaaaatcacatataaatttagttagattcagcaatttagctaggttcctcaatcctcacttaccatttgaaacttgaatgtgtctctatatcaattaaggtttacattcttttcgggtttcattaggatttaaggtttcaatttgtggattcatcctaaaaggttttcctagcgacaataatacttgaccttccacaaattccggagaatttcaactcagtatcccttgttcttattagggctctttttcttatgacaaaagaactggcatgtggccaatacgatgtgaagagtgaacgagaacctatgtcgatcgataaatcaaattagtactgggccaatttataaaaagatagacaagaaccttagtgggcgtaaataccagattaaagcccattataaaaggagcaataattggagatggaagttatggtcacggacacgtaaacttttacagagctttattatactttatggtaataagactttaacctttttttagtacataaagaattgttacacggctctatgtaaatcttccaagtagtagtaactccgacaatagtactatcatgcacagaattctcaactctgttttggtaacactatagttaacgaaagtagaaagaatctagtgactcgaatggttcgtgctaactcaacaaccttaatttggttgttgaataaattatctcatacaacaaataaaacaaaataaacgaggtatggtcttaaaatgtattcattgattacgacaaaaacagacaacaattataatcttgcctgatgtcaaacatatgcatgcacgatattattagtcaaaattttcccatgtagtagccagaaataggacaagttaaaatacaaaaacaatctaaattgagcaactttataggagaaccacgtgaaggaatctaacgagtggaccctgacggcacgtagcctatcgagtcaaaaagatagcaaacggcgcctaaaaaaggatttgagccatggcatttccgtaattatattattaatacgagggtaaaatagggaaatgaaagacaactgacgtcacgtgcgagtcaggacatggaacaattggcagaccacagtaaccaagtggtcaagctcaagctttagctcaaaggtctgtctcttcaggttttgtttatgaaccaaataaaaaacaaaactttaccggagatg

SEQ ID NO: 10515 - DNA, 3000 bp, Unknown
  misc_feature (1)..( 3000): cDNA_ID_3038276_gDNA_ID_2213656_Annot_ID_181775 3000 nt of promoter + ATG
aacaaccatttcgttttttctgttttgttttgctaagtaaatattcattaaaactaataaattgttttggtctaacaagttctataacgcctacaaatttgattctatagaaacaaaacaaactcagaaatcttagactatggacagaaacaataaaatttacagtatcaaatgaataaacgattttgaagttctaatcaagtatattagaattttgatgtcgtttacattctaaggatatgaattttttaattaaatgacataagaaaacaagataaagtttggttttgcggataaacatcaaacgggttcggagtggatcccgcatgataaagaaatggtgaggtccatttccatccaattcaatgtgcgttttctacaggtttcgcaacacttgtttctcttctatttattattcaaatctagaccaattttggcgcaacgttacacaataagtactttttaaatatattcgaatatttcttatgtttgtagtgaataatttaagagaaaaaaaagtcattaatgtcttcatttatttggttatagccaaaaatgtctaataatgtagtataaactaataaacatatatagacaattctagtataatgtagtataaattaatgtaccacctcgatggttactgaattatttgtactatccatttacaatataataaagtcagatgttaaaaaaaaaaaaaaaagacaattctagtgaaaaaaatacaaattcaaaattataagaattttgcgttctaaaagttgagggctaataattttgaatttgctacttattcgatatagtgaagtaaaaactgcaaattatattaattttgaatatgttaaccattagatttttgattaaaaatttaattgataacggatgttgtgaaaaaaaaaaaaacttttatcattagaaaaaaaattgtctcgtgattttcactagatattcactcttatttcctactaaaaaaaaaaaagatattcactcttatttgtttatttaaaattattttgagatgtttctttcatataatcttgtactcaataaaatctgttttttaattactaaatttaacattaaaatagaaaaactataaatatgattagtcaaatagtatagagcatttaatttaatagtataattaattaaaaatgataaattaagaaagttagtataaaccaagaccaaaaaaaataccaagagcggagagacagtagaagacacacgcccctagttttcacttcccattctccaactatatatataactaaatacaatcgtataagaaaacacacagagaacaggaaaactaagaagattccattgaagctaaagaaactaaaaaatgttgctggtgactttgattgctgagatgatgaaggagtacacggtggttctcgccggagttgtggagcatcttttttctcaggcgccttttccgagaagaatccgacttcatattttatactctcttcctttccatagttccaatacctctctccctcttcttcttccttcccctcctccttattctcgttcttcttgatgtttcttttcttgcttactttgtgatttttctttgagttgaaagcttttgtgtaaataagatctttagcaaaaggtaatagaaaaaatgttacagagctttgttttatgattttcttttgttgttcaaaaagaagtttttttttattgatttgaaaacattattcaaatttgtaacgttttggtttggaggtgaaagttctcatcatcgtattcgtagagttgagtagaaggctctatttttccgacgtatcttcttagtaaagaatagatgagagacaccatttcctttagaacctctaaaatctcgagttatgtgattctgaaatcaagaaccaaaagacaaaagaaaaaaaaaactgtttactcggttcaatttgtctctttccggtcgagccactcaaaccatatcaattttgagaatgatttacttccctttggtgttagagaatgatttacttccctgtagtttattggacttaatggtagttgtattatttttttgaagcttaattggtaagttagatgaaagttttgaatgtgagattttttcttcgagacttttctaagattttattattaatcttctgtttgaaataagggtctcattttttgagattattcatatttatctgaatagtctcatttctcatctgaatttatttttagtaattttttggcagttctagtaggtaatatctatcatttctttctcaactcaacaaaaccatcttcaatattaataccgagtacaaagtgtttgcttctccgtgtctaaaattgacttaagccacaagggagtactactatccaaggtacataggaaaatacatggctctcttagcacattggctatcttgttatcctctaaaaggaataagttggtccaaaatcatctacttgtagttccaacttccaagcctccatgtgagtaaatgtaatcttattacttatcttcaaacactctcaaatcttactttttcaacacccaaattgtctaaacattacacacgagaccacgataatgtcgtgacctcagcttcaagatgatacctaagcttaggatatacattggccctatactactacttcacctctcaattttcatctctcaataccattcaaaatttaaaatatgtttatgcaaaattcaaaagagaagagaagtttagggacacataaaaaatatgacaaaaataaaaggttgaaaatgtcaaatcaaaaagttttcgtcctaatccgaatttttgacagagtaaacagagaacgacatttttttttgtttaatagaatttgacctgaggaaggaaaaagcttcgtcctttcgcaaacccagggaaggggaaggtgaataagctctgcaaaatccctcccttcccttcttcttcttctacaagatttcaccatttctccatcctaaaccataacaacagagatatagagaagatg

SEQ ID NO: 10516 - DNA, 3000 bp, Unknown
  misc_feature (1)..( 3000): cDNA_ID_3037003_gDNA_ID_2213656_Annot_ID_181773 3000 nt of promoter + ATG
ctccaaaaatggatgtgaagaaactacttacaacgatgcatgggctgtcagagttactaacacttgcacatggttcagaatcttcagattcaccgaatgcggaagagcttgatctcattaacagtactgtacagaatctcaatttgtacatccaaaacaacagtcaggaacatgctgggaatcaaagcgttgcacaatacaattcatatgatctaaagctgttacctaacaagagtaaggtatgttgttctaactgtttctatgcctataaattgctagcttaagccacatgagatttcattatacttggaagcccattacattcgcctagaacatattttattcaaggtcaataagaaaaatatactatcatgtcttgtagaatttaccaaaatgatattgttttaatgggtcacctcttccttttgttaatgggtcaccatgattccaaatcctgtctattagctatcgattagagaccatcagtttccaacggcaaacaatatgactgtcgaccttgatgtgaaaaggaaggataagtactctgtggtttcaagggagactgtcccaggttctcgttcgtatcaatatggtgcaaccgaagataacggctttggtcaggtatgttttttttctccatacctatgctgtgataattggcgtttagtaggaggtagaccgtcagtttgatcatgtgggcaggttgtgcctacaaatggttaccaacagcatcaaggtgtggagcagattaaccaaaatgcactgttctataaaagcttatggctgaaggctgaagcagacaggtgtttgatggtctacgagacttctctttcgaacccatatccttgaagatattagaaaggtgacatcaaatcatccatcccctctaaaaatactttgaagggcaatgacatgtcagattggtaaggcttgcccaagattttttttgattttgcaggttggcatgtaaaatatcaaagaacagcctcaagatctccaatttctggatggagactagataaggcatacaaatcattttcctaagaagtggctgacacatgactaattgtgcagaaagatgaagttggtactcctttctacaagttaccctttattttacttatggtcatgtcgattcaagagaatgaacactgatactatttctcagaatcactactgaataaattggtcttttttcttatcagaacctgggaaatgtttggacgtggagcctattgattgctgaagattgtaatgttttcttgttatggtcctgactctttgattaagagatgtataaacaaaccactgttactcttttgttaactactacgtcatcacacttttgttatatagtgcctataatgaccgcaaattaaatactttgatcagagtagacagataatgacttcaaatcaaggggagacataattaataatgttcaaagaaaatggtagctgagacaagaaacaatgaaacaaaagcacaatttaggtggctctactactcaactctatgtagtgagttccataatggctgaaacgatatccccatcattagcctttagagcactgacggctttggccttggagacacctgcttgggtcatgacaagatcaatgtctctggcttcaacaccagtgtcatcaacatcgtcttcgtcttcttcctctgctagtggagccatggtagcttcagaaccggcgttaggtagcatggatgtcacatcaggcatcttaaacctctgagcagcttgagtctgtagctgagagctcaaatcgtcgaccttggcctctccaaaaatgacgtaagtctctgcattgggactcttgtaaacatctggcttcgagatgacaaataacacctgacatagatgcaatattttccacaatcatcaaacctatgttacttataaccagagacatgagagtttattgattgttagaagatttgtttacattcttggctcttttgattgtcactctgctgacatctgagacaggtttcatgccaagctttagaacagctttgcgacttttcttctcgcttctactttgctttgcattctcatttccaccttccccttcaactacacagccaaaacattgaaacaaaacccgaaattaacaaaggtttctctttttagtgttccatagagaaacaaattcacatttaagagctatagctcaagcttaatctagggcttatgaacctcaagttcaacaattttctgattttctacaaacctaaaagacaaatcttatctatacactaacgtttctagaaacatacatagaccactcgaaatcaaagcatgaatcagaatcaaacgagtaaattccggttaaccgaaataaatcaaaccggaaggaaaatgaaatgaaagagagagtaaggaaaatgaaatgaaagagagagtacattaccttcgacgtcctcatcgtcttcatcatcgtcttcttcctctccgtctttcacatcctccacaacaacatcatcttccttctgtttccaccagaaaccattatcaaattcgacgacaacaacaaatcggaaacaaaatcgctcggaggaaaagaaaaaaaaagacgaacctcgagtttcaattgctctttgatggattcaatctgagatttctcttcctccacaattgctcctggcatctttcttcttcttttctttcttagcgcagcaagaccttccttaacagtgagtgacagatgaaacaaataaagtagataaatgatcctctgctccgcggttcactataaacaaacccaatggtcgtcaattaaaagcccattgggcctcagtctcaaaaactttgatttgttctttagtttacttggcgaatttacgtacgtctccatgccagaatggtcaaaaaaaagagaagaaactattagtctaaagaaatgaagcattcacaatttgactagaattgacaaaagcttttgctttgtttcagagattcaggaagcaagaaaaatttagaaaatg

SEQ ID NO: 10517 - DNA, 3000 bp, Unknown
  misc_feature (1)..( 3000): cDNA_ID_3037026_gDNA_ID_2213656_Annot_ID_181765 3000 nt of promoter + ATG
caaattgcaacaggaagttgataggagccaagtactttatcaacggttttcttgctgaaaaccaattcaacgccacagaatcccctgactatatatccgctagagactttgacggccatggcacgcatgtcgcctccattgcgggtggttcatttgttcctaatgtaagctacaaaggccttggtagaggaaccttgagaggtggtgcacctcgtgctcgcatagcaatgtacaaggcttgttggtatataaacgagctagacggagtgacatgttcattttctgacatcatgaaagcaattgacgaagctattcatgatggtgttgacgttttgtcaatctctctcggtggtcgagttcctctgaattctgaaaccgatctacgtgatgggattgctaccggagcattccatgcagtcgcaaagggcattgtagttgtttgtgctggtggtaatgctggcccatcatctcagactgtggtaaacacggctccttggatcttaacagtggctgcaaccactctagaccggtcctttgccacacctattatacttgggaacaatcaagtgatattggtaaaacagagtagctcttctacaaatgtcgtttcttcttttctttaataaaaaaaacaagttaggccttcgaactctctgattatgggtattgttactgcagggtcaagcaatgtacataggtccggagcttggcttcactagtttggtttacccagaggatccagggaacagtattgacacctttagcgggtaattaatgataacaaatctattggtgcttgcttagaaatttgttcagtttccctaaagaacattattctctgatatccttctgaatacgtaacatttttcagtgtctgtgagtcccttaatctcaactctaaccgtacaatggccgggaaagttgtattgtgtttcacaacagcaagagatttcactgttgtatccacagctgcgtctattgtgaaggcagccggtggtcttggcctgatcattgcaagaaacccggggtataatctcgctccatgtagtgatgattttccttgtgtagccattgacaatgagcttgggaccgatatacttttctacatacgttatactgggtatgaaactatgaattatgatcttcacttcttatattagcacatgctcagttgtttcattcccttcaagaaacacataatcataagaaaaaaaatacagatcacctgttgtgaagatacaaccttctagaacactcgtcggagaacctgttgggacaaaggtagcaactttctcatcaagagggcctaactcgatttccccagcgattctgaaagtatgtctggatccttattttctgacttatcagtttttctgcaatatctctaattttttacacaatgcagcctgatatagcagcacccggtgtgagcattttagctgctacatctcccaatgacaccctcaatgccggtggatttgttatgcgttcaggaacatcaatggcggctccagttatttcaggagttattgcacttctcaagtctttgcatcctgattggtctcctgctgcttttagatcagccattgtcactacaggttctttatcttcttgcaactagaaaagcaagagaaacttgaatcccccttcaactcaataatcttctttattttgtagcttggagaacagatccattcggagagcagatagctgcggaaagttcatccctcaaagtacctgatccgtttgattatggtggaggcctcgtgaacccagagaaagctgcagaaccaggtctcatactcgacatggactcacaagactatgttctctacctgtgttccgctggttacaacgactcatcaatctctcggcttgtcggtaaagtaacagtctgttcaaaccccaaaccttctgtcctggatatcaacttaccttcaatcaccatcccaaacctcaaagacgaagtcactctcaccagaaccgtcactaacgttggaccagtcgactcggtctacaaggtcttggttgagcctccgcttgggattcaagtggttgttacaccagagacactagtgtttaactccaaaaccaaaagtgtctccttcacggttattgtctcgaccacacacaaaataaacactggattctactttggtagcttgacttggactgattctatccataatgtggtcattcctgtttccgtgagaacgcagattctgcaaaactattacgatgagaactgaatgattcgtaatagttatttattacccccaaacatttgtttcttacacttcagcctcgtttaataaaccactaatctctgtgttgacaatgaactagaatttagttgaccatgtatgtagtgagtgtaaaacattctttagtttctgagtgatccaattccaagaaaatgtaaacattctttgaaggagacatcagacctctatgtataaaatgttcgtgcttccacaaccaaacctttttttttttgcttggaatgagaaattttgtcatcaattcttgtggtgctatgtccgataatagcttcgctttgcttgtgttgtgataatctcaagtaggtttaggttcatatacagtgtatatggattggccgagaagcagcatgatgatatatagtgcatgctcgtactactcacaagctagctagctttattatgtataaatagtataatcttccgccaagggattggcatggaacatagtaaggaaagtgctgcagatactttgaaattattatatcttgttcatctagaatacattagaccccacaaagaaaacaaaacattcttggccacacaaagaccaagacatttccgtttattttgaattttcgtctcagtctcccacaagtcgtacgtagtataattgcatacaaactaaaacacgtttctatatatatataaatgctggtgcttctttaaaaatattcaagtagattgaaagaaagtgaaggaacactatttcttttctgga

SEQ ID NO: 10518 - DNA, 3000 bp, Unknown
  misc_feature (1)..( 3000): cDNA_ID_3037046_gDNA_ID_2213656_Annot_ID_181760 3000 nt of promoter + ATG
agaagtacttgctgctgttcaggttcagaacctgtggtgcctcaagagcagcctaccaacgatcaaagtaaatcaagttattgctcatgcttgtacgctattcaaacacagattctgcattatttatgaatttaatctctgtaggctacatgtttcaatcaaatgagaacccacgattcagaaacaacacaactgtaactacagaagtaagaggaaagagtgttacctgacacaacaaactgaaccggagttggttgtcattgtagtctactccagttataggaccatagattttggatcctgttttgcccacaacctgcattattaccattcctcattagctcaaagtacaatacacccttgtgattatctaaccaatataaacagaccttagcaagaaagattggatggtcaacaaagacacgatcaactcctcgtttgtagcaatggaagaaacgaacattctcaactttatccccaactttgatctgcatcaaataacattccaagatgacttacctaagcatccaaaattcatcaaggtccatacagagcaaaagaaacttgagagaattatacctgaaccacaacacaagtgtcccaagcatctttatattggtcataccgaggacaaattgtcatcacacggtggcctctagcctaacaaaagtcataacatgtaggttcatcaaaaaacaagtaaagacctcaaatcaagctaatgtttatatgaacttacagcaagagctggaggtagaccaccgagaacatcaccaagaccaccagttttactccatggaccaacttcagctccaataaaaatcacagacattcctttctcacacacaatcttaccagcagtcttaactttagaagatctctttgaggatttagcagaaacaggtttagcttgagatctcctctgaaggttatccaccatgttgaatgaccttaacccacaatgagtcaaggattggccttttaaggtaatctgagcgacatcagagcatgaagaagcaccatgattgttgaaaagtgaagttcttgacacaaagttagaagaagcagtcacagttgccattatgaactacccgtttacctggattcaacagatgaacaatcaaaatcgatactttaaatagaaagatacaatctttgacaaattttacattaaacagaagaaaaagctcacagattttcacggcaactgaggaaataagagccaatggaggagatgagaaagtgaagagagcagaggagaagaatggtcagttatgtagagaagaagaagagtggaggcttggactgacacgagtgacacgtggcgttgttatagttgttgagtggcgattttcaatcacatgatgagggtcaatactcaaatactcaatggcattgcctgagaatatgtgagaatcttgaggttatactttgggaggacgatattttgatgcgtacgttttggtccgagtggctaagaatcgacggctgagatttgttggttttgggaaactgggactcttttagtgggtcctatgcttacacaagtgtttctgttgtcgtcgtgcatcctcatgaacgtaccgttggacgacatttttcttggcccatttgttaaaattcacggtcgagaatttttgtcatgttttatttatttagttttgtgtaagcttaaccactgattattactaaatagcaatttttaagtttaaattgataatgtcaatgtgattgcataattttcaagtttcttgcgtatatatgtataatttagattcacatatatcagaggctagccaaataaattatttcaagaattttttcatgcaccatcatttttccttccctttcaattactttaagttatttaatttccattagtcacatcttaagtagtaatttgtttaacaaatcttggaatgttagaaaggagttaatgtcatgattatattttttggttattgtggacggttaggagtgatttgtcgcaacataggagatcgtgtgatgatgttgcaatctctccaagacagtttcacgcatccacaagaacatagtctttggcccattttgacgttaacttttatttcttaaattcggacacaaaattatgattcgtgaaatgaacattttatattttcatattataatctcatgatcatccgtccaaattcttcattttaacataaatttaaaactaagtctttattttttaacagaaattccatcatattattttttaaaaccatgtttattcatgtctcacaagtctataatattaaaaaccataatcatactgacaatctaataaatccatagtcagaagaaaaaatgtcaccataaaaaaaataaattcggatatgaaaaaaaaataaactcggaactaattattatccgaattcgatgctctcttataataccatattgaagtaaaccttaccggaacaataaattattgttaagatttggacatgtagccgagaggataccacttgagctagccaaaaccaaaggagtcaaggaatcatcaaggatctgatgatgttgttgtggtgattatcatctctatgattccaaccaaacattggaacataactccaatcatttccataatttagttatttttttaaaatgagatataagatcaattacttaaatgaaaatgtgtgacaattcagaaatagtactagatatgtgggaatagtgtattacacaaaatctgcagtttccaagtagccttgcaagttgcaacgtttaagtcattttcttcattggtgggtattcgccgaaattaaaaggtactatcacacagtactactatacagtaaccggccactagtggctaaaaggaaaaaaaaaatatccaagtaaaatggaaatagtcacgtaatttctctcctacacatttacatcttttataaattctctgactcacacagtagctttccaacacaccacagtctttttctttttatcttctctacaaaacaacatcctacc

SEQ ID NO: 10519 - DNA, 3000 bp, Unknown
  misc_feature (1)..( 3000): cDNA_ID_2704610_gDNA_ID_2213659_Annot_ID_132500 3000 nt of promoter + ATG
tttcattcttaatcaactgttcttgatacttgcgaagagaagatagccctagcctctactatatatagttaggactgccttaaaacacactcgcacaatgttttatgtgcctcagtcctctgaaacgaatcttcatttttcagattgatataagggtagcacctggttctcatgcaacagaagatgcatgtatgtcatttttcaatatctatccatcttttttggtatgcatgttttgctttacatcgagtgtacttctttaacatgatgtctggtttcttggtgtttaaaatgcagtgaataaacaactaaacgataaagaacgtgtggcggctgcactagagaatccaaacctcgtggagatggttgatgaatgcctgccatcagaagagtgaattgcttttattttcttgtgagcaagtaatttacacaagcctggtggtctcagtttacactatcaatacatgtctctgttttatttgcaaagattttgatccatcacatcgactaggacttgcattgtaatacttactctgatttcaagtttgttctcaatcatttcaataaagtctcaaacacaagttctttttaataaaagttgacgtgtcatttcgatttcaaagtacatatacatcaatcaagttgggaacttcacatctctctctctcttaatgcattattacaaagtcagcaaattgtttatgaagcaaaaagctgttttcttcttcttcttcttagatgtattgatatatgaaaaaggaaacaacgataatgagatggatatttttggaaaggatatgtaaacttgaaacacacactttctttttgtgtcccaacttatctttaggttttcgattatccagagtatatgatgtttattgtttcgttgtataatgtatgggactcgaatcatactttaacaagaatcttgtatatagcaacttggtctcaagatcaacctagttgcataacttgtaaccctccgatagaatcttgcaatcatatatatcttgtagatgttgacgaactcgagaatcgggtaacaatcaatcatcttcttttgtagtctcgtgatttgattattgtcgtcgttaattgttatgctataagtagagtttaaatttgaaaatatgcgtatgtgagttgtagacgacaaaaaatatttaaatttgtttacgttagtccaattatatggataatatttgaaggaaatgaatgtaactgtaattctatagaacaaaaatgactgttactaataacatagtaacaattatgtcattgttgattatataataagagaggataatgaagacacaaatgtcaaatcgactttgttttctttattcctggtctttaggctttatttacatgttgttttggtttttgggagttatcatcttcaaaagattgggttgaacagtaagtgagagttattagcaataccataagttttaatacatgcacatagacattttttgacttgccggtgtaaagcgacacgacccttccttatttttccaaaattattatttgtttaacaaaatattatacaatacgatttgagctaatgaaaactaatataggaagaagaatctttgaatattcaaagtttgaaaggataatatgctatactaagtccgcataaattagctggcttctagaaaattgttgttaaaaatagctgtcttctagttttaccatttacataaaagttacaagaatttatatcattcattacaccatatgtaatatatggatatgaattcggatgatgccacatcgaccacaatagctcaaagctactaaacaaaaagtcttgactcttgatcaaacatttggagtgtttattccaatttttggattgttttggtacaatttttatttaatcaataatttgtgggacagtggtttattaggttttgtaatatcttgtttgtctcgagtcaagacacatgtatcatgtatgcttcttgttcccataccaataattatgttaaactatgttcaatctcaatattcagcaacattaccaaatagaaaaccaaaatttttataaaaactgttagccaaagttgggataaagacaattttagaagtagaagaaagaaaaatgactagtatacactatcacagaggtaagagttaaaaatgaactctatagcatattatgaatatgactattgtaaacttttcctgtatagttaatttagtatttaagaatctaaatcgtactttcttcttccaaaattctgttccatattcttttcacgtgaacatctaatccatagagttaaatcaccaaaattccatttctgtttcatcgtcgcataaaaaagtttatgaaactgtatcgatatattctatgcttctaatgaattatatacttggaccagggttcatcgcaggattcgactaatccaaaacttttttttttaagaaagtcatatttaactgaaacaaaaaccagatgatttaaaaaaaaaatgtttgcatatatcatatatgtgttggcttttgaacaatggtagctcgaaaaataatttcagaaaaattgcatgcgtaagatgaaaacagagacgcgattaagaaaatgtcaatgagatattttgtgataacaaatactaatgagttaaaacatgttttttgacaattttagaatgtataaatgtccttggcaatgttaaaaaaataacaatattttgtatgagttaaaaagagaagctaatttagtaaaacaatttactttaatttggaaacgtgtgataattaatttttcattggaaaaaagcaagctgatggctaaagtaacaacattttccaataccacgaccacgagtctataaattcccaagaacctgttgaatcactttcacttctcaaagcacctaaaagtctatctctctctctctgtatacagtcatgcatgcatagagcttaaaagatacgaaaacaccacaaaccaaatatcattaagtaattaggaaacttaaactaagtatg

SEQ ID NO: 10520 - DNA, 3000 bp, Unknown
  misc_feature (1)..( 3000): cDNA_ID_4268675_gDNA_ID_2213659_Annot_ID_132503 3000 nt of promoter + ATG
acaataccaatgtactataccggtttaatgcgcaagcatattttagattgaactttttgacattttagatataaaaaatataatatcaactatttaacttgcggaatatttaaaaattcaatgtgataaacttttttttttcatttggaatccaagctctttgagaccacttgaattgaacatcttagaaagtttataaaaattaagtacacataactttacttacaaaaatttctgataattctttatcaaaagatttttttttataaatatttgcaaaattaaaattatggctaatttgctagaaaagcaaaacttttagccgaaattatatatatagttttgtttaaaggcccaaaaatcgttattttgtccaaaattgtccaattacatcaatcttgcatttttttctttcaaaattagataaatctaaaaatcaattatttataaaacttaaatatttttgcgtaatatgggggttcgtatagtgaggggtaaagttgtcattaaacttgaataagagatgtgagcagtgttttcatgcccgacccgaaccgtccggtccgaccggttgaaccgtgacccgaatactttttcggtttgggtttagtgctaaaacccgacaagttcaaaacaaaaaaaaccacaaaaactcaccattaacccgtgaaccggttgaaccggctgagtgtgggtttaaaaaatttttcttcatttcggaataaaatatgggattttagactttattcaatcatttttagaaaaaaaatcagttcttaaactcatttgatgttttagattttgataaagacttcacaatgccgctttaaaaaataaatcgaatactgagtgagacacccaatattagttctgtgaattcacgatgttttattagtttatttctgtcattggtgatctcctactatatttgttacggtattagatatttagttgaattttaaaaatttagtcacttcattattattgtttgcttatatatatatatatttggtgcaaatgatttaatattttattaaatataatctgattttatattttataaacatgatatgattattttgtttttaaatgtataagaactctaaaaactctaaaatctctattaatattaaatttattaaataaattttaattaattgatccatggtccaacctggttgacccgatgacccagtgacccagaaggtagtccggttcactgtctgggtcgggtttaaaaacattggtgaaatgatagaactaggtacaatacgtttgaacgagtagacaatccttactcaagctcagctctgttaagttaagaaaaaagataacaagcgattctgtgtggacgacaaagcattgaatagagtaacagtacctgacaagcttcctgttttaatgatagatctgttgctagatgagtttaatggggccaaaaatcgtctcaatattggactttggaatagggtatcatcatatatactaatatagagaagacaacgtttagaactcatgatggacattatgagtttgttgtgatgtcatttggtattacaaatatgcacatgttacattccaagcattgatgaatgaactttcaagaccttatttcaggaaattcatttttgacatctaacgggtttcgggtttacttcaaatggaaaaatagcacatgagtaagggatcgctctaaatggaattcaaaacatgtaccttctttttttgcaatagaatccaaaccgaactattatgtcaaaaaatttcattgcaattttgttgttcgttactataaatttggtttcaatgttcgtaaaagaatgcacatcacaatacacatcgtaatattcatgacaacatattaactaaagataagggatcgctgatacagttttaatggttaagttaatcgtctaatacttttttctctctctttgttatcgtcaactagagtatcttcccgaggcatttatctcaactctctgtaactctcctccctagagtgttctccattaccggctcaatttcaagtggtccaaacatatcagacacaaacagtaaactctcacatacatcatgagtcatttcgtgaagtaactgcctcattgttcttctgtctccaattaatttaacacacatggctcttctaataatggttttgattttggttaattttgtagatatccaagatatggatgtgaaagttgaaacacaggttgaccatagtgagttgatatgcttggtattattaactgtggatcaaaaacaatgagaaggaagttgaccaaaaaaaaaataaaaaaaagtgagaaggattgttcatagttttttataaaaacaatctgggcctttttatgggcatttattttttcatgaaaaatgcttctaagcccaagtaggtgtcgcacccctgcccaccccatgtgggccgtacctaggtgtgtcttagatgaagctaaaccatttttcatagactcatccataaaaagtatgcaagttaaaacaaaaaaaatactggttttggtaaaatttgcaactcctgtcacaattactaaggcttgaacctttcttcacatagatgtagcacaactacaatttttttttatatgcaaattagttgctggaaacgtgaactcgatagaagcaaaatgaaaaaaagaagtcaattctgttttcaactgaatccttttgatttcacacacgattcatttcctaaactgagaaaaagcaagaaaagatacagtatctaccaaatcataatgtacccatttctttcttataacctttaagagctttcacacaacttggccaaaataaaaataaaaaagaagctttcatttcacacaccaacacatatctctaaacacataaatctctggaatttacttccttatacgtctctattctttatcagcatatttatacaagagagccaaatgagaactcactcatctcataaaaacaaaaacaacaacacacatttcaaagaactctgaaatg

SEQ ID NO: 10521 - DNA, 3000 bp, Unknown
  misc_feature (1)..( 3000): cDNA_ID_2715815_gDNA_ID_2213659_Annot_ID_132509 3000 nt of
atatcataatatagaatctgtgaatcaaagtgatgatatgaagatagacgataactttgatgattatcgtgaatgcatggattggattaacgaagagatgaataaagatgtatgaataatggtgaaaaaggagaacaacaagattaaaagtagtttataaatttaatatgtttttgtataatgcatattcatatcataaatatagatgtatgttaatcataaacaatatgtatgagattctaaaagtttttcaggttcttaatcgtaccataagttttctttttttgttaatttgtttctcagtctttaattaaaatgtagtcaaacacttttaatttgaccaaagttagtatttctattaaaatcagttctaataaaacttatgaccaagtagtagatgctctagtattgatcctaaatctaattttttattttttttaaataatagtttactactttacttccaaaattatagtcaattgtcattataactattatcattgaaatatatttttgtcaacaaatattatttactatagataaccacgaacaaggcatcatatctgtcaaagaagcattggcatgacttcatgtgctctctaaaattaaaagatatgttttgtctcaattgacatcatattattttttgttacgtcgtagtaatttaatgacaaattactgagtctttgatttttagcaaggtcgtcttccaactatgtttctaaatctaatcatgatttcggggtttgaaggcaaaggatggagcgtgcaaagtcgatttcttgttgttctgatgcttgagctggtggttgtgctaccacttaaagctacaatatgtataaatatacccatttaattacttactcttaatcaaatatctctcaaaatttctccactaaacatttgtaaaccacatccaaaaaataaaaaaagagtaaccagatataatgattagatggagacactttgacaattaagtcataaatattagtgttcaaaattctaaaaaaagagaaaaagagaaaacaaatatcagtgttataaggacactttaacgtttcttcacttgcccaaagctctctgaagataaaagacaaaagagtaaagagagaaagaagcacgaaaaccaaatcaatggcggtttcagtttcaatcctcaccgtcgtcactgctcttcacctccttgctttcgtcttcgccttcggtgccgagcgtcgccgtagcaccgtacccaatttatctctctcttactaaaatttgtcatttttccgatttgtgttgtgaattcgtgttttcttgtttattcaggctgtgccggttccggatcagtacgatgagaagactatttgtaagtacggaactgaggcgtcgacagtgtacggtatgtcggcgtttgggttgcttcttgttagccaagcggtggttaacggtgttactaagtgtctctgttttggaaagggtcttgttactggtacttcttacactgtctgggctattgtcttcttcgttgtttcttggtaaagtttattcctttactctctaattgaatcttttgtacatcaagatttgaaattgagttgatttaagtggtatttggtaaccaaaatttgaaatttctgattaggggcttttaagttagatttggaatgaactaatttgtgatttgattgtgtatatttatgggttttaactttgaagtgaaaaggaaagttttttccaactcttttcagtattgtgaacatgaaaagtaaacacttttagattagtgggtattgaaatttggttatgtgatttatgattaataagtcactttgttgcaaacttgacttcttatttacgtccttaactcttacttgtgagttgtggatgtctctatctaaagacaatgatagtggtaggcttcgtcatggtcacaattgaatattctatatgtttggttttacagtttgttatcttaccaaactatgtggattctataagaaaagaaacgaccttacaagaataagaactagttagttcatctctatgtttgagtacgtttgtcttagtcattggttttgtgtatctttagggtaagctttttaggagctgaggcgtgcttgttgggtggatcagcgaggaacgcgtaccacactaaaagtgaaggcatttacaaagggaaagagctttcgtgtgccgtcttacccgttggagtctttgctgctggagctgctttcactctcatgtctttgattgcaaccattctttactacttggctcattctaaggctgatactggcggatgggagaagcatcagaacgatggcattaacattggtatgaccactccttcagatgctccaaagcaacaaaacaccgagtttaacaaggtctaaaccagtttctgtttggtcttatgttggctatgcttttaaaaacagggtaaaactataaaaaaaatagttgtttgttaattgtcaatataaacttgtgtcgtcagatataatgttggcttatgtatgtctatgagaaatttggtttggctcagtcatcatcttagcttcccacttgacctcatctagattgttatcatctgctaaaagtttagacatgaaaacaatatgggcacataatggactgggcctacgaagaggcccaatgattgcattcctaacatatctagcctcaacttggaatatacttgcatgggaaagggtttagctatgatcaaaatgttgataactttttggaatacatttttgatcattaactcaagttaagaaagattctctacaagatataaaactaatttattcatgtagcaataaaatgatgagtttttgcaatatgctaaagccatacctttcctgttttttctcaaatcgctttcttctttatgaatccaagaacaaaaccgttcttatcctaaaagttcggaactatataataaaccatgaatcttagaccttagctcacaaaaaaggccacagttgtttcaaaacctgaaaccaaaacaaaatg

SEQ ID NO: 10522 - DNA, 3000 bp, Unknown
  misc_feature (1)..( 3000): cDNA_ID_1024257_gDNA_ID_2213659_Annot_ID_132510 3000 nt of promoter + ATG
acttatgaaacattccaaaagagaaaaagtattgcaaatgttgaatggaaaactacaccaagttatgctattgagattgagaataagagaaaggaatggaagaaaagtgttggaagacgtaagagtttgtggaatagtgagcgtcacatgaagtttatagctgctatctccattttgggtgaagaaggtaagatttatatttcacattgaccaattcgtttttatttattcaagtttagtatactagttttttactctcttttaccttgcagattttcgtccaaaatccatattagagattatgaatgacccaaacttaactcatcgtcaagtcggtagccaccttcaggttcatatataaaatatatatatttttaacatagaaatatgtttgtcttcttattatagctttatactaatatttttattctatgaatttcagaaatacaaggctcaaattgaccaaataagctatacattgccaagaaatgaatcgagatcgatagataaaacattcgaatatccttcgaactacaaatatcctttcaaaatatcagacttaacaaataatctcattgtaagtaattccttgtggaattctttagaaaagaaaaactctgcatcagcctctatcactcaatgtaagtattattctattatatagattttcacggtgttacaatttgtgtcatataagtattaacaatttttttttaatgcagttttgtttaaaaaacctattggtgagaaagaggaaacaatgccaaagtttcatataggcgggaaattagatctaagcaatcattcagttcatggtaacgtccttaacaagctatctatgaatgttaacttcgttccttcaaccataagtaataatccagcttacaatattctttctatcgatagctctagtatcgatagctctagctatactggtttagtttcaactggcttaagtagtgaaaattctcctatcctttatggtttaccatcgaatgatggtgcatctaacacatgcacatctcagatggaatccgaaaggatttctattccgcagtatgatcctaatcaatgtcacccacatagatccatccttgaaactgatgtaaaccaaatagatttagattttacttctatactagattctttcgatcctctagtagatgagtgccttatgaaggaaaacaatagatttcttccaaaccctaccatgaaccttttggataccgatatagacaagatggattgggtttcatttatagaaaaccttagtcaccatgatatcaatatgaaccatatggattgggatccttcaacagcaaattacgttcttcctgaaaccaacatgaacataaattttcctgaaaaacatacaaacgagataggttgggtttcttcacaagtaggttatgttccttttgaaaatatgattccctctgaagtagatataaaccatatgggcatgggttattctggaggaagtattccccctcaagaagaaactaatacaaataatgtgggctttgtttcttgtgaaatacatagtgaaatccctcccaaaactaatatggccattctagaaaccaattattcaaatccgttagattgggttttccctgaagatataacttcactcgaaaccaataccatccaaaagagtttggtttcttgtgaaacaagttacgatgctttggataatatggttcctttggaaaccaatatggaagagatgaacgatgctctttacgatatttcgattgaagatctgatttcttttgacattgatgccaatgagaaggatatattctcttggttagaagacaatggtttttctgaggaaaataatatgatggagtcatgcgaatatcataatatagaatctgtgaatcaaagtgatgatatgaagatagacgataactttgatgattatcgtgaatgcatggattggattaacgaagagatgaataaagatgtatgaataatggtgaaaaaggagaacaacaagattaaaagtagtttataaatttaatatgtttttgtataatgcatattcatatcataaatatagatgtatgttaatcataaacaatatgtatgagattctaaaagtttttcaggttcttaatcgtaccataagttttctttttttgttaatttgtttctcagtctttaattaaaatgtagtcaaacacttttaatttgaccaaagttagtatttctattaaaatcagttctaataaaacttatgaccaagtagtagatgctctagtattgatcctaaatctaattttttattttttttaaataatagtttactactttacttccaaaattatagtcaattgtcattataactattatcattgaaatatatttttgtcaacaaatattatttactatagataaccacgaacaaggcatcatatctgtcaaagaagcattggcatgacttcatgtgctctctaaaattaaaagatatgttttgtctcaattgacatcatattattttttgttacgtcgtagtaatttaatgacaaattactgagtctttgatttttagcaaggtcgtcttccaactatgtttctaaatctaatcatgatttcggggtttgaaggcaaaggatggagcgtgcaaagtcgatttcttgttgttctgatgcttgagctggtggttgtgctaccacttaaagctacaatatgtataaatatacccatttaattacttactcttaatcaaatatctctcaaaatttctccactaaacatttgtaaaccacatccaaaaaataaaaaaagagtaaccagatataatgattagatggagacactttgacaattaagtcataaatattagtgttcaaaattctaaaaaaagagaaaaagagaaaacaaatatcagtgttataaggacactttaacgtttcttcacttgcccaaagctctctgaagataaaagacaaaagagtaaagagagaaagaagcacgaaaaccaaatcaatg

SEQ ID NO: 10523 - DNA, 3000 bp, Unknown
  misc_feature (1)..( 3000): cDNA_ID_3037140_gDNA_ID_2213659_Annot_ID_132512 3000 nt of promoter + ATG
acggataacgtaatcaccattttttctaagtccccacccaaatatctacgtggctttgccacgtcatcctaaccaaaccgacggatttgttcagataatatgaaaaagctcctaaaaacagacagaagaagcttttgtcaccaatctctgatctttttagttctcttatcggtaaaaacttattcttctctttttgttcgatctgtgatctctaataaactaatttgatattttttttgatgtaacagggaggaatcttttatatgttatgtataataataattgagaatatggaaagagtatgtgagttttgtaaagcgtatagagcagtggtttattgtatagctgatacagcaaatctttgtttaacatgtgatgcaaaggttcattcagctaattcactctcgggacggcatttacgtacggttttatgtgattcttgtaagaatcagccttgtgttgttcgatgttttgaccataaaatgtttctttgccatggatgtaatgataagtttcatggtggtggctcttctgagcatcgtagaagggatttgaggtgttatacgggttgtcctcctgctaaagatttcgcggttatgtggggttttcgagttatggatgacgatgatgatgtttcgttagagcaatcttttcgaatggttaaacctaaggtttgatgcttgttttgtatacatatttacagtttcttataaccggtgtaagatctcgggtcgaaagtagactaatacacccgaggcttgtagaaagccgtctacaatggccaaaagagaaccacaacgatctgtggccttaaaccatagggcgagtctttcacctacttgaacaaaccactggaccatacgctctttagtttttttttgtatatctttttatagctttgtagatgaatagatctctttatagctgatgtaccgatgattttgatggtttcaggtgcaaagagaaggtggttttatcttggaacagattcttgaattggagaaggttcagctcagggaagagaatggtagttcttccttgacagaacgaggtgatccatctccattggagcttcctaagaaacccgaagaacagttaatcgatcttccgcagaccggaaaagagctggttgttgatttttcacacttgtcctcatcttccacacttggtgattccttttgggaatgcaaaagtccatacaataagaacaatcaggtttggtttaaatatcacacagtacatagtcttagtgggaaccattagttacatgagattagctctgtttctgcagttgtggcatcaaaatatacaagacattggagtatgtgaagatacaatctgcagtgacgatgacttccaaatacctgacattgatctcactttccggaactttgaagagcaatttggagctgatcctgagccaattgcagatagtaacaacgtgttctttgtttcttcccttgacaaatcacatgaggtttgaaatctttcatccactactatagagtctagttcagtaaccactatatatgttttattgttatataacctaagatctctctacctttgatgtgtgttcagatgaagacattttcttcttcattcaataatcccatatttgcacctaaaccagcttcatcaactatctcattctcaagcagtgaaaccgataacccttatagtcactcagaggaagtaatctcattttgtccctccctctctaacaatacacgtcaaaaggtcatcacaaggctcaaggagaagaagagagcaagagtgtaagtcttaaacaccgatgatcctaattcacattaaatagtatatcttaaacttttcataatgtaactagcattttcttaattcagggaggagaaaaaagcttaatatggtcccaagaaaatggcagagtaacacaatttcttgcaatgcctttgtacataagacactaatctacctcttcatctattttacatggctcagtttcttgcatgtaactgtgaatctgaagattcatcacttgttgattattttccattttgtaaccacagacaggtttgcaccaaattcaccagaattaacctttttagaagtcaaatcacaaggtttaacttacaaaaacaatgatgagatagcaacagtgttaccaataaccataattggtgtttggcttaaatcatattgacaagacccattaaaaagaggttagttatagttgtgataaataagcaaaactccttttttttcttttttgcttaagttccactatcttgcaagttttgtaaaacaaagaccaatcttatccctccaaaataatcttcaaaaccaagcaattagttgaaacaaatgattctcttaaccacaagctgggcctttggttattagtatctccagctacttattattctcaaaaaaatgaaacacacttctcttaatcatttctacatcaaatattaattttaatatatagttttcacacaaacacagtggcataaccgtaattactattagcttaagacttcaagactctggtttgttttttctgttaaaccgtaacaaccaccaaattttccttttaattttgtatttatttttaaatgattaattcctcataatttccctcgcgctgcgaatccaaagcctgtataaatactctctagcttcctctctcaagctactttctctctcaacttgaaatctctctctctctagccaaagaaaacttttctcggaagcttctctctcgaaattttctcggcggtttctcttcttctccaattttctcggtaaatttctatcgctttacatgtcaatttcttctccgattcttgatttcatcgttttgaatttgaaatccactgtgaaattgctgagattatctttctcggaaactagatctgacttattttccgttgtttgattcttcgcgattccgtttccgatgcataaattctgatttctctgtggcgattttgtgtaacagaattgtcaccgggaaaaatg

SEQ ID NO: 10524 - DNA, 3000 bp, Unknown
  misc_feature (1)..( 3000): cDNA_ID_2715803_gDNA_ID_2213659_Annot_ID_132513 3000 nt of promoter + ATG
gtgcttcttaatcgccgatgcctctcttcatcaaaattcaaaatcacttttgtcttttcaaaaatcacagcaaaataatattcaaattcaaaatctgtccaaattcatctagggtttctgataaaacagacgaagaagatccaaattcgctaacaatggtgagaattttatgaattcccaataccccaatttttaaaaccctaattttgtctgttgtgggattgtgttgatgcctgagtttttctgaatttgtattactgattgatgatcagggaggtgaaggagaagatctagagccactttttgattatcgtcgtgttcagccagcgaatttcgtttgtatcgatggtgagtttcgattatttgatttggtcactgagctcgacactcgacagtgataaagatgaatcctttattatcgcttgaatttttgtagatgatgatgatgatgcctcggtgacgccaattccgaagaaagcgaaaacttcacaaacagtaagaattgatttttattgattggttgttgtctcattgagctctttgtgttaacttgatagatacttttggtattgtgggcttgtaaagagttttgaatcaatgtcagtgaaggaacaattcgattatgtacttcacaattcataggttgaatctatcatcattccttttggaacttgaatctttttatataggttgagaagttagatgatgatgtgaaagtgattgaagttacgggtgatgacgattggttgcttcctccaccaaaggttatcttcgacaaaagtaaagactctgttgaagattcaactattaaagcattgaggtaacttttgtatgtctttgagtatttctcatctctaagcttcccatgttgctgttagaggctatggtagtgttatttgctatccggaaagagtcccagtgttacaatttgattataaatgaaatatgtaacgtaggtcgaagaagatggagctcatgtcatttacaaaaactgtaggagatgtgatgcaggaagttgaggagtctgctaaaagggaagttgaagaatctcgcaatccatcttcagagactgctgctcagttaccatcagagcctacgaatgacagggccaagattgttattacaatacaggacaaagatggacagaagacactccgggtgtttgcggtaagttttttcactgcttgccacttactatccaaccttccatcgacaataagcttactatccaaactttttctagctagatactagatatttagtagagataagaattagttgttatgtcaccttcgctactatctagatagctagatatttcgagctttctaggaaagcaagagtataaatacagggattaaagaaatcattgaatggggtcgagtatttgagacgtgtattagttgatggatctttaaactattctttgagttcatctaataaactagagaacgagttcatgttcttatcaatgtatcatcaccacatagcatttacacacagaatacatattgcttgctctctgtcatacaatgagccgctcattaatagatatgcatattctgttaaagcttgtaaaatatgagaatgttgatttggtatttaccattttcttgtaggacgagaaatttgagagggttatcaaactgtatacagataaagctaagcttgacccgcaaaatcttgtatttatttttgacggtgataagattgatccatcaaccactccttctgaacttggcatggaggatcatgatatgattgaagtgcacaccaaaaaaacttgacaaataggtaacttatgaagtcctccacatctttcttcttgctcttattgtgatatgatgataactcattatcttcgattgaattcaagtcaggcgctaatcggaatctggaatgtcaaatctgttccatcttttgcgaaaaaccagagttttgtacatcaacatgggcatgggaagggatctctctgctaacatctggtgtttgtatctgtgacctttctcattttatcggaattttgtttctttctttctttcactctttctgtcactctttattaggcgtgtataatatataaggtaaaccaaaccattttgattttaactaatcctattgaatccaatctaaaaatctaactaaacttttgtttggttttaatcgttatgctttctctatctcttgagaaacataaatatatatctcactaatctaagacaaaactaaaactattgtatgtataatcagtattgctttttactaactgacaaaaactggaatcaatggtaaatcggttaaattcggtttagtgtactttttcctttgtttcttagtaaatgtcgttttacactgatattttttatattcaaatatagtctcatgactctaatatttcttgttttgtaacattagcttttaatataatcttgatagaaaagaaaacatcacattagtcattaataaaattcttaaaaatgtaaaattataagaattaacacattcaagtactatttatgtgttttagttcatgtgaaaaataataaaaccaattaacgaactaaccaagtcggataattgtagtttttgtttggtccggagttagctacgacatgtggcatacaataattggttaggaaaagctaagctttaagagttagagatgatgggtcgtgaaagaagaagctgtcacagtggcacatacgtccgtggcttccccatatctcacgtgcatacggataacgtaatcaccattttttctaagtccccacccaaatatctacgtggctttgccacgtcatcctaaccaaaccgacggatttgttcagataatatgaaaaagctcctaaaaacagacagaagaagcttttgtcaccaatctctgatctttttagttctcttatcggtaaaaacttattcttctctttttgttcgatctgtgatctctaataaactaatttgatattttttttgatgtaacagggaggaatcttttatatg

SEQ ID NO: 10525 - DNA, 3000 bp, Unknown
  misc_feature (1)..( 3000): cDNA_ID_2715797_gDNA_ID_2213659_Annot_ID_132515 3000 nt of promoter + ATG
ttactttatgacttttcaccatattgatgataaacttaattgaaatctaatattaattattttccaacacaattagttgaaatggaaaaaaatggattttgactataaaagtaagtaggaatggggaattttagaaaagattctcttcctaaattgaagggagagatatgactaagaacatattcatttttttttttttactaccaaaattagtagaaaaaaataagaaaataggtaaataaataaaagagatggttggcagatcgtggaatttagtaaatagtgcgaatcccaataataaagcatttgatgcctttctttcttctacctcactttttttattccaaaaagttttatcaagtagacaagattttttttttttttttttgttttctaataatgtcaatgtgtgacatcctcgttgtcaaaatctcaagatatatgaatttgattcatattttttctttatgttaatacaaaaattaatcttagcatctcaataattgtgggataaactgatccgttcgtacaatacttttacaattatatgcgactatgaaaataattggactcatagttatgaaccaataacagaagcaagcatataaaaatcgatgaagagtttttttttttttttttgatatttaagaaattattgatacactaaatagatcaagaaatatattcatacaccaaaatgatgttttgatttctgtttttttttgtcaacatttataaggagcgagactcgatcctcgatgtcatgttctcagtggacttatcatttgcaacaagactactatcacttaacaattttgatttctgtttactatctaaatgccatcagcttttataattttcattttttttcactagataagttaggttttttaaaatttgttattaactcacacttcaaatcttatcaagattttactaaggtaaaattgatgtaccgtcgtttctttgtcgttgcaattttcctcgattgatgtatgctctattagtccaaattcaattttcattatccccaacccgtataagtgaattaacataagcttctggtaaaaaatgcttatcaaatgaaacatgttaaaagtcatggacacttaaacatattatcaggcctgacgtttatattgggccacatgctatatttgtaaaagactaattttatacgcatttaagattttgcttaagaaacgaataaatttgggctctaaaatgctatgagcccaataaactgcacattatacttgctccactaacagtaatacagtttccttttttttggtaggctaatctgaacagtttcctaataatgcaaatcaatataattaattaaagatttgtttcattcaagttaatttaactccgaacattatgttatgaagaagagaaagactttgttgttggacttgatgcactctttcgctcattaaggtgatccatacattttaatttcaaaattgttggcaggaactagattttggttttactgatttacaatgttattaactacaaaaaaaacaaaaaacaaaacaaataagttatcatatctatcaagtctcaactattaacttgtggccttagcatctccaaatttctacattatccctgcttttggtttctttaagactttaatcccaaccttaattcacagtttttttctcatatatatagtcctcatcatgtaagtaagtcctagctaattttgctgaaaccactctctcatattaatttttcgtaatatgtttagaaattagaaaataaaataaaattagaagctatatataattaaagtttgttccactaaagaaaatctcaaaagtgtaaaattgtcagagataattcatctgtataactttaaagtaacggtgtatactgagttataacacacaactgacgtacgttactagaactatgttcgtgaatagaaataaagatgagattccttaaagctagataaaaaatcaacggccaaggtgaagcatattttcataaaccatgcatgcctacatgaaactacttgcgacagacactaaacaattcgaaacacttcgtattttggaaaaataaaaactattgatgggctacaagcagaaagcatgcatcgcacgtgtcaacagcatctgaacacgttgctggattctctttttgttcttatgcattccgatttgtatataaacgtgaacggtgaactactttttggacaatttatactttttttttctctatctttaaactagttttgtaacaaaatcacccacttacacgtacactatctacgtaaagtggagtgcaaaacagttcatatccgtggaggtctagtaatttatttcaagaagttcttaaatttatttttttggtcaggaaatttagaatgttcttatcacattattcttaaaatgcattcgttatgttatgtgaatgcactagccaaaaataaataaatgcaactaccatcattggttaatattcatgaaactttttttttttttcatgaaacttatatatctattaaaagtttaaaaccttattatacgaaatgtttgagaatctattatctgtcaccacccgtttgtgaccagagagtagatttctaaagtgttttggataagtttagtgttttagagtattaaaaaatttagaagcacttttcattagactctatatatgacatatctataataatattcctgaatttgaatttagcatctacttatatcgcataactcatttatggtactgaaatttagtggaaaacagctagtaaaagagaagtattggtgtgataaataaagctcagaggctcaggataagtcaggattccttaactcattttagctagcctatctctctctttctctctctctgtctctccctatatataaatcgataaataaatgagtgtgaggtaattaaggaactagaaaggaataagaaattatggagagaatatgtgaaatgtggagagaaatgaaagatataacggcaatg

SEQ ID NO: 10526 - DNA, 3000 bp, Unknown
  misc_feature (1)..( 3000): cDNA_ID_2715789_gDNA_ID_2213659_Annot_ID_181816 3000 nt of promoter + ATG
cataaaagaaaataaaaaaataacaaaagatgtgcagacatgttacaagacaaccaaaaggaacatgcttcacagaacaactcacgcgacatgacagtgaatcaattattaaacaaacaaaggagaaaccttagaatctaatctaatccacatggaacaaagacctttgacacatctcagatccatagaaatttatataaaaatgttagcataaatgtataagaaagaacgaaatgctctcgataaccctagaattcaaaaacataagaatacacagatggattctgacaagttcaattatacaattcaacaaattttcaatgactcatgaacctaaccagaaatcggaaaagtcatagctacacaaaattcagtttttccagcggcgcacaagttcgaattacatcaatatctcgataatctaacacggacccactaaaatccgtaagaaaaaaacactaacccagatcgcaaattagacgaataagagtagaaacgaagacagagaagacgaacacgcaataaagacttcacctttagggattgaaatgaaaaagattagggtttcaagacacagcgtaagaagacgaataggcttgaatcgagggagggagcgagaccgagagaggtaaggtattcaaaggaagagagggaaggaggaagacgagtgggactgcgagattcgcgtggaagcgtctccactgctccaccaagctctggtatcggagtttctctttccttcacgtcaagtaaaacgtccacgcgtccttacaatacgtaagactgacgcgcgtgcttattgttttaaaggccctctaaaagtccctaatgggcctggccacgaattagacatatacttatccatagttaaaatttgatattggacagatcaatatatggaggatttcaattaaaggttgacttagtgacacaaagagatacaaagagacaatgggaaatgcatttgaccttttcttaattgtaattataaaatttgaacgagagatatggctgcggcgccgcttgctctcttgtcccacgtctcctctgtcaaatgttttagttttccactatattactatatgctatatttttctatatctaaaatcagcaaaaagttcttttttggtaagataagtaaaacaaaacacatgcatattcttttgacacatgctttcccgtgtaaagacggatcatcatattgttgtgttgaaatgttaatccaaagtccataagcttgatttgttgttgaaatgttaatcttaagtctataaactttttggtactctaataatatagtaactcctcatattgatagtcattcgatgatactgcaacattgtgtgttttgactatagattttatacaattgtgaaacattcattatccaatttgatttctacggattaacctcttttttttgtatccgtaatcaactctgaataaaatggatacttataaaaaaaaagtactgtacgaaaagtatatgtggataatcttacatgatttgcaagtaaccttatattgtatgctaattcgatttaagataacgattttatataggattagatctactaatgtaaatactcttaatagatagacaatttcaaacggttgtctcggtaataatattagtacagagctgataattttgttgataaagtttttggcaagaaagaaattaagttaataaaaggacagttagtatgaaaataataaaaattaaaagtcttctagttgactatttttagatccgatcccgaggcaagtatcttgttctcggtatttttggtacgaattattaattgctaatttgaatttcacgttagtgattataataaaaataaataagatatcacatatagacatcttcttaaaagcacactaactaaaagaaaaaagaaaaaaagagacatgtcaagtttcttttatttttgtgtacatgtcaagtttgtaaaccatagtttattgcttaaataaatcacataacgcttaaaagaatccaaaatccggacttcacatatgtcacacatattctatcaacataacctgtatgtacatcgaaatcatagaaagaatattttaggttagctagtagcctagtactaatgggataaatgaaattagttatccttctcttaaagatgaatccttgagatcaagaaattttgtgagattgttcaaccaaactaacaataaaacttatattatttgatacaatctaaatatagaatcagttaattctttcttttttctttctcatatatatttatgatctcataacaccaatttgactttaagaagatatctattgaaattttcaaaacaactttaataggaaaattcaaaatatatagacagcgccatattctagaatattcttactcattatgaatttttgaatgttttgatttatagacctatctatgatgttgaattgagtaaataaaaagtttaatggtgcgtttgatctcacccatctttttctttattcagtattcaatctttataactctaccttattcgaagagatgaattcatctagctataaacacatcagtgacaagtttaaaaaaaatatctacacgttcgatggtcttctgtatttcacatggtaccatccatgtgaatgtgatgggaaatttcgcagaccctaatgccggccataaactggatttacaaaactaaacaatgtaatacaattttcaaagaaaccggatctaattatcttattgtcacttaataaacaaactatataagagaaggggaggaatatatgtatacacttttttatgactactaggatggtaaccaaagtcatgattccatagtaactccggtttaattgcttcaaaggccaaaactaagctctttattaagtaacatggattagtttcttcataaagataaaactaattatttaaacaaagtcaaagctagctttagatgcgtactagagtgaataatacaaatagtaaacgatattctgatcagaaaatg

SEQ ID NO: 10527 - DNA, 3000 bp, Unknown
  misc_feature (1)..( 3000): cDNA_ID_3037140_gDNA_ID_2213659_Annot_ID_181813 3000 nt of promoter + ATG
tctgtctctccctatatataaatcgataaataaatgagtgtgaggtaattaaggaactagaaaggaataagaaattatggagagaatatgtgaaatgtggagagaaatgaaagatataacggcaatggtggtggttcaaatagctacggcagggttaaacatatttttcaagctagcaatggaagatggtatgaacccaagtgtactcgtggcctatcgtctcttgtttgctacacttttcatgattcctatatgcttcatctttcaaaggttgtttttctttcacataatatggttgtgtttgtatgctttgatattaattaacttcatgtgatcgattaggaagaagaggccagagtttacatgcaggctgatgttactagcattactctcagggttactcgggtacgtaatagtcacacacacacacacacacacacacacacaaaacgaaaaatcatttttcgtttttttggatgtcctcttgtgtcctaaggttatatatatgttaacttttttgtgataaatttctcaaaataaaccattttataatatacgaaattgaaaaaaataatctatatacatggtttgagtgttacagaagtttaatgcaagactataaaatttatatattcctatatatgttcaaattcgatttcctattggttttcaaacatattagccactggctaggtaagtcgtcggatattttagcttaggtagcatgagttgaatttagttcttaccaaaatctcctcaccacaaaaccacaatccagagcacactggttttataaaacgtaattaatcttctagagtttaattttacttaaatttactttaaagttaaaaaacgtatacttagtctgaaaaacttaaaatgtaccaaaacatagagaactctagaagattatttgaacgtattcaatattattatctaacattcaaacagggtagtacttagtagttttaaccattctactcaatattaccaactagtggtttgacaataaaaaccaacatgtaccaaaaaacatagaagactacgttttggctgaaaatactagttgataatattgattatcattagtaaaatgtaaaattgttgaagaatatatatatattgggattataagacttctttaatgtggtgataattgaacagtgtggtgataccaagtatcctaaccattacgggtctagctctaacgtcagcaacattcacctctgctgctggcgttctcactccattggtcactttcatcttcgctgcacttcttaggcaagtctaatcaacgaatcacaatttagttaaccccttttaatatatgtttataccattaaacaaaatataataaacttttatgggtctcataggatggagagtgtacggcttggatcgagcgtagggctggctaaggtttttggaacattgtttggtgttggtggagctcttgtctttatattctatagaggaatagagatccgactatggtcaactcacgttaacctagtgaaccaaccacgtgactcctcacgtgatgctaccactcaccatatttccatccttggggctcttctagtttttgggggaaacatttccatctcactttggtttttattgcaggcaagttttttgtttgtttttcagatttcttatttttgtgtttgttttgtgtactaaggcattaggcatgtacgtgtttttttttgtttttgttttgtttataggttaagataagcaaacaatttggagggccttattggaacgcgactctaatgaacatgatgggaggcgtagtggctatgcttgtcgctctttgctgggaacacgatttagatgaatggagattaggatggaatatcagactattaaccattgcttatgcggtaaatatcaatccatccattattaagtatatatatatatgtcttgttgtctaattacaaattcatacaagtctatacatgtgtgaagattcatttaggttggccttgaatatatgtgctttatgttgtccattgtaggcaattctgatttccgggatggtggtagcagtcaacgcatggtgcattgagtctagaggaccgttatttgtatcggtatttagccctgtaggacttgtgatcgtagctcttgttggatcatttttgctagatgaaacacttcatttggggaggtacaaactcatgtatattgtattgttttgtggaaatggatttgatatacgtatgtatatataatatggtttatttttacttgaaaacattacagcataattggtacagtgattatcgttggagcattatacattgtgctatgggctaaaaacaaggaaatgaagagtatgcttacgacatcggatcataatgaaacaaataagactagcaaagatatcacagtcaacaatctcccaacattaagtacaaatgtcccttgatcaaccatcatttatatatgttgaacgacttgttgttagtatatttgattaagtgaatattaacattattattctatctaacgatgatttattgaaccatctatgtaagttattatgtgcatatgacctttgtactaccacatccacaacttcataagatgttgcatggattttttttaacgagcaataataaattgtaaaatcttatttgggtctaattaatttcacttctgagtcatacaatatgtacatgaactagtaagttggaatgggcccataatgggccgctcaaataactctcctccaaacctaaaaccctttatcgtaattgattctccaagcatccttttgaatctctgattcctacaagacaaatcactaaaagattcgcaagttgacatagcagagaccatacgacaccaacctaaacacagaaaagaataactcattcactcgtataggctttgtcttgcctcttcttgaaaacatgtacacgtatttaattataaatgcatatataaagatcctaccgacgaaaaaataaaaagattgaaaacatg

SEQ ID NO: 10528 - DNA, 3000 bp, Unknown; identical to SEQ ID NO: 10522
  misc_feature (1)..( 3000): cDNA_ID_1024257_gDNA_ID_2213659_Annot_ID_181811 3000 nt of promoter + ATG

SEQ ID NO: 10529 - DNA, 3000 bp, Unknown; identical to SEQ ID NO: 10521
  misc_feature (1)..( 3000): cDNA_ID_3037148_gDNA_ID_2213659_Annot_ID_181810 3000 nt of promoter + ATG

SEQ ID NO: 10530 - DNA, 3000 bp, Unknown; identical to SEQ ID NO: 10520
  misc_feature (1)..( 3000): cDNA_ID_4268675_gDNA_ID_2213659_Annot_ID_181802 3000 nt of promoter + ATG

SEQ ID NO: 10531 - DNA, 3000 bp, Unknown; identical to SEQ ID NO: 10519
  misc_feature (1)..( 3000): cDNA_ID_2704610_gDNA_ID_2213659_Annot_ID_181799 3000 nt of promoter + ATG

SEQ ID NO: 10532 - DNA, 3000 bp, Unknown; identical to SEQ ID NO: 10215
  misc_feature (1)..( 3000): cDNA_ID_2685858_gDNA_ID_2213659_Annot_ID_181791 3000 nt of promoter + ATG

SEQ ID NO: 10533 - DNA, 3000 bp, Unknown; identical to SEQ ID NO: 10526
  misc_feature (1)..( 3000): cDNA_ID_2715789_gDNA_ID_2213659_Annot_ID_132517 3000 nt of promoter + ATG

SEQ ID NO: 10534 - DNA, 3000 bp, Unknown
  misc_feature (1)..( 3000): cDNA_ID_2715906_gDNA_ID_2213660_Annot_ID_132519 3000 nt of promoter + ATG
atgaggaggaagatgaaagagagaaacttggttaaagaaggaggttgcagttggatagaagtgggagataaaattcataagttctacgtaggtgatacagctcacccgaatgctcaccaaatatatgatgaattggatcggttaattacagaaataaaacgctgcggatatgttcctgatacggatcttgttcttcacaagctagaggaggagaatgatgaggcggagaaggagaggttactatatcagcacagcgagaaaattgcggttgcgtttgggcttataagcacgtcgaaatctagaccggttagggtgttcaagaacttacgggtctgcggagattgccataacgcgatgaaatatatatcgacagtctctggtagagagattgtgttgagggatttgaatcgttttcatcattttaaagatgggaaatgttcttgtaatgattattggtgaatggtgactttgagatttagatacacaaatgaggcttttctattcaatgttattttaaatcttgaggattttgggttcaatgtgatcgttctttttaaaaataaataaagagaagcattctaatttatttaagttattacagttgaagatgattcagacaagttttaagatactagtggtattagcaatatccggttttccgatgatggaatcccgtatccaaagcaatttgggatcaacaagcaataagagtattgaatatttggctttgaattgccggaaacacagtgcggttttgacgaattttggagctattggagatggaaaaccctcaaacaccaaagcgtttcgagaagcaataagtaagcttactccgttggcggctgacggtggagtccaactcattgtaccgccggggagttggctcaccggaagtttcaacctcacaagccattttactttgtttatccagcaaggtgcaactattcttgcttctcaggtaataaatatatctaagctcaaaattttagctagtatcgtacacctatttatgaatgcactaaaaaatatcaaccattctatttgagataaataatcacatttggttttatttcgtttgtaacaaacaggatgagtctgaatatcctatgattccacctttgccgtcatacggagatgcaaggtttactggtttagtatacggaagtaacctaaccgatgttgttatcaccggtaagcacaacaaaacttaaatcattaaaatggtttgatggatatatatatatgagattgaatcaaaattatatatttagtttataagatcaaatttgttgttaggtaacaaaagaacgactaatggacaagggaagtcatggtggttgaagtatcgaagtggcggtttcaagtcgatatcaagacctttgttgatcgaaatcatcttctccgaaaactgaagaggtgacactaatcaacacacaatccgctatccgaatcaaaaccgctataggacgtggcggttacatcaaagacattttcgctaggagatttacgatgaagacgatgaaatacgttttctggatgaccggttcgtataagctgcatcccgtaggcgggtttgatcccaaggcgttgccggagattagcaatatccattaccgtgacatgaccgcagaaaacgttacaatttcggcaaagctagaaaggatcaagaatggtccatttacgggtttatgcatgtcgagtgtgactatagctttgtcgccggacccgaagaagctgcagtggaactgcacggatgtctccggagttactagtagggttacaccggagccgtgcagtttgttaccggataagagaactacaatggactcagactgtgattttcccacggataagattcctattgagagtgttgtgttgaacaaatgttatgcttagaaatgtgtttgtaactttgtaccgatttataggtttcattattcccgtaactaaaagattgaatggtttatgttcattcttcagtttacaaatccgctaataattttcacaaactttctaaaaaacatccaataaatgaatcatagtttcaataaaatgtaatttagaaataatgtgtcaaattttacaaaatctaattaagcaaacttagccattcttatttttttgttcttacatggttaaaagttatacatatatttgaaatttgaaatagtcagttaagtgtttcatatattcataaacgactttgtctaattataaaactcttttacaataggagctactttcccaaactcttttaaaatttaccaaacaatttccattgttggaatagataaaccaaattaatcagttttcacggaattggtttggttaaaccgcatggaccggtctttttttttctatctttgggtctcttgtctgaataggtttagaaaaacaaagcgacgtcgttttataatggggacctttcagcctcatccgtccgtgttactagattccccgagaagatgaatctgacacgcgctcgccacactccctttttatccttaaccacaactttttttatttcattaagaaaattcttcatcattctttcttctgcttcttcttcttcttcttcgttgaaaaatctgtcttctcttcttcttcttcttcttcttcttcttcttctcctcaagacgagagcgaagacattatctgaacaaagcgcttctccataacaaaggtatttctcatgttcttgtcctctagggaatgagtttcggttgattttgattccttccagatattttctcaattccagtagcctagaaaacttatttgcttagatatgatttgtttcctggattttgatttgtggtaggcttgtttttgtccttttcacgaacttggaatttgtttgtttttttgttttctttctttgcgttatacatgtttcgtttcttgtctttgtggttatgcctaggttttaacctctgtgtcaatctataacagtttctcctttttcgttttgattctcaggtgattcaattagtcgatatg

SEQ ID NO: 10535 - DNA, 3000 bp, Unknown
  misc_feature (1)..( 3000): cDNA_ID_2715902_gDNA_ID_2213660_Annot_ID_132520 3000 nt of promoter + ATG
aaaattaaaagcaacacgatcaaatagttttagttgatatagttgacactactttggttatgatgattattgactaatttgtaattaatttgcaggtggcggctagtataataaacagaatggtgtcaaacacaacgatgacgttttcgaacatggttggtcccgttgaagaagttagcttctatggacatcccatcacttactttgcctcaagtgcttatggccatccccatgtaagttgcttatttttatcattgttcataaaagttgataaaatgatgattccacaaacttcattgttctattttttccttttgttatgtctatctaatgaaatgtaaatcttttttttgttgttcaatttgattaggcgttgacgatacattgtcaaagttatatgaataagatgacaattacactaatcgtagatccaacggtgataagtgatcctcatcggctttgtgacgactgggaagaatctctccgaagcattaaagccgctgtcacaaaaagagagtctctccgtttgtgggattatctcaggattctccacaatagagtggcttggctactttaccaaatcgctgggctactttacagaatgctatgatacctaaatttgggatcttgataaaacatatctttagtgacgacttcatatgccacttgacaatatctcttaatgtaattccaaaaatgtgtagaaacaacaataaaaagctttcaattggtaccaccgatttgttcttcttccataaccacttgaagcaaattctcatagttcttctgccattgttcattcatctgtaaagatcttttgtattcaagtttcagtctttccatttccatctctgttgctgcagagccttgttgctgaaacaacaaacaaaccgagaaaatattatgttttgagtcatttttaccaaaactgtttactgtagacagtgaggaaacacaaacctgaagttctttaacttgctcgtcaataaggtcagcactgaggaaagaagagtaaacaggaacatcagaaaatggcggcggatcaaccgtaacgataccatccatagtatcttctactggtctttcatatttttccaaaggcggtgggattaaagccccacgacttttccaggaaacttgggttttgttggaattagcaacaatcgtttttctaacaatttgaatattgttcacaggaccttttctagaacctgtaagaaaaaagtttgaaaagcaagaaagggttgttaaattgacttattcattttgtagaagtaaaactcaaacagaagaaagtgctagcaaatataccttttgcatggatgagagtacgaacatggcgaagtgatttgggatcccaaacacaaaccacaccatcttctgatccagatatcaaaaggtttccgtctgcacaatatgctaagcaagtaatagctttgctgttcagacaaaaattattgatcaatagagattaacttagacagtcaaacagccacagcagtcaaatagattactactagctaatgttcaaatatataaaagatctcataaataccatcttagtcaagaattactacaagctccagttcaaatacatgtattatgatttagaagatgttaaaagtaagaagaatattgactaggattgttgacaacgattgaaatatagggaacggttagtaccctttttcagatactgaaccaagaacttgtgtcccgtattcacttgtggcattaatggcaccgatatagattttgctgtctctggcaccagcatagaacacacaccctccagggtccaatgcgagtgcattgatgactgaaggaaaaatgatatttttcaacaatttccctcttgacaagctccaaacctatatggatttacaaatccaaccaaggtcatcaaataaaaaagctatatcaggttctatttctcagctatatcaaaatgaatctcattaacaatacaagagctaaactttcattgcagttaacaaatgcataacattagtgatccaaataagtaccttgcaagtccgatcttctgaagaggaaattatcacagcattgcagcctccatagtctataacaatatcagttacagacattgtatgctcattaaaattgtgttcataaagagtgttcccttgctgcctctggaaatcatcaaatagcctaactaaccacaaagagcaaagaatcagaataaaagacaatgccttgcaaaaaaacaagcatgataatacacaaagttttaaccttataagagaccaaactctaatagacccatcttgagatccagaaaccaacaaagaatcatctccagagaacaccaaacatgttactgaacgataatgaccatgccacttcttaagcaacttcccagtcgcaacctcccaaaggtaaatatctccagagattccaccaccaactaagtaagttccttcattgtttgctgcaagagcctttattggttccactgggtagctcttcacttcagcttgaggctacaattcaaaacaagtttcaaactttctatccaaagagaacaaaaaaacagtgatttcaagtttgagaatgagaccttagtccaagaccagtaaaaaatcgagccagaagtatttctcgccgagagctgagaggaggcgagaaatttttcgccgacggcggtgagaccatgcgccggagaagcacacggcttgaattgaagctgctctgtcccggttttgagatcccaacttccaattccttcatcgattgaggaagaagcgattacagtaatctccatagctcagagaaagagggaagtaaagagaaactgattccaagtctgggttttgtgatatctataaattagggtttatgaactatgtatgtaatttgataaattaatagttttgtgtcttattgataatttccacaaacttaagggactataatgtaaattttgtgtgatattgataattaacagtaacggatcgtttagattggagaacaatg

SEQ ID NO: 10536 - DNA, 3000 bp, Unknown
  misc_feature (1)..( 3000): cDNA_ID_2715890_gDNA_ID_2213660_Annot_ID_132524 3000 nt of promoter + ATG
ggaaaaattacgagtttactttttctcaatttcatcgcttgtatatttaagaaatttggaaaaataatgttttattaaattggtttagatgtgttggttaaacttaaattgacattggtttaaagattttagttggtttaattcaatttacaaaacttgatgggttaattggataaaccattgaaaccattaaccattacaacccaactcattttacccatcaaaccaattgacccaataactcatttgacccatcaactcatttgagtcaaaattttctaactcattagagttcatgagttgagttgagttgagttgacccatgaattttgacctattttgacacccctaataaaaacattgtaaagttcatgttaatgagagaaacttccacgtcgaaaggaaaaattatttagtgatcgctaaaatcgctaaaataaagagtgaaggggcagaacacaaaactataatagagcaggtccaatggagagctttaaagagctctacagcaaaagactcttcccataaaaacccaaaattaaatcaaaacgttcctaaattaagaggtttttgtgaaactaaagggacttgacgtgtcacggcctgattggtcgtgagtttgagaaaacaatttttttttccctttcccatctctttctcgagctgctcttctctgtttttcttctgatctctctcaaatcaattgatcttcaacattttttttctcaaagagacccaatttaagattccactattagacaccaaaaaatataaggacccatcataatctctaaactatacaaattcacaaaatttattagtataaaatttaaaagagactctctcagggccataccattgaacatgctaaaacttctctaaaatgataatgtcccatcaaaaacataacagtgaaacccatatcaacttgctagtaaatagaaatactaataaaacctaaatcagtagataaaactgagaaacacgtatttaaacattttgaaagggtatggctttatcaacttactttccttttatccatattttactaggaacgtataacgtcgtttattgcaccctaattcaagaaatttgtattatataacatagagaaaactattttataaaaaaaaaaaacagagagaaaaactatacataaatgtaaactaaatatatatggttgtgaaatataaaggcggtgctgatatatggtgggtaaacgactaaacgtcgatgaactggtttatatggcgaatgttattattgatttgtggtcgtcacgtcactggcaccgtgccgtgttagaccatgaatttatcttcttgctgttattgttattaatatatgtccacacagttgccaattgtcgacgttgtcaattctagacaacaggatattatcgacgttgtcaattttgtgggttattttttcttctgtgtaacggtcgtattattatcagaactatacattatactccatcacgggagtaattcataatttactagttaaaattgtatatctgtcgtcagccaaccagcaaattgaccaataaaccataattagatattgaaatgaatgtgtcttcgtctttcttttattatttattagaaaataactggcattttatttttgttctacataaactaacactagaaaaaatattaaattcttttctcagcatcttatttttttttctacattaagtttaactaccaattttctcgtgcctaatattttaaaattttcagtaagttcatcttgtcttgttaatttagggattccagaagtaaattttgggtatttatttgcgtggtcgcggatgaagagctatttaaataagaatctagacttttgaagcggacacttaaaaccatctttttggtttaatggaagacaagaaaatgaatgtgctgatttaattgttacatttgcaaaccacttgtactctctattttgtactttctacccctcatggttaacaatattggtagaaagggcaaattattgtacggttcttagtattcttatacattgaagtatgattttgagtaaaaaaaataataaaatatttctaaatttaataatcttcatcgtattttgtaaaagaagttgggtttagatatcgatgaatcatcaagttgatcattgtgtttttttttaaagtgggagtaaaccaaaatgctatactaaaaaaaaaagtataattataaataaggttttgtgcaaaaataccgtaacgtcgtttgtttttgtaattttactttttacattcaaaatatataaaataattttatgaactctaaaataatatgatatatagtccatttttgtaactttacatatattgtaatcgttctcacgattatatatatctgtgtttgaaaattttaaagatatagttgaactcatcatttcgagggtttcgatttgatatatgattatcaaattttaaaatttaccaataacgaaaagtggctaaattacatattattttggattttataggtttattttgaattttattgacgtgaaaagtaaagttgtaaaaatggacgattttgatgtttttttttgttgtaaaaactcttttaaatattgatttcaatattatatgaatttagtagaatttttaacatagcaaaagtagtaaattttgaaaaataatgataactgaaatatgaaatagatttgtgttaattaactcttaaataatctaagtaaacaatagaattataaagattttgtcataagatataattattagtttattactatcaaactttaatattactaaacgttttgtccattattgcgttatgtgaagattgtgggtccgagttactaattttttcggttagatataatccaacacatccaaaaagttatataaagaagaaagtggcatagaacaattggaggctatatatcaagaaagcgaatattaaaagtttaagaaagagagaaagaaaataaaagagaaagactaagcagcaaaccatg

SEQ ID NO: 10537 - DNA, 3000 bp, Unknown
  misc_feature (1)..( 3000): cDNA_ID_3037219_gDNA_ID_2213660_Annot_ID_132525 3000 nt of promoter + ATG
gtataaagaaaaaatggtgatatgtgaggatatttaactaatcactagtataatgaagcatatccatatcaacatataatactactatactagatcaaatccttaatagaaaaatcgtagtcgataaaaaagcaagtttagatcaaggtgaagtcatggttaatttatatgggaggatattgaactaatcactaatgtataattaatctttaaaagaaatatgaaattaggtcgcgataaagtgaggagccaaaaaacacaaacactttggtgatgggtttcgattgatgacaaagcatcaacttcttatgtactaaaattccatgtacagaattattgaataagcacagaaacagtatcatatatatggataataatgatattgattatcaatttaaaatatagaatttaattaagagattttactctattttatatataatcaatcgtgtttgctagttatactcttaaatactaaaaattgtatcaaaaataacaagttaaaaaaaaaacaggagcgtgcgcctagcccgcaaaatccacaatcttagaacaaggtggataataaggtttggtttttctaaaaccacggttcataacgagtgtccactagaatccaaaaaaaaaaaaaaactaatttcgtcgtagaacaaaaaaaaatagtgagacaagaccgatttgaaacatgtaatgatgtaatacatatgatgattttatatctatagaatgaagaattttaagctttagtttattctagaagacgtttattttgttaatggttgcttcagatgtaaatttatataagatcattttggtaggtatttactctatagtctatagtaatatacactctacaaactggcccttttggcactcatgtataaacacgagtatttaattttcacattagtagacacggtcctgcttcaataaatctattttgacattagttcttaacctcattgttgtaattatttacaaacgagattaaaacaaaacacatggacatttttggataataatatttctcaacatattgttctagctttgatcgttgccaatagatcaacatatttgttactctcgataatcacttaagcccaactcatgtggttttaatgtaatggtgaagtgtttcctttcaaggtgtagtgtagcttcaaattgcacatactagaatcccaaagattaatgcactaaattcaacctcttctgcatcaactccatttgaagtctgtataatccatccaaaacaatcatatcttgcgctgtccatatccaaaattatgtgaagcgtcataattacacttcatccacccttctgtcggcatcctccatggcattgatctggagcttcataaacacatttggtttgtattaaatatttatgaaaatccatagtcagtcacacggatagtgaggtagaaatttagagagatcatcttatgaatctttttatttaagcaacaagcttttatccgtgttagtgttactttttatcatttcttttggaacaacctatagtatttaatttattcagagcgttcttaagaatttgtttgataaatatattcacgtagtttcgactacgtatagaaactttatagcaaaatgaatgttgtgcgtacgtacattgtttctatggtagataagtataattccagaaagagttaatgaggaagaattttattactgtggcataggatgaattaaattgatctatataaattttatgttacaacttacaaacaattttcacatggatttataaagaagccgctataaataaaaacgattgtagtttagttttggggtattcgaataaataagaaacttactccttaagttagcaactttttaatactaaaagagaaaagagatacagaactttccaaaaaattattgaacatgttctgatacttcactaaccatattgaaacagatggcataatcactttaattatacaacacacacatcttatctatatatgttacatctattataataattaaaccagatttaatataaatccagctatttaaaattatgccacagtttgaaaagaaaaaataaacaacgtgagatgtctatgtaattagaaacaatgggggtcttttctagtcgcattctggcattcgttgagtcgattttttttctttgttaggttgatgttggaacaacagatagatttatttattataaaaaaaaaaatacaatgtatgatttaattaattgctgtgaactgtttaagtgtttctaactattacggaatagtcttaaaagaataatgcgactagtttatatagagttttcctatcatttcatcaagtttaatctttggttggtaagtgccagctcatgttctttaatagccacattgcacacatataaattgaaacagtttctagatttctacgtaaatgttttaaatatgacaaaaatttactatatgtttcgaatcgaaataatctagcgtagtagtattcataactaccatctaccaccaacattattttgatactgtaatgtttgcttttaataaactgtcgaaatagaaaggcgcaattagttgtatgtagagtaacttaatagtctactcatctctaaacaaatgtgaaaagacttttttctcgatcaagtcgacgaataacaaacaaatacgatagattttttaaaaattaaacttttcgaaatcataatacgtgtatttttagggaattttctcttctttttttctttctaattcatgtcgacgaataacaaaagctcaccatcaaacgaagaataataacacaaacaattagaactagaacaaaagaaaatgataaagcaattttattctcatgtaaaaatgacataattcaatgacgcgtgtcccaccaattatcaccactcactctccatatatacttcacatacaatctttcactcatatatataccacacagtcacacattctttataatgtaaatcaaaagagaactaaaccaagaaacaaa

SEQ ID NO: 10538 - DNA, 3000 bp, Unknown
  misc_feature (1)..( 3000): cDNA_ID_2715880_gDNA_ID_2213660_Annot_ID_132528 3000 nt of promoter + ATG
gcttatgattacttcctttttagttttaatgtttacgtccaaagtatttaacatttgtttttactatatgtctataataaattttgagaaccaatagaaaagggctagagttgagatccaaaatatataaaaagatgataaagattgtggggactttggatagtggtaaaaagagaacctctatattatggtaatgtgaagatatgactatctatagatacaagtttatgaaataaatttaatgtatatatctataggtggggaaataaatggggtggagtgatggtgagggaacaaagcaatgcacatgaaaattgggagatggaaaaaagatttttttcggtgtcacaaaaatcatatttagatgctcttataaggagccttcttagtctatctctttcacaaggggaccaatctttttcggcttttaattaataagtatatacggtctaaacatttactttttgtaactcaacttgtcatacatttataagatgaaagatcgtatattgttttttcctcttttaagctataatatgcataaatatatcttacgaatcctattaaataggtagaaaaataagaaaaaagtgttcaatgcaaaaaaaaatgttatttatgtaattagtatggaaaattgctttcaatcaagaagaaaaagacactaaaccaaattgcttacttatgaaaaagtagttatgcggtcgtattagttatatcttattattaaagttatgttttgttagcaatgctaaaatcacttgaaacgttatgcatatttgtaatttgattactatagttctatctttctttaagctaggatatgttttcatgaagatcctcatatatacttctacacatcccacttaagtgtcctaattttctttaatacgttgtcatacataaatatatgtatatataatggtggttgacaaaataaaaatagtaattaaaggtgtgattagaaccttggagtctttaggagaggatttgaagactttcttcttcaccgtcgagaaccatccaccactccctttcttccccatatttccggcaacactctttgatcataagctctattaatactgaaacattatgtttaaagattcccaaaaatagctgtaattacaccaatagcaaaaccaattccaattgtagccaaaaccaaaaatgtataacattgtcatacatacaacaacatgcataaaagttagacatatatgttaattgaggaacttacatgtttgtgcaatgtgatcaaacgattagaagcgattgttgaagtttagagaaagagaacgagagagataagaagaggtgagagagagaagtcacagagagacttaagttgagaaggagaggatgtctcactcatttcaccaccgataaaatgaaaatcattaacggagtcacgtggggttcggttaaacgccgttaagtgtttttacgaagttcacgaggtttctacttttgtcttctcttattttaacgccaatcgcctttatttccatttgttataaagtcttctgacatttgtaatgatcgaattctgtatttacatatttgttatatcctatataaaatattatttgactttttcttaaattttgtggacttgtggacctattatgtttacatatttttgatgagaagatgccatatttcgaatatatatgtactagtgtaatctgaggaaattcaagttgaagccaatacatactttggaatttatatatttaaaaacaaaaaaaaactatattctataaataaatttacttatttactaattagtttgataaaattcagtttttaataatacttttatttgtatggttaaatatgctacttaacaaaatatttttaaatatatatattcatgagatttatccttcctttatatcgagcttaaaataaactattggtcacatgcatataatatgcatttatacataaagttctgatttatatgattaacattggtaacatgagtttagaagcaatatttatccgacacattttaaagaatgaacgaaaaatttaaaggtttcattcgtttaggtatacatacagaatttactcaagaactacaaaactttgatattaaaatatcaaatgatgccgatcatttgtcttaagatgtaaattaaaagagagaaaaaaaaacacaaaaatgaaaatgtgcagttgttttaataacggcgacctaactttctttatgaggacccaagacctacaccacctccaaaattggaccacctttcgatttcactactcattgagagtctcatacatccacacgagtagctaaactatttttttttaagcataaacaaagctggaattcattttttttttctttctaatgtaatcaaagcttaaattcaacattccttataaaatatgttataaatgataatgtttaggcaaaaacataacatcatgtcacatgatttttttttaatagaaaaccagtacggcgttcgacaatatcgatacacagagtcgttttcctaacgaacctaacgcatgacacagaactagttgaatttgtaagataaaaactggtttgacatgtatcggtatcgaactcaaatacgagaaattacctctggttcgggttttttcattatcaaactaatatgctacaaagtgagaaagtcaggctcagaaggaggtatgaagcacaaagcccacttggaatctccgaagattattgggccttaaataaggccagaaaatataattgaatgataaaaggaaacttttcttacatttttggcaaaatacgttccttttattattggtgtattttaatttagtttaattacttcacaacaattggctgtttttctccagaagaacactaaagacaaaaattaaaccctcacactcacagagaccggagaagaagcagagagaaagagagagagagagattcaccggtgataacattgaagcagaaagattctccggtgataacattgaagctgaggagcaatg

SEQ ID NO: 10539 - DNA, 3000 bp, Unknown
  misc_feature (1)..( 3000): cDNA_ID_2715876_gDNA_ID_2213660_Annot_ID_132529 3000 nt of promoter + ATG
tcgacaaaatcctgcatttttaaagtaccacgagagagaactagttagtttcagatcacaaaaaccattgcaagaaaggtttcttatataatcagtggcattgagaagttgaaggtaatctgaaaaagtgagagaaatggaactaactggctgagattttcatcattgaccttcccaagtttcgctacaacaccaacaacaccttttgtcaacatcaactgagaagcttgagcaccatgaagagtctcaaccagacttaaaactccagcagctgagttttcgtggcgaaggatctgtgcattgatatcttcaccctgaagactgttatcagagttttcacttctaggagtaggagacgagttaagcttactcatatgaactgcagaagaaacgaaacaaagacatattggataatctcaatcaacataaatcactgaaacgtaaaagtctatgatatctcagaaccttgcaagtcgacgatagcttcatccattttgtttttctgagacttgagaaacttgagattatcctcatgctgtttgattttgttacccatagcttcaagatcagattcaagcctcttggaattgaacatagcaaactcagcgtgagcaatgcctcctccattctgagtttcatttcttgcaactggtgaagattgatccaaattcatcatccttgttggatcttgaacattcaacggagtggtctgaaacgaaatctacaaaattggatacaaaaatgactcaaaaactattcctgtataaaccctaactcttaaaattcgtaaaaaactgaaacacaaaccctcaaatttaatccaatgtggtcgcatgcaataaaaaaagaaacaaaatgtcgagagtagatacatcaataaacaataaagcacgagtcttttctccagattcacagaaaaattcagagagacttcatcgtttaagagagatcatagactaaagttcgttcgttttttcccaactaatctagttccattttgcaattgaactgagtttttttcaaccaacctgttgaccagtcggatacattgctcctcagcttcaatgttatcaccggagaatctttctgcttcaatgttatcaccggtgaatctctctctctctctttctctctgcttcttctccggtctctgtgagtgtgagggtttaatttttgtctttagtgttcttctggagaaaaacagccaattgttgtgaagtaattaaactaaattaaaatacaccaataataaaaggaacgtattttgccaaaaatgtaagaaaagtttccttttatcattcaattatattttctggccttatttaaggcccaataatcttcggagattccaagtgggctttgtgcttcatacctccttctgagcctgactttctcactttgtagcatattagtttgataatgaaaaaacccgaaccagaggtaatttctcgtatttgagttcgataccgatacatgtcaaaccagtttttatcttacaaattcaactagttctgtgtcatgcgttaggttcgttaggaaaacgactctgtgtatcgatattgtcgaacgccgtactggttttctattaaaaaaaaatcatgtgacatgatgttatgtttttgcctaaacattatcatttataacatattttataaggaatgttgaatttaagctttgattacattagaaagaaaaaaaaaatgaattccagctttgtttatgcttaaaaaaaaatagtttagctactcgtgtggatgtatgagactctcaatgagtagtgaaatcgaaaggtggtccaattttggaggtggtgtaggtcttgggtcctcataaagaaagttaggtcgccgttattaaaacaactgcacattttcatttttgtgtttttttttctctcttttaatttacatcttaagacaaatgatcggcatcatttgatattttaatatcaaagttttgtagttcttgagtaaattctgtatgtatacctaaacgaatgaaacctttaaatttttcgttcattctttaaaatgtgtcggataaatattgcttctaaactcatgttaccaatgttaatcatataaatcagaactttatgtataaatgcatattatatgcatgtgaccaatagtttattttaagctcgatataaaggaaggataaatctcatgaatatatatatttaaaaatattttgttaagtagcatatttaaccatacaaataaaagtattattaaaaactgaattttatcaaactaattagtaaataagtaaatttatttatagaatatagtttttttttgtttttaaatatataaattccaaagtatgtattggcttcaacttgaatttcctcagattacactagtacatatatattcgaaatatggcatcttctcatcaaaaatatgtaaacataataggtccacaagtccacaaaatttaagaaaaagtcaaataatattttatataggatataacaaatatgtaaatacagaattcgatcattacaaatgtcagaagactttataacaaatggaaataaaggcgattggcgttaaaataagagaagacaaaagtagaaacctcgtgaacttcgtaaaaacacttaacggcgtttaaccgaaccccacgtgactccgttaatgattttcattttatcggtggtgaaatgagtgagacatcctctccttctcaacttaagtctctctgtgacttctctctctcacctcttcttatctctctcgttctctttctctaaacttcaacaatcgcttctaatcgtttgatcacattgcacaaacatgtaagttcctcaattaacatatatgtctaacttttatgcatgttgttgtatgtatgacaatgttatacatttttggttttggctacaattggaattggttttgctattggtgtaattacagctatttttgggaatctttaaacataatgtttcagtattaatagagcttatgatcaaagagtgttgccggaaat

SEQ ID NO: 10540 - DNA, 3000 bp, Unknown
  misc_feature (1)..( 3000): cDNA_ID_2715864_gDNA_ID_2213660_Annot_ID_181848 3000 nt of promoter + ATG
tgcaggactacaaagcgatatggttctcggatgcaactccgaagtatgcgtttgtcacttggttggtggtgaagaatagaattgcaacagggagagaatgctgaaatggaacaaaaacgtgggtactagctgtcttctctgcaactatcctttggagacaagagaacatttatttttccaatgcccttattcgagaacggtgtggagtgaactggcgggaagactactagctagcaaatatacggacaattggctagatatcatgaaggagttagtgagtaaagatcttgacgccactacaaggattgtgcttcggtatgtgtttcaaaacacgatacattctatatggagagagagaaatgagagaagacatggagagacgcgccatcgaggacggagaagataatcaggctaatcgacaaaaacataaggaatcgattaagcacgctaagggtgagaggtgaagagaagtacccaagaggaatccaagtgtggtttgcttcaaggcaagatcaaaatcaaggatagataagatacacatttgatctattttttttaaaaaagtttgcatttatatgtataaacagtttatttttctttgaatataatttaacattaaattttttaaaaaaaaatgcctatgttgcctactcttagagaagcgcataatgtatctttggactttcgacaagaccaaaagttcgactcacacgatgtttttataacaaattttaaccaaaacgacgttgttttataatatatatgatgttatatagtctgttaaagttgagtcttatattgcagcctttgcaggtggagaataaatttaccaaaaaaattaaaagttgtgaatatttatttgcaatttttcttcgctttagaagtttttaaaaattagtattattaaaccgtagtattattgaaaaataatactttttagtttttaaaaaatgtttcacacatgcaagaatttgaagaaaaatccgactgctaaccaaaatactaaaatagcgaattaaacatgggactcataacttttgtattaaatgactaaactaaaaaagatgcaattgaaagaaaatgaattgcatgtttaattggttgcaccaaaaagtttgtttggtgataggaaataactgatgatataaattttcacaaaatgacgaccgctccaccatagtaactactcaaaatttgtcagtgataatgagcatgacaaacatgatttataaagacacggcgagtccccaacacctgcagctcaactaatcaagtttcttgatatatgatacgcaacaaattatcttcagtccgtcgtcgggatccacacaaatacgaggatggacttcggttatggttcgcctctaggaactagttgtttcaatctctttacaaatcttttctcaaaataacatttaaaataaggttgcattcattgtacaaaggttttttggttgaataaattttaaattcattcaaaaaaaaacatgatttataatcatggaactatagttactattttaaaaagtaataaagaactacatggttatccaaagacgtgcgtcccttaatcattgcatgttttttcaatttttatcttttgtctcaaaagttattttgttaaaaatgtaatgaaattgttatcctagatatactcatgttacagaccacacgatcgtaagcttgttagttaaaaaaaaaaacactattatgcctactttattaaaaaaaatctaagagtccactcaaaagtcaaaacactccaaactcgcctaccaaaaaaaaaaaaaatcactccaaacttaaaatccactaaaatgaaccaaaatgcttagtacaagatatcatcttaattgcaatcgaactacctaatgcatttgattcaatatcttgtttcttttaagttttaactatccacaaagccatgacttgggaatgtgattgatcgataaaactttttcatttgattcaatatcattttactaactattcggttattttaaaaagttcggttcggatgcggttttgtttttacggttcggttcattcggttatttgcttaccgatttttctgcaagagagcgcgtttcgtttgtctccgcaaacgatgggacaaagtgggttaagtctgaggttgtttcttcgacttgtctctctagtctctataccaacaacactcaacgagacaagaccatcatcatcactcacttccttccttccttcaaatctcaactaaatcaatagacattcctctctttgtctctctctatccaaatttgaactgtaactgtcttcaaaatcttcatttttctcagacaaattggatctctccttggagcagaaacacccattaaaggaacaatagagagagttttggattgaataatcacagttccacaggtttccttccactctcattatcttaaatttcacttaaaggtcgaaacttttggtccactggtttcattatcttcttttaaacacatcaatttgtttaggatttaacttgtgattttgaattggttttactacttctcctctctcgatttagcaagttaaaagcttttttttttttagtgttcttgagggttttagggtacaattttgtttcctcaggactgggttttgctttcttgtttcatatgtgttttattgttcttgatgaattcattgtacattataaaatattgtctcagctattggtacacagttttctttctccctgggaattgtttgttaatttttaatagagtactaataaaagattagaaaatctgtggttactttagagagctgtggattctacttgtttgtttgtttcttcttattggattagttatggagcaaagtaaaagccttgttcattttctttgttcatatgtaataaaaacaactagtgatatacaagtgttcttggaaaatcttgaatgaaacagctttgaagaagactgaggtttatcttcctctctgttgaaaaaatagaagactgcagtggctaca

SEQ ID NO: 10541 - DNA, 3000 bp, Unknown; identical to SEQ ID NO: 10539
  misc_feature (1)..( 3000): cDNA_ID_1663020_gDNA_ID_2213660_Annot_ID_181845 3000 nt of promoter + ATG

SEQ ID NO: 10542 - DNA, 3000 bp, Unknown; identical to SEQ ID NO: 10537
  misc_feature (1)..( 3000): cDNA_ID_3037219_gDNA_ID_2213660_Annot_ID_181841 3000 nt of promoter + ATG

SEQ ID NO: 10543 - DNA, 3000 bp, Unknown; identical to SEQ ID NO: 10536
  misc_feature (1)..( 3000): cDNA_ID_2715890_gDNA_ID_2213660_Annot_ID_181839 3000 nt of promoter + ATG

SEQ ID NO: 10544 - DNA, 3000 bp, Unknown
  misc_feature (1)..( 3000): cDNA_ID_2715902_gDNA_ID_2213660_Annot_ID_181834 3000 nt of promoter + ATG
attagggtttatgaactatgtatgtaatttgataaattaatagttttgtgtcttattgataatttccacaaacttaagggactataatgtaaattttgtgtgatattgataattaacagtaacggatcgtttagattggagaacaatggcgatgataagcttttcgtttccatctcccgccaaacttccgattaaatctcaaccgtccgtttcaaatcggatcaacgtcgccgaccgtttgattctccgtcatctcaatgccggagatcttcgtggagcggtttcagctcttgatctcatggctcgtgatgggattcgtcctatggactcagtcactttctcttcacttctcaaatcttgtatccgagcacgcgattttcgtctcgggaaactcgtacacgctcgattaatcgagtttgatatcgagcctgattcggttctctacaattcgttgattagcttgtattcgaaatctggagattcggcgaaagctgaagatgtgtttgagactatgagaagatttggtaagcgagatgttgtttcgtggagtgcgatgatggcttgttacggtaacaacggaagagaattagatgcaattaaggtttttgttgagtttctggagttaggtttggtgcctaatgattattgttacacggcggtgatacgagcttgttcgaattcggattttgttggagttgggagagtgactttagggtttttgatgaagactgggcattttgaatctgatgtgtgtgtgggttgttctttgattgacatgtttgtgaaaggagagaatagctttgagaatgcgtataaggtgtttgataaaatgtctgaactaaatgttgttacttggactttgatgattactcggtgtatgcagatggggtttcctagggaagcgattaggtttttcttggatatggttttaagtggatttgaatcagataagttcacactaagctctgtgttttcggcttgtgctgagttggagaacttgtctttgggaaagcagttgcattcttgggctattagatcagggcttgtggatgatgttgaatgtagtttagttgatatgtatgcgaaatgttctgcggatggttcggtagatgattgcaggaaggtgtttgatagaatggaggatcatagtgttatgtcgtggacggcattgatcactggttatatgaaaaactgtaatctcgctacagaggctattaatctctttagtgaaatgataacgcaaggtcatgttgagccaaatcatttcactttctcgagtgcattcaaggcgtgtggaaatctttcggatccacgggtaggtaaacaggttcttggtcaagctttcaaaagagggcttgcttcgaatagcagtgttgcaaactcggttatcagcatgtttgttaaatctgacaggatggaagatgctcagagagcttttgagtcactttctgagaagaacttggtttcgtataatacatttcttgacggaacatgcaggaacttgaattttgagcaagcatttaagcttttaagtgagatcactgagagagaattaggtgttagcgctttcacatttgctagcttgttgagtggagttgcaaatgttggttcaataagaaaaggcgagcaaatccattctcaggtggttaaactcgggctctcgtgcaatcaacccgtctgcaatgctttgatctctatgtattccaaatgtggaagcattgacacagcttcccgagtcttcaattttatggaaaatcgtaatgtcatctcgtggacttcaatgatcacaggtttcgctaaacacggattcgctataagggtactcgaaacattcaaccaaatgatagaagaaggggtgaagccaaatgaggtcacttatgttgcaatcttatcggcatgcagccatgttggtttggtctccgaaggatggagacatttcaattcaatgtatgaagaccacaagatcaaacctaagatggaacactatgcttgtatggttgatcttctatgtcgagccgggcttctcacagacgcatttgagttcattaacacaatgcccttccaagccgatgttttagtatggcgtacgtttcttggagcttgcagagttcacagtaacacagaactcggaaagttggctgcgaggaagatcttagaacttgatccgaatgagcctgcagcttatatacagctctcaaacatatacgcttgtgcaggtatctatataattcaaacacaatcagataaaactctttcttctactgatctaccttgtgtgaaagtgacactttgttgaatatttctatgtagggaaatgggaagaatctacggagatgaggaggaagatgaaagagagaaacttggttaaagaaggaggttgcagttggatagaagtgggagataaaattcataagttctacgtaggtgatacagctcacccgaatgctcaccaaatatatgatgaattggatcggttaattacagaaataaaacgctgcggatatgttcctgatacggatcttgttcttcacaagctagaggaggagaatgatgaggcggagaaggagaggttactatatcagcacagcgagaaaattgcggttgcgtttgggcttataagcacgtcgaaatctagaccggttagggtgttcaagaacttacgggtctgcggagattgccataacgcgatgaaatatatatcgacagtctctggtagagagattgtgttgagggatttgaatcgttttcatcattttaaagatgggaaatgttcttgtaatgattattggtgaatggtgactttgagatttagatacacaaatgaggcttttctattcaatgttattttaaatcttgaggattttgggttcaatgtgatcgttctttttaaaaataaataaagagaagcattctaatttatttaagttattacagttgaagatgattcagacaagttttaagatactagtggtattagcaatatccggttttccgatgatg

SEQ ID NO: 10545 - DNA, 3000 bp, Unknown; identical to SEQ ID NO: 10534
  misc_feature (1)..( 3000): cDNA_ID_2715906_gDNA_ID_2213660_Annot_ID_181833 3000 nt of promoter + ATG

SEQ ID NO: 10546 - DNA, 3000 bp, Unknown
  misc_feature (1)..( 3000): cDNA_ID_3037207_gDNA_ID_2213660_Annot_ID_181830 3000 nt of promoter + ATG
aaattgtcacagccgttttcgatgcacatgatccgacaaccattttggttgtaatgatcctgaaaaccttcacactctcattacataacgtcgcaaatttactatacaaccatttcttgacaaacaaatcggtcactagctattcttctgttttttttatttttcttgtaatatttatatatataacgagtgtgacttgggctttgacaatgttagtatagctttaaaacgggggaaaaaaaaatactagaacattaagttttgagggtgcaaatatgtaacatatgtgttgtagaaatactttttaaaatttcaataataaccttggtttagtttccattgtttgaattggtattcatatctgactaccgtagaattcaatttgttagtgcagaatctgaaacagaaattgtgttgtctgtatattctttttttgggctctcaaatatttcgtgtatttttgtggaattttatataaagttggtgtcttttttaggacttttcgttgcattcaattatgttgaatgtgtaaaagtagtggctttccttggtcacatttatcaaacgtgttttcgcctttctttaattttccgtgttcaagtgaattctagctaacttttcggttttacgttgtatgaaaataattggctgtcgtcggtcacatgatcacatagagtttatttgattcaaatccatttaatatatgctgtatctttaatgcatacatagagatatattattatacgttatcttttaataggacattatattttgtttatatgaaagaaaagaatgtactgtatatgcagttatattatgctggtttatgtcaaagatagaagttaacgcaaattaatttctttatttcaattgtgttttgcgttacgatctgttttttttttttttggacaaatgacttaagattttattacttcatttgatattaataaattagtatgggtgatgcaaacgacttgaaggctagggttggtaccacggctgctaaagtctacttttggttggatctgtggtcggaagatcttgacgtgatcacttctataattgaggattgtgtgttgctgctactctcctctcacgataactcacgtggcctttttcttgtttttctttcttcatattttcacaaaacaaaatagtcagagatcttgagagattttttcagaagcatattgggcccaaatgtggacaatttcatgtggttgaattgttaaatttcagatagattagacaactaatcttgttgacgtgcatgcggtgaggatattaagtcgctatacgtcatatacgtgtatacttaaaatctcgtttgatatttctttcttttgtttttatcttcaacgacaattattgcctcaggcatgtcagcagaaaacgacaccgttcatattcgatctcgttattaatatgtttttgaagcaaaatatcattattagctatggagtttctgcagtagcctaaccggaagtctcaaaaagataacgtttatgccggttataattaaatccgataaggcgataaataagtgaacccgtaaagtctaaaattttcacatatatatgaacaaagaaatagtctatagatctccatgcattcttgtacaaacatatttaattttttattttattttctttatataagagttggtgtatgaaactttacattttgtaaatactaacattacatcataatgtcagaaccaataattctagtggaatgatataatctccactttaaattcttatgtctttatccaaagagatcatgaggaacttgagcaaaggaagagggcaccgtttagtagtataggtgaataacgtggcggacacgaggctggtctcattttcaaataaagagagatagagagaaaatggaaggaaaaaaaagctattggcgatgttgatatttgttcgtcttttagtggagacgaccaagagattttgaaaggtcgtcgaggagttagtttattatcttacaattattatggatttcttctgactaaagttttagtgcaatagttttctgagttattatatatttttcgaaattcatccaaaggctaaaactttgtaaggtattctgagtctattacgctagaaatagacacgcttacgtttttaagtcattttaatctgatatatatatatatatatatatactacaattttataaccaattatctttgtttcagacaatttatataaattcatataaactatcagaaataaagagacaattggctgtaaaattgtattattttgcatctatgaaatttttatttctctttatcaaaattgaagacgagttgaaattctatttcttttttaaaaaaatttatatatgggagtgtcaaaaaataattttcctttgtaagagaatattcgtatttggacgagtcttgatttgtgttttccgttagcgttccacattagttgtaaagagcgagaaagatttaagtgataattaaaaagacaagatatgcattttgaatatactctagatattaatcttaagcatttttcatattggttatattttatggtcgaattttgacatccgaaaaatacatcccttattcttcaatttatattgaatacttaagtttttgatagtaaatatgtataaataaattttaaacaattgtcaaaaagacattataacttatacggttatagttgttaaaaaaaaaacttatacggttataccaatagataaactgacattttagatttgagttttttttttttttactttccatgtagatagcgtggaataatacctcatttatatgtatcgttagttgaaataattgacaaaaggaaactattcgtttgctgttctagataaaagcctttaattgagaaaaagaaaatgcctccagctttgacccgttttgcctataaaaggattctctaagatatggactttcctcatcttctcgggtaaacagaatcaactagttttgtttttcctctttcaaaa

SEQ ID NO: 10547 - DNA, 3000 bp, Unknown
  misc_feature (1)..( 3000): cDNA_ID_2185690_gDNA_ID_2213660_Annot_ID_181829 3000 nt of promoter + ATG
gtggttaactagatgtccttgttgtagtcttcttgttttcattcttgtccattcttattatgtgaagtatatatatgatagatttatttctacttttcctttaacttagtgtctcaagttcaagacagaccaagcacaagaagcgaagaagatggagaaactgaataacatatttttcaccctcatggccagaggacctgatggtaaaaatttcattttctgcatatctaacttaaagaaagaacatgcatcatctatctcttagtgtttgagaaaaaaacctcctttgttttattgagctatgaggttatttctattatgagacaatgtatcacatcgtcaccggctattattttctcaaaacatcgcttttctcctaccaatcttgaaagaatggaacttgaatgtgcatcatctcacaacctttaaaaggaaagctccttttgtgctgtgtaacattgggtgtattatagcttactttgtttatttatgttggttgtataatgcagtcgatctctcagaagtcaccgggaaagaacagatggagacacagcctgccaagaaaggaagaggaaggaagcaataagtctcaagatttgttttccgtttgtcttggtatcaagattttgatccatttttgtttgatattttgagatggtagggttgtcaagattcgttctaaagcttacgacttttttttacactttgatcgattaatcacttttggattagcctaaacccaaaagctaacctttttaacttggattttgaaagttggccaactccttatagcttgattagtaagaagactaaagatagtctttgaaaagagaaaaacacctggtcaattatgatggagacagagaagaaaaacgagatgattttcttaaccgatgatctatcagcaaatatcatatcgagattaccgcaaagaatcatcaccacttccaaactagtttgcaagcaatggaaatcactcgctgattctccgtattccagccaaagtaccatcaaaactcgcattcatgactgtcatgtacacacactcacaagaagaggtcatgggttactatgcacgcaagatttggggacttccacaaaataaattaagtatatttagaaatgtaagaattgtgggacccactggtaggggcggttggggcgatacaatacgattcgagaataatatcagaccttagaacttaagctttagttgacaccctacatacaaatacattttgtgtcacaacgttagtgcaaaatataatattaaatctggtatctatcttatacattttgaacataagagaaagcacgtaggaacatccattgattgttatatgaagcaatatggtatttcatggggaaaaagcttaagaagagatcaaaatcatggcatttgattcaaggaagagtcttaattaatcaaagaactaatgacgagagatcactcttttccttttcctttccctatcgtcatgtgattcctaaacctctcgagggtcgtagaagttttctacaaagagactgacattttcacacatcctgagttgatgaaacatcacgttgtttcttaattccttaacaatacatctcttttgatcagaactatacgactatgcaagttctttttttagtttctccgtttaatcttttatgttgtgtggaaataagcggttttcttatgtgacaatgtgcgtttttttttgtctgtttcgaatcctcaatatgacgaagattaatacatttatggttgtgtttcttttgtgttgtataaatatgtgtttgttttattttcaataataagcttggtttggtttccattgtttgaatttattgggtatacatattagaccaattagaattccacttgtaaatgcatattctggaacaataatgttgactatactaataattttttcttgggtctaaaacatttagtatacttttcttgaattttatgtaaagttattctgtttttaggacttttatcctcactgaattatgttgtgttaaagtagtagcttatatggtcacatatctcacacgtgtttccattttttttctatctaagttttcggtttttacattgtatacaaaaataaatggcatgccttgggccttggccactgattcacatgatcacgtagagtttgtgtgtgattcaaatcctagatgagaagatcatccaattgatctaagatgtgtctttcttatatcacacgttttattttaataatactcttcagttgggtttgattccatttatgatttatctatgaaaacagaatatgtcctcatgctgattatttcgtttgtggttgcattttaccatctgtagttttttttgtttactgacaaacaactaagattttatgaattcatttgatgataaatagttaatcaaatatattattatgagtgactcgatggcgaaagctggtattatcttatggctgctaaagtctacttttagaagaagaaaaaaaaagggtctgttgcattaccctgttgttgcgactctcctacaataactctcacgtggcccgtttcttggtttttgccctattttcacaaaagtaaacagagattttcactagcaaattgggcccaattggagacaacttcatgtggtttgaatcgtatatttcagatagattagacatctagtcttctttgatgtgcggtgaggatcttaagtcgctataacgttgtgaaaaaagaaaagaaaaagtcactataacatagatcgcaactaaacaaataaaggacactatacatgtacgtaataatattcatttattttcaacgacaatgttccctagggtggtaacccaagtatttttcatagatattatacttctagcgaaaagccatcaattgagaaaaaaggcctccacgtttgacccgttttgcctataaaaggattctttaagatatggaccttactcatcttctccgttaaacccatttaaatagttttcattgtccttgtgaaaa

SEQ ID NO: 10548 - DNA, 3000 bp, Unknown
  misc_feature (1)..( 3000): cDNA_ID_2730994_gDNA_ID_2213660_Annot_ID_181864 3000 nt of promoter + ATG
cccgaaacctggttcgctgtgactttaaactatctcttttcagaattagaaaacttagacttctcattgaaattttgcaggtccgcaactttaacgttgaactcttgaatccaatgtaccaagccaggtaattttcattcattcattgagaagtgtttctgcgtcctgcttcttacaaaagctgactgttcattccttcttgcttccaggtcgcagaaggctgctgtagaattcctctggaatggtgcacaacaatctggtgagtcagaagattctacagagacggtaaccgaagctattctgggtttctcaaagaatgaattcgcaaattgggaatccaatattctctggtcgttaaaagaattcaactatttgaataagcctctagttctttgggatatggtagctgcaatgctggcgttcaaacaatcaatgccagagtttgttgaattagtattaactaaatggctctctgtgtcataccttggatttcatgatgatatctccatggaagatctcgtgccaaagatcaccaaacgcttctctgatgttccttccaggctgttacacattctcaacgtaatctctagacgtgtaatgttatcggaactcaaaacagaagaaatcaacagaaaactgcaaggtcagagaacgaacgatgaaggagaaattgatctgtggctcaaactgcttcaagaaagtgaacgagaactccgagaaagactggttggtctcagtttctcggcttatttactcgctgagtcatctcagggtactatttcgcctccctcttggaattggcgtccagctggattggctctgttgcaacaatgggttgagataaatcgtgatattgtccatagtcagctggaaacactttccttagaagtaaaatctagtcgaacgaggtaattttctcatataccttcttcttcttcccttgataatagatactagaatgttttcaaattcatatgttctgtgtctttaattcatcacagatcaagtaatagcacagaaactgcattagaggaagagaaatgtccttattgtgcagcgccagtaaatttccactcagcagaggaagccttttgcgaatcttcgcaccaaaaaaaaaagaagagcaaagacaaagagagatgtgatgaaagccacaagcttgagaggtgttgtgtctcaatgcaagtatgtccaccaactcctttatggttctgcaaatgctgcaaccgaatgactttagaactcgctccagagaccttatttgcattgccttcgttcccgagtgatctcaaatcacttccaaaatcttcctttagcaaagttgcctcgaaaccgttctgcctcttctgtggagttctcttgcagagaaagcagcctgagtttctgctctcagcctcacctgtgtgataacttcatggttatttataaatgattaagtagatcatgtattttattgtttgtgtaaacttgtactttacatatatatacaaggatggtccataagcatgaacatgtactctcgtgaatttcctcatcgtcccataggcgatggtgtatatatatattttattaaccttttaagaatttttgttacggtttttttttcacttaaagattttcatttataacaagggagaaatacatggttgtaataaatttttggaatgcgattttgaaatacaaagagccgatagaaaacagagaaatctccgaaaacaaaagcctgatatacgggaaatacaaaacatttcaaatgtcaagaggtgtacctcacaaaatcattggaaagtcagagaagaacaatagtcgcggagttaagagctcaaaagtcatggactagaagaccttcactcaccaacggaggaaacccaaggatagaggaaacggcgaagtcaaaactcaactaaaaacgattatccgaacatattaagcatcatcgtgaatctaaaacctaatcacttaatcttctaacaaataagtctaaatctaaaaaaaattatccccactaaaggttagtcttacaagaacataaaggaacagagattacgagagaaaacctacttattatttaaactagaggcattgtattttttattacgtttaaaaagtacatgttttcgtttggttttacaatatagttttaacttttaacacaactctgatatcaaaccgaactattgtactaccggtttagctctactagtaacatctgtccattgataacaactgaaactggtttgaggaccccttcggtatatggttgtagaaagcatatttgaacattgattaataataataaaaaatcaattattaaattaaatctatcatttctaattttttggataaaaaaaataaaaatattgagattttaaattaaaaattgattaaaaaaattagattgcaaattttcatttttccaatattattaaaactttcagttaatagagtgttcataattatgcatatatatatatatatttatatgtatgttttaattaaaaaggaaaagtaggaagcttcctaagaaagaagataaagtaaaaagagataaaaatattctgatgatgatttatttaattttaatgttgtccaaactccaaagggcagaagaaaactagcttaagtttatttaattttataaccaaaggggtctcttgtgttccttctattctaatcatccccttgaattttccaagttttctccttttgtcttctctaactattttcccttaaaataaaaatccaatttttctttgtttcagtcctctcttctgctcattgatcttttaattaactttgattctctccgtttatggattaaccatttgatcgagataactctccaaggttcgtatcaaattctgagtttttttttttccatttcttctcattctcaaattctctttcttagtttggttgttttgatgcagaaatcgactgagttcgtaacttgttgttgtctgatcttttaaagattcaaccttttttggtccgatcatg

SEQ ID NO: 10549 - DNA, 3000 bp, Unknown
  misc_feature (1)..( 3000): cDNA_ID_2730998_gDNA_ID_2213660_Annot_ID_181860 3000 nt of promoter + ATG
acaatgtgttttcagatgacatcagctttgtcgattgaagatgttcgtcgagaggtgaagttgttgaaagctttgtctgggcatagtcacatggttaagttctatgatgtgtttgaggattcggataatgtctttgttgttatggagtaagtatgtctctttcatgcttcttatatatcaaaagttgttttatttataatctccttgtgtttagatttggaccattgcctctgttataggaaaaaaaaaagtatagttctaatagtaccagtggtaggagaaagtttaggaattgagatgaccttaagatattgactccaatatgattccaggttatgtgaaggtggagagctattggacagtattttggcgaggtaaaatcaaaactagtcctttttctgttttccaccttgaattttggcatacttaggttaaagaggtaactttgtgttgcatatatatggaggatgattctgtgatgtctatatcttactgtagaggtggtcgatatccggaagcagaagctaagcgtattcttgtacagattttatctgcaactgcttttttccatcttcaaggtgttgtgcaccgtgatctgaaaccggaggtacacacattgttcttctaccaatgtgaatatcataagtagttgttgcttctgtcttgaacaaatgccatactgttgtatccagaattttctctttacaagcaaaaatgaggatgcagtactcaaggttatagattttggcttgtctgattacgctagatttggtaattctttgttcctctttcttatacatgactctgcttgtagtattttacttagaagactaaggatggaatgtttttttttttttttatgttgggctttaactagatcagcgtctcaacgatgtggtaggaagtgcatactatgttgcacctgaagtacttcacagatcctatagcaccgaagcagatatatggagcattggtgtcatatcttacatattactctgtggaagtagacctttttacggaagaaccgagtctgcaatttttcgttgtgtgcttagagcgaacccgaatttcgacgatttgccgtggccttcaatatctcctattgccaaagactttgtgaaaaggcttttgaataaagaccataggaaaagaatgacagctgctcaagctttaggtaagtttataaccactattgttaaaactagtgacattgattggtgaaatgaaaacatgagtatgattaataattttgcagctcatccatggcttcgagatgaaaatcctggtttacttctggatttctctatctacaaattggtgaagtcttatattcgtgcatcgcctttccgaagagcagcacttaaggtaattgtctgcttttcatcttgtcaagattttcttaggattttgatcacaattttcatgcaaaaggtaaaagaatagacacacatgacaaaatacttcctctgtttgtttgatcctagcttttgttcttgatagatttgatcatctatatgtcttgtatgtatcttaattttgctgtcacttgtacaacagtctctatccaaagctatacccgaagaggaactcgtgttccttaaagcacagtttatgctcttggagccagaagatggaggcttgcatcttcacaatttcaccacggtcagtggatgattaccacatttcatcgttccttgtttaacaataacttctaatgccactgttcttcaattgatgatcaaacaaaatcttgtggtaaatgcaggctctgacaagatatgctacggatgctatgatcgaatctagacttcctgacatattaaacatggtacgtactaacacatctttttaagtcccatcatttctagtcggtgctaaaatacatctgtaatactcttttcttctgtgtgtttcctttttgttcattgaagatgcaaccattggcacataagaaacttgattttgaagagttttgtgcggcttcagtcagcgtttatcaacttgaggctcttgaagaatgggaacagatcgcaacggtagcctttgaacactttgaaagtgaaggaagccgagccatttcggtccaagaactcgccgaggtatgtagagacttcaatatttatatctcttagatatgtgaaaacgacatcttttgcatcaattatgggttattatggaatatgtaggagatgagtttgggaccaaatgcgtatcctctgctcaaggattggatccgtagtttagatgggaagctgaatttcttaggttacgccaagttcttgcacggtgtgactgttcgaagctcgagctcgagaccaatgagatgactcctaactttgcaaatcaaaccctaatcattaaaacatgaatctcattattatactgtcgattcaagacaaaaacatcgactgaaaaaaaaggtacctctttttgtattaagcattttgttttcagaggaaccaattctaaaccaaacaaacaaaaagaagatgtttttttattgtattgaaattccggtttgtatagaaagaattagatgagtttgttgtggttcggttctgcttttgtttcctctaagcatatggtattggagttattaataaatcgaggtctagatacaataaaacttttgtgctaattcgagaattaattattatcattatcttcctttaaaattttgattttgtttcggaagatatagtgttatgtagaataaatccataacgacgaaaggaataataaaaggttgtaatgagtaaactacaaacagaagaaaggtataagatacatttagatactaatcttccaaaaaacaaatcaagatgtagttttatagaaaatcatattctttcttagaagaaaacagatttttttgtctcattcacttggaaagaatccttcactcactttccctttaagaagcaagtctcctccacttgtacgataccaacatcatcagcatcacaaaaagtatcattatcatcttcatcgaattagatg

SEQ ID NO: 10550 - DNA, 3000 bp, Unknown
  misc_feature (1)..( 3000): cDNA_ID_2715851_gDNA_ID_2213660_Annot_ID_181858 3000 nt of promoter + ATG
tcagccttggtttcattttccatgaggccatgtttgttttgagttggtttgtaaagtttatatagtttatcaacaaatgatgcaaaactcaaaaatagatcaagtaagtgcaattattaatgtacataacatatagctaaagaagggttatgggtcatatggacatcttatgtcagacaccatgattgtgtctacatcatgaaagacatgagcagacaaaagcgagaacacgaatctaattcacatgatggatccatcgcagtatacatatctatgtattaaaaaaatgtattagttttatcgacgaattattgacaaatacatgacacaacaaaaataaattaacatgcctttctattttgttttaatcttttcttccaacaaaatggtatattgattaacatgcctttttttgtgaaacccaaataatatctgttttcaggatttaaaatcatttatattattatagtagtcattaagcttgtggaagttcttttcatttgcattataaaacattttaagtattatataatcaaaattttaactttgtagatttttctaacattgatatttaaatacaaaaaaaatataaaaaatattcgtgtagctgttggatatatttgttaaaccaaatattaattagtgcagcctgcactcttgttaaatggaatcattgttacaattgagacaatttgtgtagattttgatgactcccccctagaagataatgataataaaggcttaatataattccaaaggttataatttaagaacatatcaacatccatttgccggttggatgacgaacgagatgtataataaagtattatacaaaaaataaaagatggtcgaagaggtcagacaaattaaatcaaatattagcttttctaatttcggttttagtcatttcaatttagtttaaccaaaatgtctttatcttcaatgatagaaatataataaattaacgctacaagaatctacacattgatagttatgtggttgatagtaacttccaaacaatcacattttttgctttaccaaatttgaagtattttgtttgacaaagatatatacgcgtctgtttttgttgaccacactagatcggaagaagagactcagagaacgattgttaaactcttttttttttagtgaatcaatttatttcattcaaagccaaaccatgtcaaattaaataaataacacaataaactctattctagtttcattttccaaagtcattttggttaaatacttctagaatccacagacaaaaaaaaggtacgaaactaaaaccggatccaacatttgtacgtaaggtatataccagaacagacgcatgatttgtgatactttgcatctgggatattcccaaacctaatccaagtggttgacgagtcatatcactcagcttaataaataaacctatctttgcatttgataaataatagcgtaatcgacccatttattttagttataaattaatgtaaatatggcataatccctaactgtttcaattgaataagacaaattattaccataaacgggagactcgtaaagcaaaattttatttgaaaagataagaaattgttatagctaattaataatcacagcgtagaaccaatatagtcattgttgtctacagattttttgttttcatgattacagatttgtttagttgtattatcaaatatactaacatatatgaacaaaactgctatgtaggtcgattcctaaacaacaataatataatttataccaagaaatataaatatgtttcttttgcttgatttggtcggttgaaaacatgggaattatttcatctcactcggtggaagccattatcactagatcgttgtatccattcgaccaattttattttttaaaacatttaactcatacacagtaaataatggtgtatttaggtacgacttactatcaactgacgctatattttctttttgggtaaattgttaactcaaaaattaacctagaaacatagaaatattcaataacaaaaaaaaaaacacatcgaaaataattcaacattatcttaattcactgaacttgttttctatgaactatagtttacgttattcataaatttttctttccatttttttaaatttagttggtctgcatgttaatacggattcaaaatctgaatgggaacaacatgtggagagggtaaactatataaacttgataaagaaagaaaatatgcaacaaataattaatagctctttttcacacaaaaaaacaactaattaatagctaatacataaataacatgcgaaataaggaagtaaatattttaaatcactaaattttgactacactatttataaattttgcaatgttttaaattttcttctaactgaataaaataaataacaaatacattattacaaattaccatatttcgcaacaaaaataattctgattatgtaatggtcaaaaaaatacttaaaacaataaaagaatcggtgagatacaatgactaaaaatataagtctgaaacaactaaataatatctatcggggtaaattaaaaatattagtgaaagaaacaggactaaagtgtaaattttaaggtttctcaccattaaaagcctctctccagtcaccaccatttttctctgaagactttttttttttggtcattaagattctcaaagagatagagaaaattacaagtaagcccacacgtttctacagagacaaaagagaaaagcaaaaagtaaacgaaacgaagaagaagcaaggaagcaaggaagcaagtggtgtagaagaagaagaccagacgcggcaggagatttttttcaaattttcattttcttgatcggtctccggcgaagacggtgtcggaaagttaatattgacggcggatatcgccggacatttgaagttatcgtctagttcaagttattggttggtgaaatcgtttgattaggttttaatctgaggagaggaagaggtttttagattgttaggaacatagatg

SEQ ID NO: 10551 - DNA, 3000 bp, Unknown
  misc_feature (1)..( 3000): cDNA_ID_2715868_gDNA_ID_2213660_Annot_ID_132531 3000 nt of promoter + ATG
tttaaaaaatctatgattgccttttcagattccttataaagaacaaacaaaattctaaaagataaataaacatatatgtagacagtttattagtgttttcaaaaccaaattgatgaaaatgatctgcagatgaaatttcttggttcacaagtttattaacttgattatttaagaagaaaaaaaaattcaatgattcaaagtttgaattcttttaccgaaagtaaaaatgcaaacaattgaccaattctttgaccaagtttattatagcttattattgattagtttgacagttacacatcatattttcatctctacttcatcatcataattcttagttcatccgcggtggcggtggcgacaaacgaataacacggtttattgtctgatcgtggcttgggtttgggtatgttttcggataacccatcatccgcggtggcggggcgacaaacgaataacacggtttgttgtctaaccgcggcttgggtttgggtatgctttcggataatccatcatccgtggtggcggtggcgacaaacgaataacacggtttattgtctgatcgtggcttgggtttgggtcttttttcggataatccatcatccgtggtggcggtggcgacaaacgaataacacggtttgttgtctgaccgcggcttgggtttgggtatgttttcggataatccatcatccgcgatggcggtggccgcgtaggacgaccccaaccgtttgttgtctgatcgtggcttgggtttgtgcctgtttccatcattttcggaatactctcttcaacctacattatttttttggtttggtgaaaaaattcacgatggttatcatatacagatctattttgaagtgagtgaaaatgttgattattaatcagagagaaaattaaaatctatgacaaatgtgaaatgtacattttggttaatgatactgcttaccatatttagtgaatattggtcggtgtgaggaactccatcttcatggctctctccaaaccctaaaagcgaaaatggaattcaataaacaaccatattaatagattataattgtgaaaatggtaataatcagaatagatctttgatattaaaaatgtaagactatctaattagatgatataaaacattctcaaattacttgaagaacacaatggaagaaggagcaagaacgacatgagaaccaccagctgcatctttgaaaacatgtttttttttccgagaaaaaatatatattttggttttgttgtttggaagaagaacgcatgcttctctatatatagtagacatagttcgtaggccaatgaacgcatactggcagatgcggacgtacagcatggggaaagtaggcacgtgcctactgttttttgttctccctcgaatagctatataaattaagaccatctccatcaggctaatactgcgtgggtttctcaacaatattattttaatcaatttataataattaagttatttatttaaattttaaactataaaaaaaaagaattgggccattaatataaagacacgtggaaagatattatctctaagtttctcaaactagaaacgtgtctgactctctctcctattttttcattattttatatttttttgtctccagatactctctcagatactcccgatggagatgctctaacaaaacaattcaagtaaaatcaagaagtgctttagtccaattttttatttatttcacaaccatataaattttattttttatccaaaattttataaaacccaatagaccattgaaacgatgattggcctaccatcatcgaccttatttttatagaaacaaaatttctttctcattgattcatcgtaatactatttagtatttatttttaatatatgtagctatataattgtactctggattaaaaaaacatattctggatcttccactgtctactggtgggaaaatggctaagtaaagtaactatgcactacacatttactacaattcaaactaaatgttttggtccaagattttcgtctctgagaattaacatattaatagtggaacatgtcatctcaagtttttaatgtcacggtattataccaccaaacgacgagcataaacaacttggaaggaggctgatcgaggagttagtttggtaaaaagacaattccataatccataaaagaaaaccttgatgtcctgtttctcatggttaactcaaagaacgctcacatctctttatagtgagaacaagtgtagttgcggaatggaagagtccgtgagtatgggaactaggcagccccatcttgacgtgaatctgtggccaacgagaccacgagatagtgatgaccaaacttgagaggagtatgaccaggaaaaaaaagatggtcccttgtctctacttgttcactacaaaatacacaattactactcgctcccacattccactttaccaatctatctcacgtagctaggccattatgattagtaattttgaaatagagcttagatgtgaagttagggaaccatacatccttgtaccaatcaaaaattggatttacttgctgaaatcaaatgctgtgtgtcttgcgaagcaaacttacaagtgaatgagtcattttttccttctccaaagaggttgatccttgccggttggtaacttgtttcttctccatggaaaaaaatgtccgtaagttattactattgaaactaggtccgtcttaatctatgggacgatcttaggcaaaaccagtaaaatgttaaagtttcttactaatttttttttatccaaacattggacatttttactctaacaaaaattttgaaattgtttttgaacttatggcaaaagcgaaggtggtttagggctacgatcaattgaggaggcaaataaagtctgcatattgaagctaatatggagaattctttcagcgagaagttcattatgggttgattgggttaaaaaacacctcataagagacggctcattttgggcagtgaaagataacacaactagcgggtc

SEQ ID NO: 10552 - DNA, 3000 bp, Unknown; identical to SEQ ID NO: 10540
  misc_feature (1)..( 3000): cDNA_ID_2715864_gDNA_ID_2213660_Annot_ID_132532 3000 nt of promoter + ATG

SEQ ID NO: 10553 - DNA, 3000 bp, Unknown
  misc_feature (1)..( 3000): cDNA_ID_2715858_gDNA_ID_2213660_Annot_ID_132534 3000 nt of promoter + ATG
ttctatgattataacttaaggtcccacgattaaaacaatacatttggtacatgaaatcactttaatatgatataaacagaattttgataattgataaccaaactgtggtcagtgtggtgatcaaccatatttggtaggtcaaccaaagatcatcaactctattagaagattccctaagaaaataattccaaaaatgtaaaattcaaacggcgtcgttttagtctttcacaaagaaaacacatacggcgtcgttttatcaaatcccaaagttgacgaaacgacggcgttataatgtcaagcttaaacccgcgacgtcgagggtttagttgtagaagagcttcttcttctctctcttagccatgtttgggtcaagaggtctctgttgcagcagaatctggaatcgttctctgtttctcaaacgttcttcaaacttccgagctagtttctctacgaaacgtgttgggacccataatggaacattccactgcgacgaagctttagcttgcttcatccttcgtcgttccaatagattctccgatgctcaaatcgtccgaaccagagatcatcaggtaccctttgttcaatttaccctgtatttgagtttctctgtgtgcaaagttcccttctttgggttcaattttggattttttttcgaaattctcgagaaatggttaatttagtttgatttttatgtaaaattcttgaatttttgtgtgtgtagctatgaatttgtgcagtaatttgttttgagtgtgcgattttgcatcaactctgtattagttagtaattttgtgatgtggttatataaggttttggagaagcttgatgcggcacttgatgttggaggtgtgtatgatcctcagagtgaacgttatgaccatcaccagaaaggatttagtgaagtgtttggccttgggtttaatactaaactcagtagtgctgggcttgtctataaggtaaaggatgatactttcttgtgatttggtgcttaatttgagaattgggctgatattttttgtcttgtagcattatggattggaaataatttccaaggagcttcaacttgagcagagacatcctgatgtgtttcgattgtttctagctgtgtacaaaaacttcattgaggtagtgcttcgtgctctagaaaggttgcttattaagatgctagattcttttggtatctattgagtgaactatccaaactatgctcacaaaacagtctaaagtttttggctatgccttcgaaagtttagtgtttgatgggaacaagttgctgaatctgttgttttattggcaaatatggctctgtctgacattttttttttcaaattgagtatgctaagaaagaaagaaattgcaatattgatgttagagatagtagaccagttcttgaactttcgtatactgtgttttttttacatgtttctaaggtaatgtactaatgtcttgttgtatacaatttcaggcagtagatgctttagacaatggtatccatcaatatgatactgaccaacctccaagatatgtaaacaatactagcctggggcataggattggaagattgaacttagactggattgaacctgatcagtctagtgccaaagaagatgaagcctttcatcgggcaatggagcttgctggctctgagttcttggaggtttttcccccttctatatctcgttctgttacataaaaccatttggttctgattcttcatggaaatgaggtgcaactaggaaaaatgctagtacctaagccaaaacttgtttggtaactactttgaatgaatcaacctaatgagatgctattaattcttataacaattgttgcctgcatctgataaaaaagtggcactgtttcattagaagtgattggtacaagaatatgtttgcctgcctatttgagtatgaatcgagaatacaaccaagcagattctaaagctacctgtgtttctaccttttgacagtgtgttcattttcacgcgaaatcgtggttaccagctcggtcaattgttatggagtgtcttgcaaaacggtatgatatagactccagtggagaaattatgaagctcagtaaacaatgcccagtaagttaaaatgagctcctttacatatatcatctacgtcgtggtttggggttataatttgctagagggattagaattgatgaaatggtgggattagtcttcaaagttgtaagatttatgtgcaattgacagtggaaactccatatattcgagctcgaggaagaaatgaagattgatcctccaataaaatatgttctttaccaggtacaaccaggtttatgcaccaattttactatgttgtcgtaacctttatttctctttaagccaatgagtgtgtgtatgtggtggttggtgcaggatgatagaagcgaaaactggagaatacaagcagtttcggtttcaccagagaggtttgagagccgtaaagctttaccattagcatggagaggtttagaaaaggagaagctctcagaggaaagctcaattccacgctgtgtttttgtgcatatgagtggtttcattggtgcaaaccaaacctatgaaggtgccttagcaatggcaagagcttctttgatggcttagagtcactgcataaccaaacatcggtttcttttggtttggaccggttcctaatcctatacatcgaatttaaatggtcactaaagttacattgtatttagattttgattaatacttaatattcaaaagtttcctttaaaaatagtttttttgagtcaaaatccatgtgaatgtacataattcataaataatgtgatcttatttagcttcaatttttttattgatgtaagaaatagtgaaactcaccgactaatgcttacgtgtacgaacccgcgttgtagaggataatttccaccttaattggtttggtacaatcgcgcataccactccgtgacattttcttcttcttcgtcttcttctcggtactctgagagagtgagagagaagcaacaatg

SEQ ID NO: 10554 - DNA, 3000 bp, Unknown; identical to SEQ ID NO: 10550
  misc_feature (1)..( 3000): cDNA_ID_2715851_gDNA_ID_2213660_Annot_ID_132538 3000 nt of promoter + ATG

SEQ ID NO: 10555 - DNA, 3000 bp, Unknown; identical to SEQ ID NO: 10549
  misc_feature (1)..( 3000): cDNA_ID_2730998_gDNA_ID_2213660_Annot_ID_132539 3000 nt of promoter + ATG

SEQ ID NO: 10556 - DNA, 3000 bp, Unknown; identical to SEQ ID NO: 10548
  misc_feature (1)..( 3000): cDNA_ID_2730994_gDNA_ID_2213660_Annot_ID_132542 3000 nt of promoter + ATG

SEQ ID NO: 10557 - DNA, 3000 bp, Unknown
  misc_feature (1)..( 3000): cDNA_ID_2785827_gDNA_ID_2213663_Annot_ID_132596 3000 nt of promoter + ATG
gctagggtttgtgtgaggagagagatcaagtggacaaccatgtttgagtcaaaactacagggaagagagatatatttttaattcattgaatatatacattggtgaatggagagggaagttgtggtagattagattttgtctacgtatgtctaccacttgtctacatatgttaaagatttagttgtgacttaggaggtcgtcaagcgcacgtgctaagcacaccaacgatttcttgatcttttcttcttgttggtatgaatatgatcctagaggttagtttaacaattttctaatgattttatgtatagtgaaacagtaatattattcacaatttgtggaactggctgatccaaaatatgttaaaaatgacattcggctactagcggaggtctgattcttagcctaacccttattcaattcttttaatactactagtgttggtttgaagtaagagaataataatgtacgtaaatgtatgtaatttgaaagtaagaaaagctttcgatgaagtcttagacagtaacaaactaacaaacatatccgctcaactaaatttacctaacaaatttccatagttttcaaccaagatttaaattaaaaatacactggaaattctaaacaaccctaaattatgttttttttttgttgtgtgagagcgaaatagtcggaattagagtaagaccaatcaaattttaaatatttatcgtaacttttatttcaagttgctttatatgatgtcttgaatctcaattgccttgccaagaaaaacaagcgctgacatatataaaaagcctaaaattacagaagaaaaatacaaagagctagaagaaaaagaaattcccctgttcttccgtaaatatcgttaattcgttatgacagagtttcattctctttgactagatctttatttttttctttacaccgatacaagtcaaaactcttaacaaacaaatatttagatcaacatagaccaaagagtcaaagaaataatgtctgtctccataaagtctccaacttttataacaaattttccgttgaatatgacagtaaataaaccaacggtctagttcttatcatgtctaaaaaccacaagctccttcctcatcttacgctcccctctttacctctccttttattctccttctcattctcctctcaacaactgatcgtataatcattctcacggagacgagtgaccaaaacaaggtctcccgcttcttgcgaagattaaacgaatccatttagattttaaaaaccacacaaaaaaaatatgggtcggctcaagttcgcatgtccggttcttgagatcaatttaatctcagctcaagacttagcccctgtctcaagaaacatgaaaacgtattccgtcgcttggatcaacaccgatcctatgagaaaactcaccacgcgtgttgatcaatccaacagagctaaccctatatggaacgagaagtttgtgtttcgtgtcaacgacaagattctctacgttgacgcatcagcgattgtgattgagatctacgcagcggcttgggctaaagatgctcttgttggtactgtgaatgttcttctcagcgatctttttgctccttggtctggttttggtgatggtaacgacggtggtggtgggaataacaacatgaggcttgtgactcttcagattcgtcgtccttcagggaggctacaagggtttttacgtctcggtgttgcacttcttgacggtggtcaacggagtatgcctttatctattgaggttttcgatggaagtcgaaaaggagagaggaatagtgttaaaagagaccaagaggcttcaagaatgatgcatcgccgtacgaatagcgatcaaacggatttaaccacgtctacgaatgattacggtgtgaaaacaggggttgttactggcaatggaggagaggtggtggtggtggcggtattgttgttggtgcggatagtatggttaatggttcgctttgtagctctgatattggaccatcagcgtctgtggttgcggctgcgattgcgcaagggctttacaatagacagaaaacagcggttaaagcggctaacaaagaggacgcaagttcgatacttgaagggaaaacagagggaattgagcatagagttgaacggtggagagcagagaaaaatggcacgggtggagcgggtggagcggctggatcaagcgatgattctagcgggaaaggaggagcgggaaggagaagaaggaggaggagaagaaaggagaaacaacaagggaggagaaacggtggaggagagggtaagaaagggttgttttcatgttttggaaacgtgtttggatgtgagatttcgataacatgtggcggtggaagcggcggagaaggagacagcacaaagaagagatataataacaataaagtagtaaatcttagtgctgtagacgaaacgtttagtcattctgcgacttgagataagagaaaatgtttacttatttttggtttcttttggtggtgtaaaacgtttgatgatgggttaaaccatacagatttgaaagtattgaggttaaaacgtatgaataaactttcccgttacatttctggtaaatggactaatttgaatatttgtataatactggggttattgtgaaaagcttttaaagaaagggaaaagaaaagagagctttttgagaaacgcattaacacaccataacttcatcatcaaccttctcctctttcttacgcaattacaacttcaacgcctctctatctcttcgccgtgaatgtcgagatagtcgtaagctctctgcttttcaaatttctctcaaattgaggtagagagagagggcacagagatagagagagaggggcataggaaacggtgattttcccagttcccggaggaacaatcggctgatttctctgtaatcgaagaatctaaacctcacccactcgaaatcagctcgtgggttttggggggtctctattaatttccaaattctggagaaaaatcttgtatttcttcaag

SEQ ID NO: 10558 - DNA, 3000 bp, Unknown
  misc_feature (1)..( 3000): cDNA_ID_2715994_gDNA_ID_2213663_Annot_ID_132597 3000 nt of promoter + ATG
ttactggaaattgctaatttatctataatttcaaattgaagttgcaagattctgtatatggaattgagtttttcagctaggcttggtctaatcaaataattgagctgacaagttataatatcgatactttatctttcatgcgtacataagataaggttaattatttatggatccttccttggttaatgacaatcttatctaattgtttggcttaattttatataattgtttagagagagaattaatttctggtttattgaaatttgaaagggtagactgaggaagatgctttggaatattctgcatgggttgttccgttgtctacttgtcttgttcattcttctttggttgactctgattcaagatttttgtatacacaagttaatttcaagccttaaagagactttctatttttgctataattagatatgattggttttgttaagttttattggctcaataatgtaagcaatgataatgttgtctctctgatcatagaaaaaaaggctctatcttaaatgtgttgaagagtagatggatatggtatcatgttatttaatactcttctatgggacaaaaacttaagttttgtttgatggaaataaatctcggtattggtaatgaatttgaagctgatgaatttgtacttttgaatgcatcaagctaagcgccttcttgttttactgtttcaatctatcaattgttctatatagaagtgtttttagttctttgatgctgaaagtgatgtacttttctgttactgtcaatctctttgcaggtaaaggttttgccacaggaagaattagcctaggagaaatagaagtggtgaaaatcaccaagttccatcgagtttggagctctgattcatcacacgacaaatcaaaacgtgctacattttacagagccgatgacattccagaaggattccattgccttggtcactattgccagccaaccgatcagcccttgagaggttatgtacttgcagctcggactagcaaagccgtcaatgctgatgatttcccgcccttgaaaaagcctgtgagttattctttagtttggagtgcagattcagagaaaaatggtggtggttatttctggctacctaatcctccggttggttacagagcaatgggagttattgtaacccatgaaccaggtgaacctgaaacagaggaggtcagatgtgtaagagaggatcttacagagagttgtgaaacctctgagatgatacttgaggtgggttcttcgaagaagtcgaacggctctagttctccttttagtgtatggagcacccgaccttgcgagagagggatgctgtcacaaggtgtcgctgttgggtcattcttttgctgcacgtatgatctgtcgtctgagaggacggtccctgatatcggatgcttaaagaatcttgatccgaccttacacgcgatgccaaatctcgaccaggtccatgcggttatcgaacacttcggaccaacagtctacttccacccagaagaggcttacatgccttcatctgtacaatggttctttaagaatggagctttgttgtaccggtcagggaaatcagaaggtcaaccgattaactccacgggctcgaacttgcctgctggaggatgcaatgatatggatttctggatagatcttcctgaagacgaagaagcaaagagtaatctcaagaaaggaaaccttgaaagctcggagctttacgttcatgtgaaaccagcacttggtggaactttcaccgacatcgttatgtggattttctgcccctttaatggcccagccacgctcaaaatcggcctattcacgttacctatgacccgcataggagaacatgtcggtgattgggaacatttcactttccgcatatgtaatttctctggtgagctttggcaaatgttcttttctcagcatagtggtggtggttgggttgatgcatcagatattgagtttgtgaaagataacaaaccggctgtgtactcatctaaacacggacatgcgagtttccctcatccaggaatgtacctccaaggctcgtcaaagctcgggattggagtcagaaacgatgttgcaaaaagcaagtacattgtggattcaagccaaaggtatgtgatagtagcagctgagtatttaggtaaaggagctgtgatagagccgtgctggttacagtatatgagagaatggggtccgaccattgcatatgattcagggtctgagatcaataagatcatgaatcttcttcctttggttgttaggttctctattgagaacattgttgatttgtttcccattgctctttatggagaagaaggtcccacagggccaaaggagaaagataactgggaaggagatgagatgtgctgaaagaagacaaacctctttgtgatcaagacggtttaatggaagatgaagtctcttgttgaatcggagggttttgatctctactctactagtaattgtgactaatatgtaatttacagtatactagaatagggtttgatcttggtggttgtaatttgttgatgtaagacctaaaacgctgtgtttgcggctgtaatcagctgcgacagctcatgagcaatatgaatgattgattttgttgtactgctatcttctcgtatctctctgtgttctttacgctattggttagattgaattcataaccacccccaactgttccggtttgacacatcgttccggttagtgtgtagtattggacgaaatcggttattgataattcggttccgataatcggttttaataatgtgtatattgtaaacttgaaccgttctctagtctctatctctttctctttcttctgataaacctctcggcactgcgctgtgtagtgagctttcacttccgtcgttagctgcagtttaaaatccggcgaattgcggacggagaattcaatcatatagcattattgaggagctgaaatggaggttgtgacaaagatatggtgttgattttcacttcgccgttattgctgcg

SEQ ID NO: 10559 - DNA, 3000 bp, Unknown
  misc_feature (1)..( 3000): cDNA_ID_3037283_gDNA_ID_2213663_Annot_ID_181915 3000 nt of promoter + ATG
tataaataattcataaaggaggagagagaataacataactaaaaataattaaaaaaacgtttatgtagagagaaattttgtagtaatcattgagaaactatttgcataagtgactgtttataattagataattgaaaaaataaaaaaataatttaattagaaaattaagttataataaaatattacaatttaactcgccaaaaatatacgaatttaatacaaatatataaatggagaaacttcggctacataaaaataagaacagtgtacttttaaattctataatctccacaacttgcggtccacattatttttttgtaatatcaatttttatttttatacagttttctattgatggacatatacaataataaaggtgatattggaacttgtttaggaagtcgatcggtaagaaaataaaaagtcggtcaataatatgaatagaccaaatcgtgattgcattagaaagcaggagttaattgtttttgaaaatgatgaattaagtcggtgagttgctgcaaatactattattgactgactttttctataatatcggaaatagtacaatttaggagtttaattgttaaaatacgtacatatgaataattaattatgttaatcttcttgcagaccaccagctcgaaccatatgtgagttttgaacatgatattagttcaaataataagggattcagtaactaaattaaattgaattttgattacgattatcagtgcgttcatctagtaaatcaaataatatgatattttggaaattactatccattattttttatatgtaaatacccagacaattggaatgtaatggacaatatagacaaatagacagttaagttagttggagtttaggcgtcatatcgttgaaactttttatatatagcacccagagaattttattctaattttttttaataattaccaactatctttattggcacaaaccccaactagtagtcatcatatccagaaaacccaacgtgtattttcgctcattaaatccccaacttttaatatactcccttcgataaatactgaatttatatttatcgtattgtttgttcagtttcataggcaatgagccaatgactcgaaagtcagataatttatgaattgtagaaattgttgataataggactaaatttttaaaaatctacagcggcagtttataattgacaatcatgtttttcatttgaaatatggacagtcatctgagaatatttttgtgttcaatcagcacaaatatacaaattttaatctataatttcaaaaattaaattaggacgctttgatttggtattttttcctagttaatctttgcaggcggtggtttctttgacctttttattaaacacatgattatgccgacattaataaaaaaaagagagaatatgttcttattacggtgaatttactcattgaaactatgacttcaaaaatataatattataataagttatagtatatatgttcttattacttatggtatatataaaagttaacattgatatttaactctgtttaaatataagtataatttgatcattgtgttttgacataatatttttctccattgatatgaattctaaaataataaacatatatttatttatataccaataataaaattgaagattacgtcacactaccaccaattggttgataatttacactattttattccttcagcttaactggtaaggttaagaaacacaccacaaatggttgctaaactcttagggtcgtttgataaatgtctaatcaagctacaaagtacgatcacatatataatttagattatatatattatccattaaaccacatccaaataaatatccgaactgagaactcattgaaccacacccataggcatagctatatgtactgcatatcaattttatgtgatcgattttatcatttactctcgtatataaaccttcatagaaacttaaaatttcaagtttaacaaaatgaacattaacatacaaattcttttgaggttttcattagggattcctttcagtaggataataaaattaaatagtaataaaattttaaaagggacatattttcaacaatatgggtccacataacacgaagaggagccaaaccttttaacacttttgagtggtatattttccttcaaacgttttttctgccatacgactctttattttctttccaaaagaggttattttcaaaaggtagatgaaggtcatgtggctatcgaacccatttttttctggtggttggctaaggaaccccataagatgactatactgacatagtcctatgtaatgtacaaggaaaaaataaactaaccctcatatggaacataaaattattcgacagacgtgtcaccctatggatctaaaatttaatggtaggatctaaaatctaaaatatgaaaatttgtggaaaattccataaccatcccaataaattaattgttacatatagcaatattttattaattaaaatacagtttttatttgacactaagaagaaaaataatatttagcttatcttgaattatatatataaattgcttattaccctgaatttcatacagatatgagatatcatttaagatatttttgagtgttttctaattgtggggctttttcaacaagtaaggaagttgcttagagcttacgtgtctcttctacatcaccaaaaaaataagaaaaaaacaaaacataaagaaaagaaacattattgttttttttagctcttatcttcctctatataaagacattttttttctaccttcacatacttttattttcatttcctttaactgcatagttcttcctcaaattgctcatacctttgcttctctttctttctttattcaacctcttatttcttcttcagcaccaacgtgtatctgcagtaaacacatatccatcgatcgatctcctcaaaaagttattgttttcttgaaggatttttcttgttcttgatcaagcatacatatatatag

SEQ ID NO: 10560 - DNA, 3000 bp, Unknown
  misc_feature (1)..( 3000): cDNA_ID_3041647_gDNA_ID_2213663_Annot_ID_181914 3000 nt of promoter + ATG
tagaaaacgattataagcatagatatgattcatttcaaatgaacatgctccacctataattctagctaggtgcaaaattgttgacatagacgaatcaaaagtcacacgtgtggttgcatgcacgttgactatataatcttccatgcttcttagtttattacaacgttttaattggttgattatatattttaatatttgaaggagacttttggagtttcttaactttgacaatcttagtataactacgtatgagaaactccatttcatacaaaccaaaccaaaaagtcacattttgatcaatttcttgccgagtgttttattcgagatgttttgaaagacttgccgtgtaacatgtatcctttacttacagttgcagtttttgtcataggtttccttctatgcgaactttttcataatcagtatatttaacgttgatgtcacattattcgactattaataaaactaatgaaactaatttaacaaaaaaaattaactacatatgcagtacaataaaaaactgttcataaatcttttaattcgttagcaatataaatagtgcacaaaaacttaaacaaaatcaactttttaaaacaattttttttttgtaaataattaaataataaaaaacagattgagtaattgacaaccatatatttttttctaaatagaagaaacttgtttttgaagtatcttttatacggtgaagggtgaactaaagttcaattattgttttaatctctctcttttttttttatcaaaaactattgttttgattgactgcacgattaccgaaatataaatagctggaaaagtaaataactgccacgtataaaaatgagaagaaatcaaaatcaagggtattttggcttagcgtgtggttagcgtgtgtgtgtgaatgccgatgtggcatgtcattttttttaagtagaaaaacttatctaaattatgtatgtataaataacataattctaggatatttaacttagtaaactgcgttttaaagaaaacgttaactagatcatgtgggtgtttatgattccacgtttgctcttctgagaagaaacaaattaaatgttttaatttggtttgcatcccagcaagaaacatatcaaattaagattagtttaatacttgcttcattagacaaaacacgttattacttataagttatactactaacattaatcaaaattattggtatttgattttgtcaacaaattattgttgatctttagcctttacacatttatttttatatatggatttgattcaaacttttgggttagttcttatctcatttaatccaatcagatctcggtttgtttttatgttttactttttgactcgatttattatttttcatgatttttttttgttctacatcacagcaaagatgagatacatatcttgttaagcatgatatatgtataactatgcagtatactttttgtttatgcatatacattaacaactgtgtaaaggattttatcattttaagttgttcttatccctttagtttatatttgagggaagaagaaaatcactttcatatgtttgatttctatttttgtacatactacctaatttcaccatttatgcatgataattgctatatatgctagaaaaacagggaaaattcaattaacctaacaaaattggaaaagttcataaatcagataaagcagcgagcatcgcattcaaaacaatacgttaggctgtgcgtactgttttattaattttaatttctttacaaaaattgaagataaataactcaaaaacaaaaaacagaagtgaatttacagtctcatgatcttattttacattatatatacgaatatgcattatgctatagttcttctattcaagttttctcgaaatttttcactcagaaaaaggatacaataaactaggactatagtatgatgattgcgtcatcagccgcatctgggcttacgtggatatggttaggacaaaagtaaaactaaccaatcagatgtcatcccagaggacacagctgtctcatttgggtccacttctctaacaaaacttcttcaattattcacacacaatacaatgacacatataaacaatttaaataatttattaaatattgaaacggaaattttgtgttcatacttaggttcttactatgttattgtattttttggaaaagcttgaggactatttctcataagtatataaattttttgtactcaaaatttcggattcaatccctagaaatacatttatcaaacaaatccaatttgagttttatttacaaatacaaatttgcaatttaatatgacatgggtctcagactttacaaaataataaagtctagatactacgaactcgttcgtaattagcaatatatatatatatatatatatatatttttccacttagcaatctttgttttgaatgtataaacaatgaagcctttacataaaaagtctaattagacataaataatgcatttaatattaggagaatatatagactacgtgcacaaaacgaccaaaattgagtaagatattaataagaaatatataaattatatattcaagtttctgttcataaaacatgcttgagtttcgatgacgatatttgctagtttctccataaagttctaataagttttttaaaaaggttcttttatttggttgaagatattaatactaactgattttatttactttttatccactacttgacactattttggatcttttcctccggtctactttacagaaaataatattctatatttttcataaatatttcaatctcaattttctttaaaaaattatacattcaagcactaaacgacagaactctacacaccataaattgccctcaaaacctgctctacgaaaaatttcaatctttggctcacttctttgtttatctcatagctcttcaccaaaaccaatattttctcctttgttgttctttcttttctatcaaaactttctacttaaaatatcattcctttaaaca

SEQ ID NO: 10561 - DNA, 3000 bp, Unknown
  misc_feature (1)..( 3000): cDNA_ID_2715914_gDNA_ID_2213663_Annot_ID_181912 3000 nt of promoter + ATG
aaatacaatgtaaaatacatatgcaggggaaaccataatactagatatattagcttatttcgcaaagtcaattcgtagaagtaaatattcgagttcaagtgataggacaaccaagtgatatataataaaatctaccacaacccgagaagctaaaaaaaatcacaagctggttagttcaactcgtcgaggaaaaatcaaatcaagagattaaaactctagtctaggatgatcccacagtcatctccttctacaatcattaaattattactctatcgaaaccacacgctcgcgaatacttatagagtacatgtggaatgagataacgttaccagggagattaggagacttggcttatagaatacttatggaatacatctccctcgcgacttacctgcgcaatgaaaactttttctcgtcttgttcaatagttgtacttcgcacaaaggataatacgatcataaaaagactcataatacgatcttcgatatacccgcgcaacgatggatcacataaacggtcgcatggttggaaaatttagggctcatctctgattgttttattttcttcacaaaggggcaaaaatatatatatacactgtatatatatatggggttttttttatggtcaaatgttattgcccttcgaataagagacctttgattcgtaagaagagattattattttataagagaaggttatgaccgaaaggtttctgaagaaaatgaaaaattacttttaaaaggaattttatctttaaaaggaaacaaaaggaatggttaagttttacatgattggacgcaaaaatggaaaattcttttgattacttcaaaaaaggaaaccctcatttcttattaataatacatcaaataaaaaactaacatgatttttcgcaaaatatccaatttgtgaagaccctaacgctcgaatttgtcatcacttggctcagtctttcaacttttgaaaactgaaactccttttttctcaatactgttagataatagagatatactcgagacgattgagcttcgtcaaatggatacatgcagtattaaaatcagcagttcaaatacaaagaaatttaaatcatcaagtatgaatatgtatgatcatgcttcacgatcgaacagacgaacaccaccagaaactcgacgtcccacacgaacagaagatgaaccaccacagtcttttcccaatcgtaagtgagccatattgtcgcataagttatcacgtaactcgagcatcgcttggtacctttgctgcagctccttcgcgctcaaaccttccgaaggaaagttccaccacattttatctaacttcttttcatttctcgattccttcaacagtttcaacttctctagatccatcgcaagctcctcttcgagcgcctccattttttttacgaggtcgtggagccttcgtttcttataagcttcgacgaggggtctggtatcgtctctctctaatggttcttgtctcgaagggttctttaaccggtcagccactttcttcatagacggatgtgcgaatgtatagggcttcttgggttgagagaaaatcaagaaagccacttcaacgtcacacattgctacgagctcgttcattttcttaaaaattccggttttacgttttgagaacgtaatcatcctatctccatagttctccaccttcttcatctcgatcttttgcttcccctttgtttttcttccctttgcttgcttcgtagatgacatgtttgcagaaaccagaactagtgtttgatttcttgtaggtttgttattttgtatgtaatgataaaaccatgcgcaaaacacaatctatttatagaccaaagaaagagataggattacaaagtttggagacattaaatttaaatcttagttatgaagaaagtgtattgactaatttacaaaaaaaaaaaaaaaatgttgactaaacacatttggcaaccactttaacatcttcattaatcagtcaagaaactattatggtaacccaattggtgtaatagctggtgtaaaggctaattgaccattcaaggaggaatgttcttttaggtaattacgagtttgtgtatcccttacagggaacatacctcagatccaaaattcttttgttacaaaaaaaataggaaaaatttgatataaaagatatctactacaaaatttgtccataatattcttatttttttgtagattagtcatataatttttttaaaaaacttcaaaatccaaatttatcttatttttctatcaaatttcatttaaaaaataaaacttttttgtattagtataagtccgttcatttgattagtcataacttttgctataatattttgtttgacttgaaatcactatcgttggaaagctaattgaaactaatagaattgctataatattccgtttgacttgaaattactaccgttggaaagctagttaaagctaatagaattgaagtcaatatataaacataaaaaaaaaatttaaaaatttaattttaggttaaaataactttaatctattttctctaaaataacaataacttaagggatgcaatttatacttataaatttccaaatttatataacatgaaacacatgaaaaatatttcctctcataggctacagctagctaatataaaataaaatccacgctttttatatgcttaatttaaactctaattattaactctaataaaacctagtttaagtccacgtataatttcaactgatattcaataactaataatttatatatttgttgcaatctctgtaagactatcggttaggttaatcattcaaagatatcttcgtttcataaaacaagaaaaaaacaaaaaaaaacaaattttcaaaaagaaaaaaatctatttgaggagaaaaatagctgtgagagagaaagctaaagaggcgacgtaccacccacctaaccacaaccagatccccaaaagacagagaactttctcgatacgaacgccaaagagaagaagacgaagacgaagatg

SEQ ID NO: 10562 - DNA, 3000 bp, Unknown
  misc_feature (1)..( 3000): cDNA_ID_2715930_gDNA_ID_2213663_Annot_ID_181909 3000 nt of promoter + ATG
ataacagagctacaacggtaaataaggaaaatgattaagggcaatttggtcttttaggttaagaaaagtattgaatcagatctgactttttggccaagaaaaactctcagccactagatcattccgacccctcctccacgttcttctctcttttaaataacctcttcacggaacccttctcactcacctatctcactctaaaatctctctctgccaatctcatcttcaacctctctctaactctcgttttcgattctacaatgggttagtctctcgcttttactaatctctcgtcccgtcgctgctattttacgttgttgagttttctgatctgatcgtttttctgattttgtttgttgttttatgtagctgacaagaagattaggatcggaatcaacggtgagtttcgaatcgattttgtaattcgggtttgtatgttctcatgtatctagatctagaatctgactgttgatttctgttatcgttaggattcggaagaattggtcgtttggttgctagagttgttctccagagggacgatgttgagctcgtcgctgtcaacgaccccttcatcactactgagtacatggttagtgttccttccttggttttgacggtgattcgatcttggtttgcttcaatattattttgatctcttgacgataagattctgttagtcgctctggtacctttgctttcgttagatttgatagatggatcatatcatttatggattatgcatgtggatttaagtgtcagatgatttgttcaattagtgcacagatctggaaactggtttagtgttcattgttcatactgtttagctgatcagtatacttgtggagctgttgtttgttttgctgtgtttgtaatgttattgattagcctgtttgtgattagagttgatatggttgagttgattttgattgcgctctgtgtttgattgctgcagacctacatgttcaagtacgacagtgttcacggtcaatggaaacacaatgaactcaagatcaaggatgagaagacccttctcttcggtgagaagccagtcactgttttcggcatcaggtacatttatcaaccagttctctgtctctttgcgtgtatacatattacaaactgttgtgaatttcaatctcattagtttttggtatttgtgaaggaaccctgaggatatcccatgggccgaggctggagctgactacgttgttgagtctactggtgtcttcactgacaaagacaaggctgcagctcacttgaaggtttgtcttatttgaattggttatttttgtcttgtaatgatataaatagtttatgtgctagaatttgcttagtatcattcaactaaatttgtgacttgttgtattttcagggtggtgccaagaaggttgttatctctgcccccagcaaagacgctccaatgtttgttgttggtgtcaacgagcacgaatacaagtccgaccttgacattgtctccaacgctagctgcaccactaactgccttgctccccttgccaaggtaaaatatctgatattctatatgatcaaatttgactttgtatttcaagttgaagtgactaatttcatttaacgttctttgatttcattgtgtaggttatcaatgacagatttggaattgttgagggtcttatgactacagtccactcaatcactggtaaatttatcaatcagttagaagtttattacaaacttgcttgcctataggtggaaaatttgtgatttaatggggtttgctttatgatttcagctactcagaagactgttgatgggccttcaatgaaggactggagaggtggaagagctgcttcattcaacattattcccagcagcactggagctgccaaggctgtcggaaaggtgcttccagctcttaacggaaagttgactggaatgtctttccgtgtcccaaccgttgatgtctcagttgttgaccttactgtcagactcgagaaagctgctacctacgatgaaatcaaaaaggctatcaagtaagcttttgagcaatgacagattaagtttacttatattccagtagtgatcaaattactcaccaagtgtttttaccaccaatacatagggaggaatccgaaggcaaactcaagggaatccttggatacaccgaggatgatgttgtctcaactgacttcgttggcgacaacaggtcgagcatttttgacgccaaggctggaattgcattgagcgacaagtttgtgaaattggtgtcatggtacgacaacgaatggggttacagttcccgtgtggtcgacttgatcgtccacatgtcaaaggcctaagctaagaagcagatctcgaatgatagggagtggaaagtcatctgttcatccccttttatggtctgaatttgtcgttttcgaataaaatttctttgaacttggaactttttttttttttggttttcttaattctcattcatgtgaggtgatgggagtttgtagaccgatgttttactggaagccctttgtttttggcttttgatatattgagttaacgttatggttttcaattttgttccacttctctttttaactatatactaaatcaaatctgaacgaaaaatgaaactaaatgagctcccgttgatgatgacgtagcaaatctaaggaactagaggtgtacacttattaatctagcttcttctagttttcgaataaaagtttctaagtggaacctatattttatgtttgcgattctcatttatgcgagtttgtagactgatgtttgaatgaaaagtatttcatgttgccttttgttattgattcttctcaaaacataagaaattcattaacagatgtgcggtttataaagacaacgaaatatgtgttcatctgtaaaggtactttgaacaaattattaaaccatgttacacaaattcacgtatagtggcacttcaattatttgtacacatccgcatcgaaaaaatggggaggtcgttgatatacgacacaagaaggcccaatg

SEQ ID NO: 10563 - DNA, 3000 bp, Unknown
  misc_feature (1)..( 3000): cDNA_ID_2715934_gDNA_ID_2213663_Annot_ID_181908 3000 nt of promoter + ATG
attgatgatgataaaaatttgattttcctatggttgcagttgaagaaccctgttctgggttttagatttaatgtcttggcttattcaaaatcgcattggaaacaccttgttacgccttaatccttcttcgtcttctatcgctattttctctacgtttatcaagaatctctctactgcttcggagcaattacctgagacacttgatgaatattcacagtctgaggagatatggaatgttattgtaggtagagacggtgatagagatagtgaagatgatgtttttaaacgtctatctagcgatgaaatctgtaaaagagtcaatctttctgatggtttggttcataagctgcttcataggtttagagatgactggagatctgcgcttggtattttgaaatgggctgagtcttgtaaagggcataaacattcgagtgatgcttatgatatggctgtggatattctcggcaaggcgaagaaatgggatcggatgaaggagtttgtggagagaatgagaggagataaacttgttactttgaatacagttgctaagatcatgaggagatttgctggtgcaggggagtgggaagaagctgtgggaatatttgataggttgggtgaatttggattggagaagaacacggagtcgatgaacttactgctcgatacgctttgcaaggagaaaagagtggagcaggcccgagtagttttgctacagctgaagtcacatattacaccaaatgctcatacgtttaatatcttcattcatggttggtgtaaggcaaatagagttgaggaagctctttggacgatccaagagatgaaaggtcatggttttcgtccttgtgttattagctatacgacgattataaggtgttattgccagcagtttgagtttattaaggtctatgaaatgctaagtgagatggaagctaatgggtctcctccgaattctattacttacacaactattatgtcttctcttaatgcacagaaagagtttgaggaggctttacgggttgctacaaggatgaaaagatccggctgtaaacccgattctcttttctacaactgtttgattcacacgcttgctcgagctggtcggttagaagaagctgagcgggttttcagagtcgagatgccagagcttggtgtttccattaatacatctacctataactctatgattgctatgtattgtcatcacgatgaggaagataaggcgattgagcttctcaaggaaatggaaagttcaaacctttgtaatcccgatgttcatacgtatcaacccctgctgagatcttgttttaagagaggagatgttgttgaggttgggaaactattgaaagagatggtgactaaacatcatctcagcctcgatgagtcgacttatacttttctgatacagaggttatgcagagctaatatgtgtgagtgggcgtattgtctattcgaagagatgattagccaagatatcacgccgaggcaccgcacttgtttgctgctcttggaagaggtcaagaagaagaatatgcatgaatcagctgagagaatcgaacacattatgaagactgtgaaacttactgcacctgtaaagtgaggtttattagttattatgacgacttgactgttacttcgcagattgggatgagaagtggtctcttcatgcttgcgaaagaagacaagaccagatcatgcataaagatgttcattgtgttgtttattcaaccacattgtagtgtagatttcaagttcgttggtcaatggatatggacaagaaacttggacttcgtattcatgaaaagttgttaagattggaactctggagttgattgatctgacacattcttgatgataagaggttaggcaagttttgtttgttttctgttttgactcgatctttgcaaaggtctcgagacatctcaagatctagagttatggcaggcttattcacatcaagactaatttatgggagagtttacacaagtgtgggatccaagagcatatttttttttgtaatgagcattgagtttatggacaaatacatgtgcatttggatgcgtccacacttcacagttcacaccgacagaaaggtagatccatattaccccaaacaaaacaaaatatattttttgggatatttttgaaattattaatagaaaataaatttgagtagtcttcttcaacttcataagatggttaagctttaactacgaattattgattagatattattattaagggccctcaaatgttagctgccacaagtgggcactttttctttggtctacattgttcgaaatttatgtattaatttagaggcagagcaatttacatgtcgatttattatgcacgaaataacaaaactactagtatcaataataatacatccacgtctgtttccaaccaaaccagggatgcgtctaatttgatgaagcatcattcaattattgcttacacacttcttaaacattttaaactttactgaataacagattatttttatttttttactgcaaaagggaaccataaccaaaattcttgctagattttaatatacttacacattcttctttcttgctgaaaaatcaacagcctttcagaaatcagaataatacaaaactttttcaggatcataataacatgcttaattgattagaaaaaaaggataaatcccgtcagatatggtccactcacggggatggaatctgcatattgtcgatgctcccaaaaatactatttttttctttttctggtgaaacacacacacaagttccgtcttcgccacaacaacacaatcttcaaaggtttctcctttttgttgtcttctgcttcatcactttgtgttcgtcgttcaaaaaaacttctttgatttcaaaccactcaaattcatctttataatccacttcctctgttttctcgttagctctgtttcctttgagattcattggtttggttcactaaaaccgaagaagacccggataattttctagaccggaaatg

SEQ ID NO: 10564 - DNA, 3000 bp, Unknown
  misc_feature (1)..( 3000): cDNA_ID_2994661_gDNA_ID_2213663_Annot_ID_181906 3000 nt of promoter + ATG
gttggacatcaatatagtaagatatcttcgaaaagtgttttctcctcaagatgatatcgttaatgattaagaaataagttgatggttatacaacagataaaatatatactaataaagggtaagaaatacagattaaaaatgaatgtgtgggaaataactacgaaagtgtgtgtaatatgtaaatgtaacagtttaatgaataaatatacacaaatcttgtatttaaaatttaggagaacaggacttggggcttataaatacgtttgtgatcctgtttaagaagagtttgaatcagaatcatgaaatgtgaaagattaaacatctcgttttcttgtcacagttcacaacgttttttattactctatcgacttacgatgaatattttaagaaaaataaatatgggccgaataaagacactaatgggcctaattaaatgggcagtatatccaattaagtagtaaacagaaacgtttcgtttcgaatcacacacaaactcacaacgtttctgtgaagctcgccgtcaccgtcgccggaactcatggatcgaccaccgtcgttgccacactatcaaaaccctaatccgaacctcttctaccactatcctcctccaaattctaatcctaatttcttcttccgacctcctccacctcctcttcaaaatcctaacaattactccatcgttccgtctccgccgccgattcgcgagctctccggtacactctcttctttaaaatccctgttgtcagaatgtcaaagaaccttagattctctctcgcaaaatctagctttagatcactcttctcttctccagaaggacgaaaatggctgttttgttcgttgcccttttgattcaaatcactttatgccacctgaagctctctttcttcattcacttcgttgcccaaatactcttgacctcattcatcttcttgaatcctttagtagttaccggaacacgctcgagttaccatgtgaactacagttgaacaacggtgatggtgatctctgtatctctttagatgacttggccgattttgggagcaatttcttctaccgagattgtccaggagctgttaaattctctgagctcgatggaaaaaaacgaactttaacacttcctcatgttctatctgtggaatgtagcgattttgtaggttctgatgagaaggtgaaaaagattgtcttggataaatgcttaggagtcttaccgtctgatctttgtgcaatgaagaatgagattgatcaatggagggatttcccaagttcgtattcctctagtgttctttcttcgattgtgggttcaaaagtggttgaaataagtgcattgaggaaatggattctggttaattcgacgagatatggtgttataattgatacattcatgagggatcatatattcttactctttcggttgtgtctcaaatctgctgtgaaagaagcttgtggatttaggatggagtctgatgctactgatgttggtgagcagaagattatgagctgcaagagtagtacatttgagtgtccagtcttcattcaagtcttgtcttggttagcttctcaacttgctgtcttgtatggagaaggaaatgggaagttttttgctttggacatgtttaaacagtgcatagtagaatctgcctctcaggtaatgttgttccggttagaaggaactagatctaaatgctctggagttgtcgaggatttggatgatgcaaggttgagaaataaggatgtgatcatggagaagccctttgagaatagttcaggtggggaatgtggcaaaactttggacagtccacaggtgatatctgtgtcccgtgtttcagcagctgttgcagctttgtatgaaagatccttgcttgaagaaaaaataagggcagttcgatatgcccaaccactaacgagatatcagcggtaggtttgaaatctttcaaaggcgattctgttttgccgacttgatttttagtttatgaaagcatcatttcatgtttgcatttgagtttgattcctcatgatgtctctgtctgtcaatctgtagggcggctgagcttggttttatgacagctaaagctgatgaggaacggaatagacgttgtagctaccgacctattattgatcatgatggtcgtccgagacaacgctcattaaatcaggttaatactcaactaactgttatctaacattaagtaaacaaatattactgtagggaacttttattgaaggtactgaaatacatatattttactgtctataatgtgtaggatatggataaaatgaagacaagggaagagcttttagctgaagagagagattataagcgtcgtcgaatgtcataccgtggaaagaaggtgaaacgaacgcctcgacaggtaagagctgtttccttttcatgaatgacaatcacaaattccagtgttttgaatgtgctacaaaatgctcaatgtttggacaatctcattgaaattttgttggaaaaagtgtagttatatgctgactctactattgtcttgtcgaggcattttgcagattttgtgaaaaaaattggtccttgctaaattcatacttttagttatgaccacccttcagttagcaataaacttatactatcctcttcttccagtgagttttctccttcttttgtcttgtaggtcttacatgatatgatagaagaatatacagaagaaattaagctagcaggaggtattggatgttttgagaaaggaatgccattacaatcccggtctcctataggcaacgaccagaaagaaagtgactttggatacagtataccatcaacagataagcaatggaaaggagagaaccgtgcagatattgaatatccaatcgataatagacaaaattcagataaagtaaagcgacatgatgagtatgattcaggtagctcgcagagacagcagagtcacagatcatataagcacagtgatcgaagagatgacaagctccgtgatcgaagaaaggacaagcacaatgatcgaagag

SEQ ID NO: 10565 - DNA, 3000 bp, Unknown
  misc_feature (1)..( 3000): cDNA_ID_3037308_gDNA_ID_2213663_Annot_ID_181897 3000 nt of promoter + ATG
ggttgaacgacaagaaagttcttgttgttattgatgatgtgaatcagtcagtacaagtagatgccttggcgaaagaaaatgattggctaggtcctgggagtcggattatcatcacaacccaagaccgaggaattttgagggcgcatgggatcgaacatatttacgaggtggattatcccaactatgaagaggcccttcaaatcttttgcatgcatgcttttggtcaaaagtccccatatgatggttttgaggagcttgctcaacaagttacaacactttcgggtagacttcctttgggacttaaggttatgggatcctatttccggggaatgaccaagcaggagtggacaatggcactaccaagggtaaggactcaccttgacggaaaaattgagagcattctaaaactcagttacgatgccttatgtgatgtagataaaagtttgttccttcatctagcttgctctttccacaatgatgataccgagttagtagaacagcagcttggaaagaagttctcggatttgaggcaagggcttcacgtcttagctgagaaatcgcttatacatatggatttaagactgatacgtatgcatgttctgctggcacaacttggtagagaaattgttcgtaaacaatccattcatgagcctggacaacgtcaatttttggttgatgcaacagatattcgtgaagtactcactgatgatacagtaagttttgacatatattttttcttcctttattgttcttatcatttgacaactaaactatataatttcttcagggcagtagaagtgtaataggcatagatttcgacttcaatacgatggagaaagaattagatataagtgagaaagccttccgaggaatgtctaatcttcagttcataagaatttatggtgacctttttagccgtcacggagtatactattttggcggtcgcggtcaccgcgtgtctctggattatgatagtaaattgcacttcccgcgaggtctggactatttacctggaaaacttaggttattacattggcaacaatttccgatgacaagtttgccctctgagtttcatgcggagttccttgttaaactatgcatgccctacagcaagcttgagaagttgtgggaaggaattcaagtaactgtttgttctctttatttacttctctccaactttcatttttttttctttttcgaatggattatttgatgtatacgaacggctttgaaacgctttcacacttctaaacttctagttgtggtttttgtactgcagccgcttagaaatctcgagtggctggatttgacttgttccagaaatctgaaggagcttcctgatctttcaacagccactaatctccaaagactgtccattgagcgttgctcaagtttggtgaagctcccttcctctattggggaagccactaatctcaagaaaataaacttgagagagtgcttatctctggtggaattaccctcctcatttgggaatcttactaatctccaagaattggatcttagagaatgctcaagtctagtggagctcccaacctcgtttgggaatcttgctaatgttgaaagcctggaattttatgaatgctcaagtttggtgaagctcccatcaacttttgggaatcttactaatctcagagtgttgggtcttagagaatgctcaagtatggtggagctcccatcctcgtttgggaatcttactaatctccaagtattgaatcttagaaaatgctcaactctggtggaactcccctcctcatttgtgaatcttactaatctcgaaaatttggatcttagagattgctcaagtctactcccctcctcgtttgggaatgtcacttatctcaagagattgaagttttataaatgctaaagtctggtggagctcccctttttctaatatatatatatatatatccgttggtatagttctctgggattctagttcttcgcatgcggtcttaataatttgttcaacctcttctcatggtatgtgtgatttgaatgttatttttcccattttcttgcatgcagatgattttattgcaaatagaaacgtattttgtagttttcctttgttattgcttgtccgatatttttcgatgcgaaaacattcagtgtagttttcgatggagttaagaagacaactttatcattggtccatccatgtcttaatctattagctgtgaaatttcatgttttgacggagacatagatttaattaatgtatccttgtactttattccttgctaattccttcttagagatagattgctccaaattacttgtcatatagataaaacgattctgattattctcaaatttgtttaatacgaaaatgtataaagaaatgcaacaaatgtatttacattacaattataattactagatgatttttcgtttttttctgattgctaaaagttattctatttatgcgactaagaaatatgtatatgttacttgtatgatagagatccgtttgagcctactcaagacttaaaatcgaactagcatatttcttcctcgtagattttggatgagtctgaagattagtagagcccctcacgaattttccatgaagagataaataacaacaaattaagcttcctctcttgccatcttatcattctagatcgctgaatatttttacgccacacaattttgtgcgaaaaagacttttgcaagttggcttatataatagagatccgtttgactgtttgagtacaagaaagacttaatagagatccctcatttttctgctaagaggacattttatatagactcacgtggtggagccacagagaattagccgcccctcacgaatattcttcccatgtttgcgttgctagtcttcttattctaagtcaatggagttagtgtactaatctaatatatatacaacaaacccttttatctgttttgaataccattgcttcatatagctctctaaaaaagctctttgttcgtctctatatcatacgaata

SEQ ID NO: 10566 - DNA, 3000 bp, Unknown
  misc_feature (1)..( 3000): cDNA_ID_3037312_gDNA_ID_2213663_Annot_ID_181894 3000 nt of promoter + ATG
tgatccttcatgttaataataatgataaatttgtgtaggtgattgaattgggtggaattccaacgattggtgattgtgcagtgatattacgagctgctttaagagctcccatgccttcagccttcttgaagatcttgcagacgacacacagtcttggctactcatttggcaggtaactcagttacaacctctctttgggtttagtctgttagagaagctagtctaaggcgttcgatatgactaaacttgactataaacaatgacatttgaatacacgtggtaaaaatctgttgcagcccgttgtacgatgagatcatcacattgtgtttggaccttggagaacttgatgcagccatcgccatagttgcagatatggaaaccacagggatcactgtccctgatcaaacccttgacaaggtcatatctgctagacaatctaatgagagtccgcggtctgagcctgaagagccagcatcaacagtaagctcttagttatcatatcctcttctgcttgttgtgaagtctctataagaaacagaaatcggtagaaggagctgaatctgtcttagttatgaaagttttgttcattataagtacaagtcatgtagttccgagtgtagaacagtttttactagtgttgcaccaggtccctccagtctgatacttaattctttagtgttggatctttctatataagaaacgcaaatagcaagacgcagctgaattggtcttactaacaaacgttttgttcacgaaaaagataggaagaaacaaatgaacgatagtaacaaaagttagaaaatcctcatcatattgcataagataggaagaaacaaaataaggatagtaatcttattcaatgagaaaaagagtgagtaaacgaaggaggctaaattaggctttaaaattcgtttgcttcttcagaccctcgaggactcgttttttccatttattatcctcctgcttggttcgctttataaaggcggcaactctcaacatgttttggtcatatcgacgctgttctagaatgggttttcgtttccttttgcctcccggaggttgtttgatttgcattgaatttggaacgtaagggcacaaatgtggcctacactttatgccggctacatgtactcggagatccaattctctaaaatatccagtttttccaatgatgttgactctgtggtgatcaaaaaccatggagactttcttctcctcgtcaatgaagaaactcccatgtatatatgcaatcggcatgtcagccaatggtcctgtatccatttccaagatcttgctccacgacactttatcatactcgatcttagtcgtgatccatatctcaaactcatatggattccagtcgttgtgcgtaagtaaagccgcaagcttctcttctctaacacaagataaagtcacatagtcatcatggccagcgctaaacggtagacgcaaaagtggcccaaatctctcacttgtgaaatcaaaacagattatgtgatcgtcgattttgtttattgcgttactttttgtagcacaaaagtaggtatttcccttgagagaaacaccacgctgataacacgatactatccaatatggagggacatcaagagttgtccataaatcggtttcaatatcgtagatttcataccatgaaaaccggttttcgggtgcgtggttcacggccgaagagatgtaatgatctataaacctcaagactttgtggctacgacaagagttgttcttgttcacgtaccctagagcgtacctgtacatgtccatatcctgttctacgcggtgctgcttctttactaatgtgcagcttcataaagctctgactttgggataaagcgtacaacgttttgcaagttaatttcaatgtcctcatatacttcatgggaagtctagatacaatatcctctatcaaatcccttggaagatttaagatcatcgttgtcgttttctcaagttgcaacaaggtttttttttttttaaccttaaaaaagtgttcttcttttcctctgatttttttcccgcagaagactatacataggaatttgaagttgggcccaatcgtgggcttcagaatcttctcttgttttctttttggtaatcacattcataacatccaagttctttaccaacaatgaccatttgtatggggagagcatcaagtttgtatgaagctgggctaactatgggcttattggaatttaaaacagtatcttaaattccatctttaattgaaacatttgataagtggaagctgccaaaacacgcgtccatctttaattaaaatcaaatgtgaattgttttcatttttgtgacatttaatatttacttctagaaaaagaagatcaagtaaacatgcagttaagttcaaataagattagaattgtgatacccttgaattcgatttagtatgcaatttttttgtatttaaagaaaatatattggagtagacaaagagaggaagatattgtaaattttttgttattttcttttctcaatatatttaaggtaattaatcaggattacgttttattgttggcacatttaatgcctttgcggcactatttgggaaagattaaagattgtttttgggtggattgtaaattacaacctttgagaagaaaacactgttgcgtcttagacacgtgttaactaaagacaaaagaatttggttttgtccagatttttgttgactctttgaccccgatacgtaaaatcaacggcgttgaaatttacacgtgtcaaatattaagtctaattatatgtgtgaaatcttgattggtcggaaagaggaaattgaaaaaaaggcaaataaaagctaaagaggaaagacgaagctacagcttctgaggtcggaaaaaacgaattttgataatttagggttttgcccttttcttctctcttgcgttatcatcggtgttttgattctccggccaagtcccggagacttgtgatctgggggaatttggtgttcaatttcattaagacgcg

SEQ ID NO: 10567 - DNA, 3000 bp, Unknown
  misc_feature (1)..( 3000): cDNA_ID_1031488_gDNA_ID_2213663_Annot_ID_181891 3000 nt of promoter + ATG
gataaagaatggcagataggttcagaatgaaaaaaaaaaaaaaaaaaaaaaaaactccatgtgaacacccttgtgaatttgagaacagggtcttgctttggtttggtctggtcatatttccacacatcgaaaacctttactctcagatctcgaagaaagtttgtacacaaaagcttggtgttttactgagttcctaattttccacttacatttccaaggaagttgacaattttctacatcggacatgtttgggatcagtggtaaattaaatcctaatgatcttaaaatcaacagcttttgttttgggaataagttaaaatttcagggtaataatctattcatctgtatgatcttataagcttgattttatttatcatttataactagagctacactcttgtttatctaatcaaatacaaatctcaaaggtatggtgtatataggaaatattcgaactcaatcctttatttttaggttcaagcacccaaacattgccgtatcaaaccaatacacatgaaaagccaactaaaaatttggtttgtctaaacataacaaatttgaactttcactaattagatgctttgaaaagtgaagtatagatataaacaactcaaaagtgtaggatatataattccactctaaacacttgcatgaccaaaagtttttaagatctagggtcacgaattttggctgcaaaaggaattgaggattttgacaccaaaacaaaggaattaaggatacttcatagaacaaaaagaaaagatactcactagttacgaatgcacagaaaagtaaatataagtaattattattaattcaggtttacttctggttcggtttaaggtttataaagagtagaagtagatgatctctggcgaggtatcatttggaaaaggaaagaaacgaattcgattcagttttagactaatctagttgggttgattaaccagtgctggatcacaatgcaaaggagcttggaatcgatcttctctccagaattccattgtgttagaatgctccaattctgtttggtttaaccaaaccaaagtcgaattgattcggaaactttgttgaattttaatgagcttttcaaattcattctcatgggtcaagtttgttgatcatttgggcttgtgagatgtttgtggagtcctaacgcaagcagagagcccaaaacaaaaccatgattttccatagtggtacagtgaagtttttattttgggccattctgtttctttgatataattttatatttaaaaagtctattttcttctacagaaaaactttgtgttggttggtttttgtttacggatagacatcatttaattttactgtataactttacgaataaagacactgatatattttcacctttatggtaacgaattttatcaaaaaaaagaagaaaaaaaagtaactaattaaatagccggaaaaggttggtatgatttggagatgatattttacgttttttttttaatgtatttttcaaaaaatcaaaattcataaatcatgatgcagtcggacagggtagcttcatcatgttaatttatgacgtgagttggttgagttggtagatctcttaatttcacttctatctctctctctccaataattttatttatacagaaaattacttagtagtataaaaatcaagacaaatgaaaagtcttcttttgatcattcttgagtaattagtggaatgtattctgaattatccatttatgcatcgtaatttgttaagtcaacattttcaagtctcatgtattaacaaacataaggtgtatatgattaattaacaagtagtataattgctcttttaccaatttcatgaaaacatcaaatggtttgtgtaattttatcctagaaaatatcaagcataacccgcatttcaagaaaacaaattaaaatacattttataattacacaccaaccaaattgaacaacactcctactataaaatacatcaagattttcaaaaagtatggtattgaacacgacccattacattgacatcaatggctctaattgttatatacaccttctttttttttttgaatgcttttctctttctttctggatgctttatttatgtaatattccagctttgaaaattcgtaggtagtacgcgttaatgtgataacgttcaaaggggaggcatagttggacagaaaaagtttatccaaaaatatatatttaaccaattgaacttctcgtaattgaacatttagatggcatgagtttgacattgtataaatcttagtgaagtctagtttaaatttatccatccatcagctgatggaaacatttttagttttcaatattaaatattatgtcatgtaaaacccatgacaaaaaaaggagaggatatgattgatgagccgcctaaattcacgtatgttacgttaactatatagcatatagatatttcacatattaaccaagtagttcgaaatggatgggttatacaatatggtttctttggggaccgtccggtcactgcatctcgatttgtgacattggatataaacacaaaactacacaaaaatggagatgaagaacggtaaagattagtttctttggatcgatatacatatacctaatcacttcaaaatttacacgtagattgcagacattgagatcagtaaccgtcaatcaaaaaaattatgtcacatcgaatttcaatggttgaaagataattccattttaggagaacaagcagtagtacaatttctaacatttattacatccaaacaacaaacaagaccaatttttatggtgtatcagttggcagcctctattaatgtctctattttcttaaaatcacaccaacaacgaaaaaaaaaaaaaaaaaaaaacagatacacattacttattgaaccctaaacctattgtcagtgtatatatataacacacactctccatatgctctcatatcatacgtcaatttataaacgtttcttctcattcgtcatctagtcccattctctgtccataaca

SEQ ID NO: 10568 - DNA, 3000 bp, Unknown; identical to SEQ ID NO: 10558
  misc_feature (1)..( 3000): cDNA_ID_3037323_gDNA_ID_2213663_Annot_ID_181885 3000 nt of promoter + ATG

SEQ ID NO: 10569 - DNA, 3000 bp, Unknown; identical to SEQ ID NO: 10557
  misc_feature (1)..( 3000): cDNA_ID_2785827_gDNA_ID_2213663_Annot_ID_181884 3000 nt of promoter + ATG

SEQ ID NO: 10570 - DNA, 3000 bp, Unknown; identical to SEQ ID NO: 10567
  misc_feature (1)..( 3000): cDNA_ID_1031488_gDNA_ID_2213663_Annot_ID_132602 3000 nt of promoter + ATG

SEQ ID NO: 10571 - DNA, 3000 bp, Unknown
  misc_feature (1)..( 3000): cDNA_ID_2715972_gDNA_ID_2213663_Annot_ID_132605 3000 nt of promoter + ATG
atcctccaccgtgacggcgaagcatctttcgaccttattctaatggataaggaaatgcctgagagggatggagtttcggtacttaatgatcttgaatcttaatctgcttaccaaatagacaatttaagtgggtcgatcatcactatacttaaaaacctcctctttaatatagtttttatgttctttgttgatttaatttagacaactaagaagctaagagaaatgaaagtgacgtcaatgatcgttggggtaacgtcagtagctgaccaagaagaagagcgtaaggcttttatggaagctgggctcaaccattgcttggaaaaacccttaaccaaggccaagatcttcccgctcattagccacctcttcgatgcttgatggatgaaggctcattaatgtatctatattttcaatcatgaaatcacctacacgtgtatttgacacaaaaatctgcatttgttgtgatatagggtttctcatatctatgtttgatttattttcttatcgtccgaggtaaaatcatgcaagtcatttcttttggctaataaaatattaaaataaggttttctcttgttgaatgagctaatttacttcatatggctcatgcaaatctccatatcagttaactttaaaaaaattatacatagtttcgcgataaattctaaattttaaataactatcacatttactaaaaataaaataatgtatgtatgtaaatatgtaatgtaactggctaatttaattgaataattataatacttacaaaaataatatatatcgcgaatctgactatatttatgttttgtttatcttattcaaaaagatgaaaatataaacactttactagctatatctattttcttttctctatttttcaaaaacataatttacataatatttcatattatttcaattccagtttacgttccatatttttaatgtatatatattttattcttgttcttcgcatatatacgtcatattattttgtccaatactatatgtcattaagaagatagggtactactactgggtacatcatatcttactttggatttgataaggtttgtgtaaataagagtaaattctattttcaacggcgtgtatcatcttagccaaatttgattaagcattgtgtgctatacactcagaaagtacctatactaatgttgcactataaataataattattacaaatttttaatcaagaaactagctatgggtctaaagatcagaacataaaatgtaatttttttttcttctaattttgactttataacacaatttttttggacatctttttatttatttatttagaaacgttaaatttttatttgatatctgttttgaattaaatcagaaaaagaacatcaaacaaaaatttaacgtttctgaatttctttggttgtgaccacatttcttgcagccgtataactcgtgactctaaatcttaaaagctttggttgtgtaagtgtttgaagtggagttatattctacactttaattttgagttgttttgtttgaactctatatctgtacttcacttttcaaagcatctactatgtctctctggaaagttcaaatttgttatatataggcaaaccaattcttcacttggcttttcaggtgtattggtttgattcggaaatgcttgggaggttgaaccgaagaacaaaggattgatgagttcgaatattttctatatataccatagctttttgagattatgatttgtttagataaacaagatcgtgttgtgttatttgtctctgcttctttatttaacatacgtatggcatcgtaacatcttcatatgtttgtaaatacaattattttcacttttgttttgatattactttcgaaaatatatgaaagtgttatctataaactatatcaggaatcagtggttcaacaattaatgatatccaagaaaaacgctgtgtattataatgtggattacgaaagttctgacaaaatttgtgtgaaattttgtatgtccgctttttctgttttctttcttatgcattttcgatcattttatctgaaatgtgttacaattaaactaaatattcctctactacataactcaagctcacattttttttttttgttacttcggcgcaaagtcttcaaacactaattaacaagatttcccgtgtggatgcttagcatttttctccaccctaactaagatggaaaaattactcataccagtaaacgaaactattcgtaaaaactgatttcctttttgtaagtgtagaacaaataatttttttcaccgacaacttccatttttttactatctctaaaattttcaacacgtattccaagtatttccttttattttgagtaatactcttgtttccaaaaataagagttaacatgattagcttatatacttgatcttttgggttcttgttgtgattatatgaatgatgaagacaaagaagaaagaatcgagaggagaaattgggaagaacatgtcgttgatatataagaagaaactaacggtgttggtcgttgacgatgatccatcttgtcgtacactccacatgggaatcattcaaatggctggaggattcccttacatggtgaaaaacggcgagaaataagaagctacgtgacatgaatgtgacgtcaatgatcgtggggatgacgtcacatgaggacgagactagggcattcatggaagctggagttgaccactgcttgtcaaagcccttaacctttggaaagatcgcatccatcattgaccatctcaaaaccgcataatctaccgattaacaaaatattacttggtttagttcggttatgtgactactgatataaatcttgttcaatgcaatttggtctagttcggttctgtctggttcaatccaattaactcacgtgatctgcacatgatcatcgtctacattttaattaaataaaaatctaaatttcaaatcactttatccattccccagtaaaaaaaaagtttcagactttggcaaaaaaaaa

SEQ ID NO: 10572 - DNA, 3000 bp, Unknown; identical to SEQ ID NO: 10566
  misc_feature (1)..( 3000): cDNA_ID_2715966_gDNA_ID_2213663_Annot_ID_132607 3000 nt of promoter + ATG

SEQ ID NO: 10573 - DNA, 3000 bp, Unknown
  misc_feature (1)..( 3000): cDNA_ID_3037308_gDNA_ID_2213663_Annot_ID_132610 3000 nt of promoter + ATG
atgattggctaggtcctgggagtcggattatcatcacaacccaagaccgaggaattttgagggcgcatgggatcgaacatatttacgaggtggattatcccaactatgaagaggcccttcaaatcttttgcatgcatgcttttggtcaaaagtccccatatgatggttttgaggagcttgctcaacaagttacaacactttcgggtagacttcctttgggacttaaggttatgggatcctatttccggggaatgaccaagcaggagtggacaatggcactaccaagggtaaggactcaccttgacggaaaaattgagagcattctaaaactcagttacgatgccttatgtgatgtagataaaagtttgttccttcatctagcttgctctttccacaatgatgataccgagttagtagaacagcagcttggaaagaagttctcggatttgaggcaagggcttcacgtcttagctgagaaatcgcttatacatatggatttaagactgatacgtatgcatgttctgctggcacaacttggtagagaaattgttcgtaaacaatccattcatgagcctggacaacgtcaatttttggttgatgcaacagatattcgtgaagtactcactgatgatacagtaagttttgacatatattttttcttcctttattgttcttatcatttgacaactaaactatataatttcttcagggcagtagaagtgtaataggcatagatttcgacttcaatacgatggagaaagaattagatataagtgagaaagccttccgaggaatgtctaatcttcagttcataagaatttatggtgacctttttagccgtcacggagtatactattttggcggtcgcggtcaccgcgtgtctctggattatgatagtaaattgcacttcccgcgaggtctggactatttacctggaaaacttaggttattacattggcaacaatttccgatgacaagtttgccctctgagtttcatgcggagttccttgttaaactatgcatgccctacagcaagcttgagaagttgtgggaaggaattcaagtaactgtttgttctctttatttacttctctccaactttcatttttttttctttttcgaatggattatttgatgtatacgaacggctttgaaacgctttcacacttctaaacttctagttgtggtttttgtactgcagccgcttagaaatctcgagtggctggatttgacttgttccagaaatctgaaggagcttcctgatctttcaacagccactaatctccaaagactgtccattgagcgttgctcaagtttggtgaagctcccttcctctattggggaagccactaatctcaagaaaataaacttgagagagtgcttatctctggtggaattaccctcctcatttgggaatcttactaatctccaagaattggatcttagagaatgctcaagtctagtggagctcccaacctcgtttgggaatcttgctaatgttgaaagcctggaattttatgaatgctcaagtttggtgaagctcccatcaacttttgggaatcttactaatctcagagtgttgggtcttagagaatgctcaagtatggtggagctcccatcctcgtttgggaatcttactaatctccaagtattgaatcttagaaaatgctcaactctggtggaactcccctcctcatttgtgaatcttactaatctcgaaaatttggatcttagagattgctcaagtctactcccctcctcgtttgggaatgtcacttatctcaagagattgaagttttataaatgctaaagtctggtggagctcccctttttctaatatatatatatatatatccgttggtatagttctctgggattctagttcttcgcatgcggtcttaataatttgttcaacctcttctcatggtatgtgtgatttgaatgttatttttcccattttcttgcatgcagatgattttattgcaaatagaaacgtattttgtagttttcctttgttattgcttgtccgatatttttcgatgcgaaaacattcagtgtagttttcgatggagttaagaagacaactttatcattggtccatccatgtcttaatctattagctgtgaaatttcatgttttgacggagacatagatttaattaatgtatccttgtactttattccttgctaattccttcttagagatagattgctccaaattacttgtcatatagataaaacgattctgattattctcaaatttgtttaatacgaaaatgtataaagaaatgcaacaaatgtatttacattacaattataattactagatgatttttcgtttttttctgattgctaaaagttattctatttatgcgactaagaaatatgtatatgttacttgtatgatagagatccgtttgagcctactcaagacttaaaatcgaactagcatatttcttcctcgtagattttggatgagtctgaagattagtagagcccctcacgaattttccatgaagagataaataacaacaaattaagcttcctctcttgccatcttatcattctagatcgctgaatatttttacgccacacaattttgtgcgaaaaagacttttgcaagttggcttatataatagagatccgtttgactgtttgagtacaagaaagacttaatagagatccctcatttttctgctaagaggacattttatatagactcacgtggtggagccacagagaattagccgcccctcacgaatattcttcccatgtttgcgttgctagtcttcttattctaagtcaatggagttagtgtactaatctaatatatatacaacaaacccttttatctgttttgaataccattgcttcatatagctctctaaaaaagctctttgttcgtctctatatcatacgaataatggattcttattttttccttggcactgttgttgttgttgctcttgcaatctacacgcttttgggaacaatatctttt

SEQ ID NO: 10574 - DNA, 3000 bp, Unknown
  misc_feature (1)..( 3000): cDNA_ID_2994661_gDNA_ID_2213663_Annot_ID_132615 3000 nt of promoter + ATG
atgaggatagaggaataataaagaggtttgtgatcgcctactattccaatgggctttgaatcagaaaattcagaatcgtggaatgtaaaatatataaaacatgttccaaaacttgacaatgtcccaacgaaatcttaataacgcggcacaaaaccgctttaaggacgtatatatatatagaaaagacacattgtgatacttaagaaaaaaaatcatctcaataacacaaaaaagaacataatctaagatttatatcagaaaatgcatgatttataggttttaataattttacatattatataaagagcacaatattctaaatggccacgcggaagcaaaacacttccacgtacacagtagaggggcacattactaaattaaggattatatatgttgttctctctgcatattccacttatattttaaaaatgtgtttttagtagctattccatattgtaatttaattaagattaagaaatggccatgtcttagtgtaagtggtaaaggcatttgatcttctagctcgcatgaaacaatgccaactttgtttgcttaatttcaacttccactctcgcatatgcagccattgctatattcacatacttgaacaataatcacaacaaaaactaattagttgataatttttctttagtagagtttgtgtgtagcttatgtttatgataataacactgtgggtttttaatttctaaagttgaaaaatatgtggtttatgttttgattgtgtgcaagtatacatttgtgtatgcttgtatacattgatcatcaagcaaatttaaatcataatcacttcttctcacgttttaaattttcaggtaattgtggaaacttcggtttcaacacttcaatagtttgtatcatatttcaaaatttaaagaattataccacataattaatggagtaaatttgtttcataattcaacaaaaacaatgaagttacgaggaacctagctagccctctcataacgaacttgattcataaatttaaaattagttcaagaaaagaaattagcaaatgatttgtttcaaacgtatatatttacacgtttttttataacgatatttgcatttcattcaagatttttttttttttttatagtgatcaatttctcttacaaattgtaaaccccaaactaatctaacatgaatatagcaattacatctccttttttggtgcaaaaaataccagttacatcttgttatatatatattattttattttaacatctcatcatcattatcatcttcatcatacatcacatcttgttatatatgtttacattttaaacttacaaaaaaaagttaataaataagagaaactccataaacgttgcgacttgcgactttatttaacatgttatatatttatatatacatgtatataaactgcatacaattaaacctgcatgtgttatgtgttcaaacagaaaaatgaatgccaggatttccaatatttttaaaattttacttttattaggtcttgatatttccgtacaaactcgatcaatctatgtaaattacttgtaaactaaagtcaaatattattggaccactttttggactatatatagctcatgcatatgtttctcatgcaacatcgcttaatccacaaagaaagggaaaacaaaaccgcacgaacaattctatttgaaaaacaaaaagatgaaatatccttttcagtgttttctagctaaaatcattttgctggctttagcatcttcgtttgtctcttgttacgacccatctcctcttcaagactactgtgttgccgtccccgaaaaaaacggaggtaatctctaattattgttttatacgtaaaacaattagtttatacataagaataaccctatattttttatgttatttgatatggaagacgatgttatgatcataaaacttattatataactttcaaattcaagtctacatttcgttctttttttttattttatcgtagttttcgtaaatggagaattctgcaaagatccaaaactagtaacatcagatgatttctttgcttctggccttaacatcccgggaaacaccaacaaacgccttggctcctttgtgaaccccgctaatatccccggtctcaacactcttggggtcggcatcgcccgtattgactttgcccctggtggtctaatcccaccgcacatacatccacgcgcctccgagatcatcttagtcatcaagggaaagctcctagtcggttttgtatcgtcgaacgactacaactacacactcttctccaaaattctttatcccggagatgtgtttgttcatcccatcggattggtacaatttcatgcaaacatagggaagacaaatgcggttgcgattggggcggttgggagccaaaatcctggttatatctcggtaggtgatgcagttttcgggtcgaagcctccgattgacccaaagattttggctaaagcttttgcgttggacatcaatatagtaagatatcttcgaaaagtgttttctcctcaagatgatatcgttaatgattaagaaataagttgatggttatacaacagataaaatatatactaataaagggtaagaaatacagattaaaaatgaatgtgtgggaaataactacgaaagtgtgtgtaatatgtaaatgtaacagtttaatgaataaatatacacaaatcttgtatttaaaatttaggagaacaggacttggggcttataaatacgtttgtgatcctgtttaagaagagtttgaatcagaatcatgaaatgtgaaagattaaacatctcgttttcttgtcacagttcacaacgttttttattactctatcgacttacgatgaatattttaagaaaaataaatatgggccgaataaagacactaatgggcctaattaaatgggcagtatatccaattaagtagtaaacagaaacgtttcgtttcgaatcacacacaaactcacaacgtttctgtgaagctcgccgtcaccgtcgccggaactc

SEQ ID NO: 10575 - DNA, 3000 bp, Unknown; identical to SEQ ID NO: 10563
  misc_feature (1)..( 3000): cDNA_ID_2715934_gDNA_ID_2213663_Annot_ID_132617 3000 nt of promoter + ATG

SEQ ID NO: 10576 - DNA, 3000 bp, Unknown; identical to SEQ ID NO: 10562
  misc_feature (1)..( 3000): cDNA_ID_2715930_gDNA_ID_2213663_Annot_ID_132618 3000 nt of promoter + ATG

SEQ ID NO: 10577 - DNA, 3000 bp, Unknown
  misc_feature (1)..( 3000): cDNA_ID_2715914_gDNA_ID_2213663_Annot_ID_132622 3000 nt of promoter + ATG
gttaaatacaatgtaaaatacatatgcaggggaaaccataatactagatatattagcttatttcgcaaagtcaattcgtagaagtaaatattcgagttcaagtgataggacaaccaagtgatatataataaaatctaccacaacccgagaagctaaaaaaaatcacaagctggttagttcaactcgtcgaggaaaaatcaaatcaagagattaaaactctagtctaggatgatcccacagtcatctccttctacaatcattaaattattactctatcgaaaccacacgctcgcgaatacttatagagtacatgtggaatgagataacgttaccagggagattaggagacttggcttatagaatacttatggaatacatctccctcgcgacttacctgcgcaatgaaaactttttctcgtcttgttcaatagttgtacttcgcacaaaggataatacgatcataaaaagactcataatacgatcttcgatatacccgcgcaacgatggatcacataaacggtcgcatggttggaaaatttagggctcatctctgattgttttattttcttcacaaaggggcaaaaatatatatatacactgtatatatatatggggttttttttatggtcaaatgttattgcccttcgaataagagacctttgattcgtaagaagagattattattttataagagaaggttatgaccgaaaggtttctgaagaaaatgaaaaattacttttaaaaggaattttatctttaaaaggaaacaaaaggaatggttaagttttacatgattggacgcaaaaatggaaaattcttttgattacttcaaaaaaggaaaccctcatttcttattaataatacatcaaataaaaaactaacatgatttttcgcaaaatatccaatttgtgaagaccctaacgctcgaatttgtcatcacttggctcagtctttcaacttttgaaaactgaaactccttttttctcaatactgttagataatagagatatactcgagacgattgagcttcgtcaaatggatacatgcagtattaaaatcagcagttcaaatacaaagaaatttaaatcatcaagtatgaatatgtatgatcatgcttcacgatcgaacagacgaacaccaccagaaactcgacgtcccacacgaacagaagatgaaccaccacagtcttttcccaatcgtaagtgagccatattgtcgcataagttatcacgtaactcgagcatcgcttggtacctttgctgcagctccttcgcgctcaaaccttccgaaggaaagttccaccacattttatctaacttcttttcatttctcgattccttcaacagtttcaacttctctagatccatcgcaagctcctcttcgagcgcctccattttttttacgaggtcgtggagccttcgtttcttataagcttcgacgaggggtctggtatcgtctctctctaatggttcttgtctcgaagggttctttaaccggtcagccactttcttcatagacggatgtgcgaatgtatagggcttcttgggttgagagaaaatcaagaaagccacttcaacgtcacacattgctacgagctcgttcattttcttaaaaattccggttttacgttttgagaacgtaatcatcctatctccatagttctccaccttcttcatctcgatcttttgcttcccctttgtttttcttccctttgcttgcttcgtagatgacatgtttgcagaaaccagaactagtgtttgatttcttgtaggtttgttattttgtatgtaatgataaaaccatgcgcaaaacacaatctatttatagaccaaagaaagagataggattacaaagtttggagacattaaatttaaatcttagttatgaagaaagtgtattgactaatttacaaaaaaaaaaaaaaaatgttgactaaacacatttggcaaccactttaacatcttcattaatcagtcaagaaactattatggtaacccaattggtgtaatagctggtgtaaaggctaattgaccattcaaggaggaatgttcttttaggtaattacgagtttgtgtatcccttacagggaacatacctcagatccaaaattcttttgttacaaaaaaaataggaaaaatttgatataaaagatatctactacaaaatttgtccataatattcttatttttttgtagattagtcatataatttttttaaaaaacttcaaaatccaaatttatcttatttttctatcaaatttcatttaaaaaataaaacttttttgtattagtataagtccgttcatttgattagtcataacttttgctataatattttgtttgacttgaaatcactatcgttggaaagctaattgaaactaatagaattgctataatattccgtttgacttgaaattactaccgttggaaagctagttaaagctaatagaattgaagtcaatatataaacataaaaaaaaaatttaaaaatttaattttaggttaaaataactttaatctattttctctaaaataacaataacttaagggatgcaatttatacttataaatttccaaatttatataacatgaaacacatgaaaaatatttcctctcataggctacagctagctaatataaaataaaatccacgctttttatatgcttaatttaaactctaattattaactctaataaaacctagtttaagtccacgtataatttcaactgatattcaataactaataatttatatatttgttgcaatctctgtaagactatcggttaggttaatcattcaaagatatcttcgtttcataaaacaagaaaaaaacaaaaaaaaacaaattttcaaaaagaaaaaaatctatttgaggagaaaaatagctgtgagagagaaagctaaagaggcgacgtaccacccacctaaccacaaccagatccccaaaagacagagaactttctcgatacgaacgccaaagagaagaagacgaagacgaag

SEQ ID NO: 10578 - DNA, 3000 bp, Unknown
  misc_feature (1)..( 3000): cDNA_ID_2715910_gDNA_ID_2213663_Annot_ID_132623 3000 nt of promoter + ATG
caggcaatcacttgggctccgttggtgattttgacgtcgttgattttcgtctacgtctcgatcttcaccgttatcttcggtagcgctagcttcaatcctaccggaagcgctgccttttatgtcgccggtgtccccggagatactcttttctccttggcgattagattacctgctcaggttttctaaagatccaaacttttttctgaatttttaaacttttttcagcttactgttttgggtttacttggtttctatcaatatttgtgatctgtgatagtttctttcaaatgggtataggcttgtgtttgtctgcgaattagaatctagttttgtctgcgaattagaatctagttttgcatgaatcattgaatccaaagctatgtagtatatgcttttcccgtgatttgtccccacttgtatgccccattttagattagttgagtagaattcgacttttttggtacatatgagtctgatcttctgtttttcgtatattctcacctttgatctgtttagtatagttatactcaggtttgatatttcttggaaagaagaacacacagaatcagattctcttttgtttttgatgtttgtttttttgttgatgtatgtgtttcccacttaatttaaagtaggaaaacgaaaccttatctttctcgtcgatatgtctttgtgttttctttagccttttctagagtttcttgcgtgtccatgtgtttctgtgtactacaataacataaatagatagaaagactgttaaatttggtaacctgatttagcaaggagtaatttgtactctttttgagagttgaatcaagccagatgactttattgcctttggtaggaatagtcttcatgatcccttttttgccactgtttcttgatttcgacgggataatgtttgaaaggagatgtgatatattatatctgttattccaggcaattggtgctgcaggaggtgcattggcgatcatggagttcataccagagaaatacaagcatatgattggaggtccttctcttcaggttgatgtgcacactggagctattgctgaaacgatcttaagttttggtattacctttgcggttttgctaattatcctcaggggtccacggagattgcttgctaagacgttcttgcttgctcttgcaaccatctcatttgttgtcgccggatctaaatacactggaccagccatgaatcctgccattgtaagtatacatttcttgcttgctctttcagatgttctatactaagaagagattgaccccgaataagtcacctgataaattacagaagcaactttatgtttttgggccatatattcacatcattccaacactcttaaacccgagaattatgattgtatcttcaaagatagatgattaatcaatatctctcttgtgtttgcaatgcaggcgtttggatgggcatacatgtacagctcccacaacacatgggaccatatctacgtctactggatcagttctttcgtaggagcattatctgctgcattgcttttccgttctatcttcccgccacctcggccccagaagaagaaacaaaagaaagcctgaggaaaataaaacaattgggagaataccggtcagattcttcaccggtttgggctgtagaaagattcacaaagctgttccattctaaaataaggagaccaacaacaacaaaaagtcaaaagtctccttgtcattgtttagatccacacgcttattttacagatttgtgcgacgtaacttttctcttttatgttcataaatcattcagactctcttccggtttagaaacatttatgattacatggctggtttagtttggtttattatcggttcactctctattctggttctgatttctgacaacaaatcaaaggcaaaagttgtggatttccatccacaaaatttgggaattgggcctcaaaatttctttccaagggtggaagaaatctcaagcgagatctttcgacatttggtagtgttactgcgaaaaggaattgggcctggctaaggcccaactgtatactcttgctgaggcctgaccataaaagaagaagttatttacaaattaaatcagccaaacatgttggaccaggactcaccaactgtatataaagcctaacaacattttctccaaactgtaaatagatcaagactctgctgtgttgcaattttgttcccagtttcggtctacagttaaaaactactgattccctttgccataagagtgatcctaattaaactgattgagtaactcttaaaatggtggtggtgtgttttcagggatgtgaagacaactgatagtggaaatgcttcaagctgcgaagtctgttgtttccaactaagattaagaaaatggttccattctcaaataaggagaacaaaaaaggaataaaaaataatgtctgttacctctatcacactcttctctgctagtttcggtttagtaacgtctagattatcaatgtctggtttagtttggttctttccggtatgttcctaattttggtaggatttgtttggcttggttttatagcaagtatttaattaacattagctcaaattgcccttaatttattgaattttgttaaaaagttttgtctaaactttacactaaaatcagcttttcgtggatgttacccatttctcttccgtaatcgttaaattatgacataacgtctttgttttggtcgtatcgttcacgcaaaacttcacgattcagatctgtgtgtggcagaatttgaatcgaagcataggatcaatccggtaagcagccgtaacttgcaatcgatcgccgatctggatccgttaaaggatccctcgcagtccttgaagatatcggcgtcctccgccaccgggaacaggatccgttaccgttcaccttccgcttctgagctattggagtctggactagccaccggattatccggtaaccattctcctacttccgactctcatcagggacttgtgtctatcgacggaggaaaa

SEQ ID NO: 10579 - DNA, 3000 bp, Unknown
  misc_feature (1)..( 3000): cDNA_ID_2716108_gDNA_ID_2213664_Annot_ID_132624 3000 nt of promoter + ATG
gattacctaaagagcagaatgaacactattgctcccaatctgactgccctggtaggagagcttgttggtgctcgtcttatttcccatggaggtagtttattgaacctctccaagcaacctgggagcacggttcagatactcggagccgaaaaagctctctttagagctcttaagacaaaacacgccacacccaagtacggtttgatttttcacgcatctctggttggtcaagcagcaccaaagcacaagggaaagatctcgcggtctttagctgctaaaactgttcttgctattagggttgatgctcttggtgatagccaagataacactatgggccttgaaaaccgagctaaggtaacaaaattcttcaatagctttcctcttgttggtatctctctgaacaatcttttttcctccttcttaactgatgatgtttctgatatgtgttaaaaactcacagcttgaagcgcggttgagaaatcttgaaggaaaagatttaggtcgtctgtctggttcatctaaaggcaaacctaagattgaagtctataacaaggataaaaagatgggatcaggcggtcttatcactcctgctaaggtcacgatcattctctctgtttttgattcatcatcttttcttctaattttggatgtgtgtacatattgtctttgttcttgggattatgatgaagtgatcttgactgttttttgttatgtgcagacttacaacactgctgcagattctcttcttggggaaacctcagctaaatctgaggagccatcaaagaagaaagataagaaaaagaagaagaaggtagaagaagagaaacccgaagaggaagagccatcagagaaaaagaagaagaagaaagctgaagcagaaactgaagccgtagtagaggttgcaaaggaggagaagaagaagaataagaagaagagaaagcatgaggaagaagaaacaacggagacaccagccaagaagaaggataagaaagagaagaaaaagaagagtaaggactgagggagagaaaccgattttgagaaatctcttgagtgtaagattaataactgtttttgttgaattgcattttatctagaggaataggtgttttaagatgaaacttaaattttctgaaatcgtcattttgaatgatggattcatatttaaatccttttcacccgaactttatttttgttctagccttccagactctagattattaattttggaactcttttttcaatttatagtttgtagttgtacaatattcttcttgcatgatttatatatatctggaagaggaaagaattgaagaaaaataatatattctgaaaaaatcaaatagttttttgctactaaacgtgtctgtagattcaccaaataaaatactctttgattttgttttgattttaaagattttttacaggcgttagtatctttttcatgatcgtatttctctttgttgactatgcatgtttatctttggttattgtctggcaagattttaatcaaattaatgaggtcaataaaattagtatatcgtctacaagaatacatagtagttagcaataatgctgggaatgaatgaataaatagataatatatgtagctttaagtcataaaagaaataaaatggctaattctaaaggacagacgtaaatcattagttccttaagcttttgttccttgtttggtttacaatagagtcttgataaaggagcttctttgattggatagatgaagtaaactctcattacataccatatttcttattttatttgtttttccaattcctattttaatattaaaaaaaactcttagtgtttattttaataataaattccaaaattaggtgggtacataccaaatattctttacatatgctaagtaatatattgtttttgaccaacaaaattatagatcagttttaatattctaatgtcattgagaaaaccacttctttaacaccattggacctcttacacattaaaatctcccccaaactttatagacttatagtactccacaaatttttaaaattgaaaattgtgatagagaaaagagagaagaaatgagtacaaaatggtgctcagaggtttttaagttggtgggggctgaagaagagtagtaactttgagcctttttgaccgtattggtgttgcgtccaaaaacaattacttacacataataataataataacaaagagccaacagatcttcgtctgtttctatttattcctttttcttgtctgattcgcagaaaactaaagagagttctttttcaagtaaaattcgaagagcagttcaacgaatccttcttctccttgagacatttttacccaagttggtctctttcttccttcttaaacaatagtagagttattattggtctacgactctgttgtatatgtgtatgtatcaccttgccttttctccaaagccctaattgatttttctttcttctttttttgtgtatgctttaaaggtttcatttttaaaatcttcttggactccatttcttttccttttcctttatctttttgcctctctttgtggagtttttgaaatcatccctcatttcattcctattttcgttgtctctttgagtttgagtcagctttgtgttgtgtctaaattctaaacaagtttcagatctttaccttcctttgacttgtctcctgtcttaaaactagggtttaattttctttctctgttcaagtctcagatttgaccagcttggtccagaatttcgcttctcctcgatcataaagtaagtaaatttcaccaacccttttctctaagtctcctgttttagtcaaatctgatcttcgatgtgtttctagttggaatcaattttcttgtttgttttctgattttttctgtttcaatttttcatgtatgtgtgtgtgttgcagtcaaagttgattcaaagaggtttgattgagtcagagatctctcttttagaaacatgttgagcaaatgaaggtttgtttgatgagatg

SEQ ID NO: 10580 - DNA, 3000 bp, Unknown
  misc_feature (1)..( 3000): cDNA_ID_2685704_gDNA_ID_2213664_Annot_ID_132625 3000 nt of promoter + ATG
aaatattagaaaaaggtgaaaacttgtggtaatgcattatgttggtgtgttgtcaagataaaatttattgagcggctccatctacttgacagtttttacttgggaaggtgatttcatattaggtattttcatcagaaagaaaaatagagatacttgagttggtagatttttcatgtgagctttttcacaactcctgataccaaagcctttgtagattgctctttttggtttgaaacaaatgataggaacaataatgttatgttgatcgaagccttgaaattgaatatcaccatattcatttattgctctacagattgggatctgtctgctggtgcatttaatcacatggaagtctatagcttttcattgcttgttccttcgaaaagcatatatcttggtttaccttggcctagtgtttacttagcttctcttctttggagcttggattcatgagaagtgggcaccaataaaggtccaagatatttaggtgagatggtgtcgaaagctttactgaatttgtacattaggtttgagctttggaaaacaaaaaaacttagtatctatttttgattgttcggtattaataaacaaatattgtatctaaactccatcatcccactgtggaagcaacatgccgagaagaaaggtcttagaagctctctgtgttgttttcccagactccaaactaaacccgtctagcccgaatcaaaactttggtttctagtttgggatgtctttatcaaaccacagtaaatcgaatcaaaccaaaaaacgcagttccattaatgatcaaactagattaccaccgatgttgaaccaaatttagagaaaaaccggaccgcacttaattctactcggaaataaattgcgactttctttgattcacacaagaagataaacctactatgtctatgccaatggctgtaggattttacatggtctactcacttcgaatgctttaacagttaaacaaaatcgagtagaatatactgttcagtggtggctttctttgatgacgtcgttgggtttcaactttctatggtgttaccatcagcttcagccatctcacgttctttctcttgctcctctgcaattagatgatgaaagtgcatgtgttagttccataataaacaaacaccaacagatcactctattttggacttctatgatttggtatcatactaccaacagattcagtgaaatgttactcacttactcacgaaccacagactaatgtcttaattatcaagcttacatagaagatatcagtatgtagatacagttgccacttacccatgagtttatgcattgccttttgagtccgcctttcgagcttatcaagcttcttctgcacatctcttcggaggtcccagtttggcttctttggagcgatgttaacaaatgggtcctacaatgataacattttttgtaagcttaagaggcacaagtaaaggaaacaacaatgctaaacagagtcgcttttggtgatccttgtacagagaaaagaaaaactgtcacacacacctctttcttctctacagcaggtggaagtgcaacgatcggatcttcgaatttgggtagctctggtggcgctagtttaccatcctgaagctccttagcttggggaacatagtttctaaacttcatggctggaccactgtaaaatcaaagacaattcatatgaataaaaagggaatctacctcgaataatcaatcaacaaaaccaaccacctaagcaaagtatacacaacaatgcaacttgaaattggaaaaaattgttaggtaacagatgctgcaagagcaccattattgattctctcacaaacagtgatagtaaaggcgagaagcaaagcacaagagaagctcctagttatgctaaagccaacacacaacattaacaactccatgtgctagtcaagacaaacaaaataagcaaagaacaaagcaaactcactcttcttcgacagcttcatcctctccgtcttccttggtctcagacagttcctgagctgcccttagagctttaagtgcctctttacgagcagcagctttttgttcaatcgattcatcttcactagccattataacttcctgcaaaattaggttatcgacgtaaacatcgaacactagcccagcttcttcaaacactaatcacacaactacagagtataaccctaaacaacacgcaaaatcgtgattttcaggatccacggaactaatcagatgaagttttagcaaaatcagagctatactatgaaataaagttgaagagaagtatggaaaacgctatctacccagaaaatcaacgagaaaatttgaaaccgtaccttgaagcttcgagctctataaattcgagacaaatttgttgaataccacagagaaacaaagggattaaaaaagaaaaactattaagggggaagagaacaataaaacgcccacgtattaatattataaacgggccagattaaaatatccattcagtcaggcccattaatcttaaaacctaaaccctaactatggaagttatagaaataccccttacaatacgcggcgttttaagaaggctcggctcgtctttaactgctataacaacacactcttaaaaccctaagtgattgtccgtctccgtcttcatcttcttcctctctctcacgcagctgctttgattaactcttcaggtatttaatatctctcatcttctctcttcacggtgtttcacttttccattcttgctggagattgtggagtttcgaatactcatactcggacagagttttaaggctattgtagtttatctctctgttttttcttctcctgtatttcttatgtgatctaaaagtaggattagggtttatatggaatgctgtttctcgctagtttttaatctcaaaacgaacttttagtttaattagtgtgactcggacacgtatctttactgttctgagttaagtgttgtcttaattttctcttcaggtccagcttaagagttttgtgaagatg

SEQ ID NO: 10581 - DNA, 3000 bp, Unknown
  misc_feature (1)..( 3000): cDNA_ID_2716098_gDNA_ID_2213664_Annot_ID_132628 3000 nt of promoter + ATG
tggcgtgtagagaaaagcgaaacacactcaagataatacttcaactggcggctttatgttttaaaccgtctaaacccgaaccagatctcatagtgattaaacagcaagctatcatgtgtttgttttccaagatactcaagtcctaaacttgctagcttctgagaacacttgtcttgtcctaaccgtgaacaaaactttacgttatgtgacacgaagattctcccgtcgtaaggttttaacctgtctactaatctttcgagtccagtccacacgagtttatcaggcatgtggagaaagactgcacttgcgtatatcagatcataggctgtatctgaaccaaacttgctgaattccatatcatcgcctctgactataagaggtcgtttatgtagaagtccttgtgatggaagctcgtacctcaaagcagccattagagaaagctcgtccttttcaaggcagtgaaaatgttggggactaagatagcgaatgaaatgcaaacccacgcgtaacgtgccacatccaatttctagaacacgagagtttggtttaagactggatgattcagctaagaactcgaatacatcgcgcccacctgcccaaggttcaccatagttgctgtgatgctgctcaactagtaactcaccaggacatggaagagctgtgtggttgtttgcttcatctccttcgtaatgggatatacccttgtacctgattttccaacacagagaaagctcaagtcttcagattataaaaacagaacgggaaatgattatttaactactggttaagcaaagtcagtgactattaagaatcaagaaaagagcagaacgtaataggatctcatcaaagagcctacattgatgaaacaattctataacaacaatacaatccacagctaaatctttaagcagcaatcagattacctcacagatatggattcaaaagctgagaacaatgtcactttctaatcacttaaagaggaatgaagccatatagctagtgaatttcacatacatatatcttcaattccatctttttgttccgaaatttagagatggatttagcaataaccaaactttaagcactaagctaacatcaaatggaacctgaagacaattactagccactcaagtttccaacaataaaggagcttgaagctcagacaatagagaggaagtaaaaaaaaaagattttttgagaaggtgattactgtatcagatctgcaagttgttgatctctagtgcgaggattaatccctttacgaagctcattcttctgcatatgcaaaccgttggatctaatcagatctctaacccactcaatatcatcctgcgtcggagatatcctgtcctcaaatctcacatcaccaccgcttccaccgacagaagcttcaacggcgtcggtcggggaagaagataaagcttcaggacaggagcaagaggagaaagaagaagagaggaggaagaagacagcagctacaaaggaaacggtgagaacaagtacaggcatggagacaaagattcctttctgcatcgccggagaagaagaagaggaggaaaacgccattggtgaagacagaaagaggagagatctcagtgtgtctctggtcgcttaaggaaactagtgagtggaaatgagttcgtttaccaattatagtattgtcaatatttagttttactctaatcaaacatggtcattgcacgatcaacggttaaactgtcaaaagttttccttttttttgtcaaccaagtaatccttttttctttctaacaatattagctggaatatgagatgtgttaattagaagaatatatgtgactttaaacaagtgaatgattattactaaaatacaaatgaaaagaaaatgcataaatttttgttaaggattatttgtggttttagcataaatttattaaatctcaatagctaatttttgtgtgaggtcaaaaattatgtcacttatccaataagaaaatacaagaggattttgatataatcttatccaatcccaaacactatttcgattttatttactaaacgcaattttgtcctctatgggctgattttaccaagtctcgctcgagagcctttgagagaagagtttgtgtttcttaaggaaaaaaaaacacttttttttttttgtttcttcttcttcttcgtcttcttcttccaattctccaaacgccatcacgcctttggaaaaaggctgctcttttttgtttgtccttcttgactcttaaattaaattttgctcataatttccaaatttgtgctaaaaactttcgactttctagatcaatccgattcccaaatctcgttattcactcccgcccccaacgagcgattctagggtttctctctgtgtgttttgggttgctgaatcaccttgttactatcatcgatttcatctgaagttgagatttttaaaggtatgttgatgatttcgtacacgactgattccactttttttttgttgttgttattgttcagtttttgttctcctgttagaaattgagcaagtagttgaattaatcgtatatgttcaatggtgatgggtactgtgtatggatcaaaactgaagagtcttcttatagctgactagtgatgatgattttgtaatctatctcaattgagtgtggccttttgattttgatcttcttcttccgactattttccttttgatgagtcaatggaggattttgggagcttatcagctgttattcgatgtggataattgttgattttttttcttccggaatatttgagattctcgtgaagagaaagaatcttactctcagctggatctctatgtctgtcccttaggttcttatcactctactactaccagctttttcttagtagcaatattcggtttggtcttgttatgttttggatgatgatgataactagtctgcttgaagaagagattgcttgtccctcacttgctggttttttcccttttgtggttctcctttcaggctttcagaataatttgaaatg

SEQ ID NO: 10582 - DNA, 3000 bp, Unknown
  misc_feature (1)..( 3000): cDNA_ID_2716094_gDNA_ID_2213664_Annot_ID_132629 3000 nt of promoter + ATG
aggtgagaaacacgaggaaacgcaagtaagtcagagaaaaaataggtaccaaaaggccccaaaataaaccattgctggcatgtacaactaaaaaaaaaaaaacaagttacctgccagttgagtccagaagcagcactctaacattatctgtatgccctctcagcttcatactctttgaaccggttctagggtcccagacacgtaaaacctgcaataaataaaaaaaacttagttttaagaaatcaaaaacccaaaaaaattatccgttgttgttctcaggtatactctctgcaacttgggaatgtacgaataccttttctgttccaccagaaacgagcatcgttccggtatcattcatcgccaaagcatacacagactccttatggcctttcgcaattgttggtgtgtacccatgagatggagatgactgcacagagatattgttgcttgaaccaacagttcttaaacttgtaacaggaccatttgcaccatttgaagaactatcttcattagcgtcattaggtttggtaactggtgacaaagcagcttcaatatcccatataaaaacctccccaccaaggccaccagatgcaacaacattattctaaaagttgtgaaatcaagatagaatcagaatgcgacaatgagaagcacatatatcctcaaaacttgcaccaccataccaatcaatttttttcagtgggaactataaagaaaaaagcatgacaaatgagaaattacattttttgccgcaactgccaaacaagtaacatagtcagaatgctgacggagagtcctcgtacagactccatctgataaaccgtcccatgtctagatacaaaataattaagccgcatttagaaaccaatatggaattacaaaaacaaaacaaagtaaaatattggttcggctagcgaaacaaattcacaaaccttgaccgtagtgtctgaagaacaagaaacaagagtgctctcaccagccagagcagcgtcgttcacctgaccagtcaacatggggtttgaaattattagatgcacaatagaacagcatccacctcaggaaacacaggatcctaatcactgatcatccctatacaattaaatttcagtgtcaagaaaactatatacccagtcaacatgagactcaaatgtagctgagcagaaggtcgcatcctcgtcaaatgcccatctcttgagtgtaccatcacgacttccagtgaagaggtagctttgatcattagaaacagacgacttcaacacatccaagcaatttatgccagcacaatgctgcagcttgcaaataacataagaagaacatcatcaggattgagttgagaaggagatgtcttataacttcaaactatttcaagtcatgtcttaatgtataatacgaaggaactagaaaataaatcaaacaaagagtaacacaactcctgatggcaataaaccatattggtgtaaaaaaactaacctttgtatcgttggcatcatttaacacataagtaagctttttctctttgcgagtgcgaacagaaccgccattactgccggcacttccaacccggtgcatttcaaattattctgaaagcctgaaaggagaaccacaaaagggaaaaaaccagcaagtgagggacaagcaatctcttcttcaagcagactagttatcatcatcatccaaaacataacaagaccaaaccgaatattgctactaagaaaaagctggtagtagtagagtgataagaacctaagggacagacatagagatccagctgagagtaagattctttctcttcacgagaatctcaaatattccggaagaaaaaaaatcaacaattatccacatcgaataacagctgataagctcccaaaatcctccattgactcatcaaaaggaaaatagtcggaagaagaagatcaaaatcaaaaggccacactcaattgagatagattacaaaatcatcatcactagtcagctataagaagactcttcagttttgatccatacacagtacccatcaccattgaacatatacgattaattcaactacttgctcaatttctaacaggagaacaaaaactgaacaataacaacaacaaaaaaaaagtggaatcagtcgtgtacgaaatcatcaacatacctttaaaaatctcaacttcagatgaaatcgatgatagtaacaaggtgattcagcaacccaaaacacacagagagaaaccctagaatcgctcgttgggggcgggagtgaataacgagatttgggaatcggattgatctagaaagtcgaaagtttttagcacaaatttggaaattatgagcaaaatttaatttaagagtcaagaaggacaaacaaaaaagagcagcctttttccaaaggcgtgatggcgtttggagaattggaagaagaagacgaagaagaagaagaaacaaaaaaaaaaaagtgtttttttttccttaagaaacacaaactcttctctcaaaggctctcgagcgagacttggtaaaatcagcccatagaggacaaaattgcgtttagtaaataaaatcgaaatagtgtttgggattggataagattatatcaaaatcctcttgtattttcttattggataagtgacataatttttgacctcacacaaaaattagctattgagatttaataaatttatgctaaaaccacaaataatccttaacaaaaatttatgcattttcttttcatttgtattttagtaataatcattcacttgtttaaagtcacatatattcttctaattaacacatctcatattccagctaatattgttagaaagaaaaaaggattacttggttgacaaaaaaaaggaaaacttttgacagtttaaccgttgatcgtgcaatgaccatgtttgattagagtaaaactaaatattgacaatactataattggtaaacgaactcatttccactcactagtttccttaagcgaccagagacacactgagatctctcctctttctgtcttcacca

SEQ ID NO: 10583 - DNA, 3000 bp, Unknown
  misc_feature (1)..( 3000): cDNA_ID_2716090_gDNA_ID_2213664_Annot_ID_132630 3000 nt of promoter + ATG
ctctcaataagattaacttcatcgctcgcagccatttctgataaatccttttttttttttttgttattttactaatcaaaaacaaaaacccagatcgaattcagtaaaaaggacgagaatttgcaagtcgagaagtgaaagctcgaaactttgatttgggaaatttcttttctgggaaaaggaaaatctcctgcttttaaaaaactagagatcaaaatggggtttaatggttgagtgattaaaaacaaaaaaaaactgggataaacaacaaaaggcttaaaaagaaacaaaaagatatatattccgccaagaggtggaggataaggaatatctgcgtattttagcgtcggtaagagtctggggtaacgtgcgcgcataagtttggacgcgttgagggatgagtagggaggtgtgtgtgtgtgtgtgtgatcactgttgggtcatgggtgggcctcaaaacaaaaattatttaaaaaaaacaaattgttactttaatttttgtaaaaaccttttagtttatataaaaatgatattatttcaaagtgtcactaacaaaaaaagagagaatattttctattaagaaaatctaggaaaaagaaaagaattttgttaaaagatttagtatattcttgatcaatactatgcttattcgagttgaaaaatatagtaacaattattagatttcaacattttgtataaaaataatagtaccaattagtttaattgtgcaaattagatggagtaggctagtctttttcttaattagatcatgtgtcaattttattcgtggaataacttttaaaaactatgggccgggaaaaagcatttaaatttgtgtagagtgttgtctatcattatgtcattgttgataactcttgccaaataacgacaaaaaattagctaagtgtaattatgtcaagtaaattagattggtaattaaaaggggaaaaagcatatgactatttttagtaattataccgatagctttaactttataaaaccagttatctaaaatgttcctaattttgtttctcgttttttttttcttctaattatgagttacgtagaacggtagaatcactctgctaaataactggactgaaagaagtgtgtcaagctagtcaataatcaataaaaccatgtatgcatggtccttaataattgtatcaaatgtatcttaagaatatgcaatactgtacatgcatactaaacaagaattagtgaatgtttagttgagtgagacgattggatgctggaatgtctaatagctgcttttcaacgtgcttcttattgcctactctagctctgtctctctctaagctgtttaattgtgatgagtgtcacgatctcgctcgtgaaatttcatctaaaaagtaatgtcggtaatatataagatgtttaattagaataaagcagtgtcggtaaaacgtttaatgaaatgaaaacagtaaggtaaataatgttgaaaattagtcaactaggaaaaacagtataattgattttttattagaacaataaaaagtaaaacatccaaaaacagtatgtgtacgactgacggactgagacttatatttttctagatgcttttgttaagagtagcatcattgtatcaccatccacatgaccatattcaacacaagcctgtatgtgcatatgtgagtgacgatagacataacctgtatgaaatatataaatatttgaagagttccgagttagatatataggtaacaaaaaggatatggagaggcgtgtggcttgtaaaatactaaaggtttatagcaaaaatatgataaatgaagatttggaagcattagagtttggcggtcaacatctatggacaacagcttgtttctactcaaaatatttattttataaaatagagtaatttagtggcttgtcctattattagggtttaaatttgatcacctcaccagtccctatctcctttaataattctttgtcattttcctctaacctttttatctctttcccctcaatttgttttattcatttatcactatttaacttctttaataattaacttttgtttctttagatcaagtacataaacgagtagatggatcatggatgttacacttatttattacgacgactattcatcatcatcggtctccactattctctcggatttatatgtttttccgattctcatttacatgattttcttttttggtttttttctcctcacattaaacatacgactaatctacaagatcattaatcccaaaaaacaagtcatatcttgaacaaaatcaaacctacaatcacatcctagcgtacatataattatgttacttaatcctcaatataaaatatattacacctaaaattaatattttaaaatataccattcgcttatcctagacattccaagtaacacaatatttatttttaatttctcaaattttgttctcgtctttcaatttctcaattattaccactggatttctaaattttttcacaagaagaatgtttcatactagccacattttgttttcttattgggctccgaccaaaaaaatactattgggcttactatttttcttttaactaaaatataatgggcctattcatcttatgaagccctttaagtgaccatttacgaaaaccaagccccttccatggcatctcgtgattctcatcccttaaacgaaatcgaacggctacaaagtcattagagagtctggtcaaacaaaatcattagagaggaatccaacggttaggagtattttaatccaacggctgtaaatcaattgacgtacatatttgtcccgatatatgttacaaactttttctgagcttcctccctccattttcctattttcagtaaacatcaatcaattaatcatcatctctctctcttattttcaaatttgatttcaaaattgctctgtgttcaccggaaattaaaaagcaaactttcttagtctttctactttctagagctcaaaaactcaactcttacagcaaccagtaatg

SEQ ID NO: 10584 - DNA, 3000 bp, Unknown
  misc_feature (1)..( 3000): cDNA_ID_2716080_gDNA_ID_2213664_Annot_ID_132633 3000 nt of promoter + ATG
gtgtatattgagataaaaacaattttgtttaggtaggttttacccctttccgaccgatgaaatcagaaatcttccccgatgtaatggcgccgagcactgctcccatattcaatatcgatccgaaaaccgaaaactagattccaatagagaaaaaaaaaaaaaaaagattaagcaaaatattgttaaacatgcatctataaacgtagaagacttaatcaatttaatataaacctgggaatatgataaattaagctcttccataatcccaaactgtgttggagcggagtatcccacctattaaaaaacaaacacagattttctcgtatcaaaaagattaatcgtcacaaattcttaggttctcatcatcttttatttccaaagtaataggtgtcgtaaaagaatcttacgcatgttccaaactcgtaggaaccgcaaacggcaatgatcgtgcttagataaaccatccatgatgcttcttctgagacgtcggatccattctccggcagcagcaacggctcggatttgtcgttccttttctccatgtcgtcttttcttgtctccattttcttcgtaaaatgccctttgaattcaacgaatacttatcaatttttatgtagataaaatataggatatatgataagaaacacaagatttggataactcaccggaggaaatgagaaggcaccgtgtttttagatctaaaaactctgatttgttcctaatttattgatatatatcatgtctatatttatctctgtataaatcagtacatgtagctaggctggcttagctaaaacccatgcaggataattttggacgaattagacaatttgaattaatttattcgagattttatgaaagtcccaactcccaatgcattattacacgttgggggttctctatagttttaatgttgattgactaaacttgaattttcttaagtaagataattcagaagtaattacatggtatttcatagtaataatattcactaatactttcctcaaaaaattcacaaatactatgtacattatggatgcattgtgttactgggtaagtaagatgcatggtttgttattttgttttcctttttggtgatggtttatgacatgcacagtaacgtgtaattgactcaaaggtttgacccgataagacagttgttttccacagatccgatgctcatgtgttttttcctggcccaccgcaagatccaagctgtgatggatagtttttttttttttttttttctataaatgtgatggatagttgatactataataatttctaatttgggagacaaaatccaaaaaaaactctagatcatatagtataaaactacagggattcaaaagacagtatttggatttgtagttggccatgagatattcgtttccactccgcattaaccacataagtaatgaattattcttcttctcgtcatatgggctaatatcattcaaattcttgcgaatgtaagatgtatagaaaaaaccgcccactatagaaatcatcaaaatctatgaaaatgattttgtcgcggaagttgaactgagtcattacaatttggacccagcgtcattgagcaaaaacctatttaatcgagggtacagaaagttagcgtagggactattgatagattgatagaacagaacagtacctaacaagatttacataaatgatcgatgtcccctctcttatacaacaatgaagtattgaacaatcacttccaacatgattgtggtccgtggtttaactatccaaaacttatataagagtcacttgaaataatatttgttaatcacaaaaataagaatcataaaaataaataaacggtgcaaagcaataaagccaatgcaggttttaatgcaggctttctgcatcatatacacacagaaaatattctattcacaagaaagaaaatacaaaacagagtactacttgaataaaaacatatagaaaattaaagataattactatcaggtcgcaatatatacaagaatgtcaatatctacaattgattagtaacagtaaatgaaattagtaaaactaaaactacttagattactcaagtttgatcttttataaattccttatcaacaagataaagaaagtagttttttaaaaccttaaaagacctaaattaggaatatgagtttggataacgagaccgacagatgaagcgatttttaaggacccttaaccctttctgccataaatgaatgaagctaagagaatgcctctgagttcaatccaaaaagagaaaatcaaaagcatattgccaaatataggatttagtcattttagagtctaactattagcttaacaaaaaaactactagtagatataccattggtcaacggaaaacaattaaattagtaaatcaaattttaaacacacagacaaaaccttttctttcgggtgtctcgagacgaacaccaacttcaaaacttctttctatttttatttatttttggtttaaatgttaacttctttctatttcctttctatgatcctcttctctatttttaggttttcaggtttctgagaaaatcttaaaagtgtcctaccaacactctttcatggcggtagaccaaagcaaagaagcttctcccgtgtgttgtgctcttccaatgtaatcattcaatcaaatcacttttttctctgtttgttcttatatttgatttgagtttttttttggtagacatgatattaatgtctagaagtttatcttctgttctgttatgattttcattgatacttaacgaacgtttaagcagaattaacgaactttccctgaattttcaccgattttctcttaatttcccgcaaaatttacataagaacgacatgtttagtctgttcttttcttttgaatctcccgaggcaggtacaactctaaatattcaagttatgtcactgaagaagatccaaacgacataaatcatacgtcaaaacataaaagaaccaacgcgtttcttatgaattctgcttcagctcatg

SEQ ID NO: 10585 - DNA, 3000 bp, Unknown
  misc_feature (1)..( 3000): cDNA_ID_3099737_gDNA_ID_2213664_Annot_ID_182044 3000 nt of promoter + ATG
gttgaaactaagatgtagctcttcaagattgagatactgagatacagattcggggatcgagccattgaattcgttttgagcaaagtttagaaacttgagactagacgatgaagacatgtttccaaactctacaggtcccttgagatggtttccctctaagttaaccctttctaacgtgggaattgtgaacaagaacgtagggaaagatccagttagattgttgaaactaagatctaactctatgagattgagatattgggatagagtatcagggattgggccatcaaatttgttttgagaaagaaatagatattgaagcctagtagatggtgaatacatattcctaaactctataggtcccttgaacatgtttccctctaaattagcccaacgtaatgaaggaattgtgaacaaagatttaggcaaagtcccggaaaatgagttttcaccaacattaaaatagtccaagttttggaatccactcatgtcaagtgggagcatggattcgaaggaattattatagaggttgacaacgagcagttttgttaaattggagaatgtaacaggaatattgccactgaatttgttgtgtgaaaagatcaagtattctagttgggttaggtttcctattgaagctggaagttgacctactaacttattatcccaaaggtcaagaattgtgagtcgagaaaggtttcctatagaaggtggaacttgaccaactaaataattatacgaaaggtcaagaagtgtgagacgaaaaaggtttcctaatgaagaaggaatatctccatagagactacaattactaagggttaagttatgaagatgttgaagtttgaaaagaccactatttggtttcaatgagttattaagaggaacatgactaaggttaagtgaaatcacctcgctagatatagcatcgcacgtgacaccctcccaagaacaacaatcaatgctcttgttccatgaacttaacgatacatcataaggaatttggttggattcatttacccgcggaaactcgtgtttgaactccagaagagcattcctttggtcatggcggcaatggcgaagcgtaggagaagcaagagtgtgtagaaagaatgaaaccatgaagaaaaaacagaagcaagattggcttggaatcatcattacttctttttttttttgttaggagtttgtgtggtagtttataggttatcctgatatggcttctttggctctgttcaaaaagcaaaaaaacgaaactcagttgcttaatttgacttgcgcaagtctttccaatgctctctttgactaatgatttggcctcttgccataatatccatcacaaaattgaaaactctcttcttcgttattaatgtcaagttactttgggtttctataggtcatgagtttgtatttgggctttttatttgggccagatagaatcagatgtaaccaagtctatttaatccgctgtcgtttttaaatagtttatctattttttttttataagaaaaaacaaaaatgattaaccctatctaaagttgttaaaaccaaatgttttagcaaatctaaccaaatatttttttctttgggaagctctaaccaaaaatgattatccttggataattactcaattagtaagatcttcaagaaactgatttcccccattattattttatttatatttttcggtttataaaactccagtaatttcaaatataatcctctgctaccgataccagaatccacacaagtgaaactaaaacaatccaacgatgtaaacaacctcacaatccacgtggacgttcaagatcacacatgcactagcttcagatattaagagtgaaacaaaataaaaggaagaaataaatcgaaaaaatggaaaaaagtgacaaatctggaaagctgattggctgaagtcgtccatgtattcaagtttcgcggcaacacctctcttctcatttttctcattccctaattcttctatatctctctctctttctctcacttcctttttttttttgtttttaaacaaataataatctttctttcttcttccttaatttgccttctctctctctaaaacccttgtttcaaatattttctcatcgatctctttttgaaactaaaggctcgagctttctctatctctctttcgaacccaccggtggttcgggtatctctctattcactcttcaagtcacctaattggttagtggatctgcttcgattagggtttttaaaaggcttttcctttttccgtttcaaattttttcttctttcgactctcaaaattttcccggattttttttttggattctttaacactttctgtgttagctctttttcttttgactcgagttccgttttttctcagctgaggtttagtgggtatttttggaagctcactcgattgaagttttttttttttttttgaggaatcagtttcagatttgtagaatctgcgttttatttatatttataggttagcgattgaagtttcgaattcgattttgttttactatctgaaatttaaacaattttctcaacacattttctcaaattttgtcaaagctcctgacttttgtggatgattttcgtgtttcttcactgtgtgtaattgattccttaatttggtgtgttttttaaaatacccaaattctgattttcgttaatatttcctctcatctcgattactgcagctatttatcttccccaacactgctttttactgatccaagaattggttctactcttttgttaaaaaacgtagagttttgatttttcttagctctaatccctaaaccctaaaccctaaaaacgtcttgatttttcccctggtgaaatgttgaaattcgtagtttgtacatgtcttagaggaagccaaatttgcttatcgacttagtgtcgtatcttgtccgtatcagtttaaagtgtgtcttttgtcacaattgcattttttggtttctaactatatatttgaatatacttgtgcagagaaacgtgcaa

SEQ ID NO: 10586 - DNA, 3000 bp, Unknown
  misc_feature (1)..( 3000): cDNA_ID_3037363_gDNA_ID_2213664_Annot_ID_182042 3000 nt of promoter + ATG
aacctctataataattccttcgaatccatgctcccacttgacatgagtggattccaaaacttggactattttaatgttggtgaaaactcattttccgggactttgcctaaatctttgttcacaattccttcattacgttgggctaatttagagggaaacatgttcaagggacctatagagtttaggaatatgtattcaccatctactaggcttcaatatctatttctttctcaaaacaaatttgatggcccaatccctgatactctatcccaatatctcaatctcatagagttagatcttagtttcaacaatctaactggatctttccctacgttcttgttcacaattcccacgttagaaagggttaacttagagggaaaccatctcaagggacctgtagagtttggaaacatgtcttcatcgtctagtctcaagtttctaaactttgctcaaaacgaattcaatggctcgatccccgaatctgtatctcagtatctcaatcttgaagagctacatcttagtttcaacaatttcattggtacaatcccaagatctatatcaaagttagccaaacttgaatatttttgtcttgaagacaataatatggtaggtgaagtaccaagttggctatggagattgacaatggtggcactttctaacaattctttcaacagttttggagaatcatcagaaggtcttgatgaaacacaagttcagtggttggatcttagttcaaattcatttcaaggaccatttcctcattggatatgcaagcttagatcgttggagatcttaattatgtccgataatcgcttcaacggctcaattcctccatgtttaagcagcttcatggtttctcttacagatttaattctacgtaacaacagtttgagtggacctcttcctgatatatttgtcaatgcgacaaagctactatcacttgacgttagtcgcaacaagttggatggagtactaccaaaatctttgatccattgcaaagctatgcaacttttgaatgtgagaagcaacaaaatcaaggacaagtttccttcttggttaggatctctaccgtcattacatgtcctcatcctacgatcaaatgagttttatgggacgttgtatcaaccccatgcatccattgggtttcaaagtttaagagtcattgatgtctcacacaatgacttgattgggacgttaccgtcattctatttttctagttggcgtgaaatgagcagattaacaggagaagatggcgactttagactttctgaggctccatacatgggaaaagttttgaatgctactgcattctttgttgattcaatggaaatcgtgaacaaaggagtagagacggagtttaagcggatcaacgaagaaaacaaagtcataaacttttctggaaacagattttctggaaatatacctgaatccattggattgttgaaagagttacgtcatctcaacttgtcaagtaatgcattcacaggaaatatcccacaatcattggcaaatttgatgaagcttgaggcgttagacttatctctgaatcagttgtctggtcaaattcctcaaggacttggtagtctctcgtttatgtcaacaatgaacttctcttacaactttcttgaaggtccagtgcctaaaagcacacagttccaaggtcaaaactgttctgcattcatggaaaaccccaagctcaatggtctcgaggaaatatgtagagaaactgatcgtgtcccgaatccaaaaccacaagaatcaaaagatttgtctgagccggaagaacatgtgattaactggatagccgcgggaatagcttatggtcctggtgtcgtctgtggattggtaattggacatatattcctttcacacaaacacgagtgttggttcatggaaaagtttcgtcgaaaaaagcccaaagtagtcaccagaattgctcgtccctctaagcattaatttgtgacgtatatgtttgttgactagcgtatattgtttattacaacagcttgtatatttttaacttatattacaacagccagcttgtgtaatcaattgttcaattttttttctttattcaacaaaagaattcatatattgttatatattactgactacagaagctgagagaagaatatgttcttacaagttgggatgtctatgagactagaaccaacaaggatgtctcttgctagttaatttatatgacaaaaggctgaaacatgaacttttaaagatgattccagtcttgattgcaccattaaacgtatcataatccagcgtcaacctcacataagccttcttgtgaacctcacgcaagccttactggttccagtctgatcaatgagttaaagtttcttggtcttatttaacatgtttagaaaatattcaactcacttagtttgattctttgaatcaagttttcagttattagttccaacttgtaaaaatggttgcagaacaaaatgatgaggaagttttttagtatcacataagtccagattcaagtttttttcaattgtatctaaaacacacacaactttcagattgaataaaatctgaatttcattctcagcagaggctaatataaaaatgacaaaagaagaggaggaggataggagctatatgtctactatttttatttttttagccaatgagagagctccacttcataccccacttttaccaatcgagcgatttcacaaccagtctcacccatgtcgcgttgagcgcgtgtctacgatttctaaaggggtttgtccacagaaatcatgccttttttgatccacgcaactcactctcaaaaatccatcgcgtgtcttattttttttggttttcttctctaaaccaaattaaaccgaaccgagatcaatttgaatttcaaaaccaatgtaaacccatcaaacccatcgctgtgaaaacaaaaagctcggccactgtaacaacaaaaatggagacgacacaacttggaagagaaatcaactctaaatagccaagagaatg

SEQ ID NO: 10587 - DNA, 3000 bp, Unknown
  misc_feature (1)..( 3000): cDNA_ID_3099721_gDNA_ID_2213664_Annot_ID_182041 3000 nt of promoter + ATG
ttgaccttagttatgtccttctcaacaactctttgaaaccaactagtggtcttttcaaactccaacaactccagaacctgactctcagtgattgccatctctatggagaggttacttcttcactaggaaacctttctcgtctcacgcatcttgacctttcgagtaatcagctgacaggtgaagttctggcttcggtcagtaagctaaaccaacttagagaccttttactttccgaaaacagttttagtggtaacattcctacttcatttaccaatttaacgaagctttctagtttagacatctctagcaatcagttcacattggaaaatttctctttcatactaccaaatttaaccagcttgtcctccttaaacgttgcctctaatcactttaaatccacgcttccatctgatatgagtggactccacaacttgaaatattttgatgtgcgtgagaattcatttgtcgggacttttcctacatccttattcacgattccttcgttacaaattgtttatttggaaggaaaccagttcatgggacctataaagtttgggaatatatcttcatcttctaggctttgggatctaaaccttgctgataacaaattcgatgggccaatccctgaatatatatctgaaattcacagtctcatagtactagatcttagccacaacaacttagttgggccaatccccacttctatatcaaagttggtcaaccttcagcatcttagtctttcaaacaataccttggaaggcgaagtgccaggttgcttatggggattgatgacagtgacactttcccacaattctttcaacagttttggaaagtcatcatccggagctttggatggagaatcaatgcaggagttggatcttggttcgaattcacttggaggaccttttccccattggatctgcaagcaaaggttcttaaagtacttagacttgtccaacaatctcttcaacggctcaattcctccttgtttgaaaaattccacttattggcttaaagggctagttctgcgtaacaacagcttcagcggatttctcccagacgtatttgtcaatgctagcatgttattatcacttgacgttagctacaaccggttggagggaaaacttccaaaatccctgatcaattgcactggtatggaacttctgaatgtgggaagcaacataatcaaggacacttttccatcctggttggtttctttgccatcattacgtgtcctcatcctcagatctaatgcattctatgggtcgttatattatgaccacatatcttttgggtttcaacatttgagactcattgatatatcacagaatggcttcagtggaactttgtcacctttatatttctccaattggcgtgagatggtgacatctgtcttagaagaaaacggctctaatataggtacagaggattggtacatgggcgagaaagggcccgagttcagccatagtaattcgatgactatgatatataaaggagtagaaacggacttcttgcggatcccatatttcttcagagccattgacttttctggaaacagattttttgggaatatacctgaatccgttggtttgttgaaggaattgcgtcttctcaatttgtcaggtaactcattcacaagcaatatccctcagtcattggcaaatttgacaaatcttgagacattggacctatcccggaatcagctatcaggtcacatccctcgagatcttggtagcctctcttttctgtcgaccatgaatttctcccataaccttctcgaaggtccagttccactaggcactcagtttcaaagccaacattgttctacattcatggacaacctcagactctacggtcttgagaaaatctgtggaaaagctcatgccccgagttctacaccactagaatccgaggaattttcggaaccagaagaacaagtgattaactggatagcagcggcaatagcctacggacctggtgtgttttgtggattagttattggacatatcttctttactgcacacaaacacgagtggttcatggaaaaattccatcgaaacaagcgcagagtagtcaccacaagtgctcgttgaacaccatcacctctcacaatttctctgagtgattgtgaaacgtatatgtttgttatgatatctgtcagttgtgttatgcataaactctttgtctttgtaattttctactttatggtattgtaagaaacggctttggtggtatctgatcttctatatgttgggttgaaaatgcattcagatttttcttcctagtcaaatctcaacttgtcataagaggatgtttcaattgtagagccaaatggaagttcttcttcttctaaatcacagtatgaaattctccaactcgtgttttatttcattctccccaaagtttcttgctccgctcacacgtcaatcttgctgtccctgagtataccaaattcgatttggagattcaagataaaaaataaatatgatttggaccagtgcgggggttgttatgcatctatgcaattgtttttgccattttgatatgggtaatgtgttgtttcggtgaattttacatactaggagcttaagatctactttcataactgatgttgcctgtaatatatttctgtgccattaggaaagtcacaaatttatgttttacttctaaatgtatccataaactgcctgagtttttcatggcttgagtgtgatttttctccatattttgtactagagcgagttcatcgcagagtgctatgccaggagggcttatatatcaggatttactggaagtgctggtaccgctgttgtcaccaaggataaggcagctctatggacagatggccgctattttcttcaggttttgatcattatcgtcctttaaaattatttgattgccatctcatattgaaaggaaatgtggagtttcttatctacattctctgcaattattctatcaaaggcggagaagcaattaaactctagttggattctcatg

SEQ ID NO: 10588 - DNA, 3000 bp, Unknown
  misc_feature (1)..( 3000): cDNA_ID_2716029_gDNA_ID_2213664_Annot_ID_182032 3000 nt of promoter + ATG
ttccctcttggctaataatgtatacaccttaaatggaaaaaatatccggcttttctataaaacctcggggattagaccggtttcggcctaggattaaccccggttatcgacaaaatattaaactattaataacaataaattcaattatctttgccttatccacaaaaccttatcagaaaattctatgcataacctttttgatgtcaatgtatagtgtatagaatcaggagaaacatttaccttgaagaagtgtcgataacagtagcgggaatacggtcagggaagaattcagaaggtaaattggtgtaaggtaacagagaagggatgtttggatggaaagtatttcttgctgcagccataatcaagcttgattttccactgcccttttcaccaaccacaacgattcttatcggttttggcgagccactagaatctcccacacccatccacatcatctgatctttgcaaacaacatcaaatactttcagaataaacagatactgatcatgagactgaacacaatggccaatctcaaattactaaacataaccctgagaactttgagactcaagaatcaagattcaggtattgtaagttgaaaaggatacagcttttctacaacccacaatatgtaattactgaaacagagaaagagagcaaatgatcagagaatcttacagtgtctcagaaacctaagatatcaaaaggcgttaacaaagcttattcttcttattcttctacaactatgtcatgtttttcttctttgttatttcgtctaatgttatatattgattaatttatcattagccatttccagtaaattagccatgtgtctacttagtgaataggttttgttttttaacggtgaaattggcgtttgtggaagagcatcggacgaaggagattgaggatcttgacgtggatacaactggttttcttagtattcttctgtttttaccttttttgggttcaaagcttttaattgcatgcattaatttgaatatccttatcttgcattataataataatatagtttctttgttaatatcccttttaatttatacagacaaaatttaagttacaaataaacacataacaatgggcatcaaatctgaagaacataataacacagtgcattagtagatatgttgttagatttgaattgttattaaatatatataattaagtaacacattcatttatttttaagggtctaatttttatcgcacatttatcaaaatacacctcggcaaaatcttgcagttactagtagacttgattgtatatgaaaaatcaaaaaatgtaattttttagtttgaaatacgaatgacttgcattgtcaaaaaaataaatatgaatggcatgctaacaacggagatgtacataggaatgtattatttgaaaatggcgggacattaaaattatgaataagacacacagacatatcgcaatacaaaaaaaagtattagatcaaagcccattgggccagagtagttcagtttgagagcccactttgttcctcagagtcagagagctgtgtgacggacgggagaatcggaaaagcgcataaactgataaacattaaagaatcggacgatgtccggcgagaataacactatcaccgaaacacagaaagtctctgcttctgtaactgtaagctcatcaaaattttatatttctttgcatgcaacagtgtgcgtttgattcttctgatctgttctctgttgttttatttgtgacggtcgtagtctgttgttccagatcaagaccatgccaccgtcgaattcgccggtaaaaatattaatattttctaatattttcggtttcttagatggattgatagttaaacatgcaggaaagaaacgatttcatttagaattgagtatgttgttgatttagctaagacgacaagaatttgtttgaatttctttaactgactgaccactttatatttctgcagtctttacgttacttgtttcattgtttgtcgatttgatcagctaggggcgataaatttttaagccaagctgttgaagaggcatatattggagttgagtgtggtgatggttatccgtttgggctgttattgttcataagaacgatattgtagtgagctgccacaacatggttttcaaatacaaagatccaacggcacatgcagaagtcatagccattagagaggtagtaatcttcttcaagtaacaaaacaaaaatgacatgtttctaattatggcgaacacacaggcatgcaagaaactgaatgaaattaagctatcggaatgcgagatttacgcatcatgcgagccttgtcccatgtgttttggagccatccatctctcaaggctcaaggtaataagaactttttgtttcttctttctgaaacctcgtcttgattactttgtaaacagagattggtgtacgaggcgaaagtcgaagcagctttagccattgggttcaataggatcttagcagatggtgtgagaggcgttgggtgctaccataactctaacctagagattacaaaactcgatctgagtatcgccgagcaagtgtttcagaatacaaaggggaagttcagtttatcgtaactcgtaagctctttttatcttctttcttttcttcatcagaaatgtatttgcttaaaccctctttatcagttactgttaatgttggcttgtgtttactttcgtccatttagaaattgtatgtatgtatgtaatatactttcttcttgcaatgccatatatatcaactttcttcttgtaattttatcattttatacggtttaaactttaaaccaatgtctgtgtaccaaatagagagagaagcatcaaatctcagcataacggcgatgttaacgccgtcaatattgacgtctttttaaactcccgaggcaaaatcatatgatcgctttacggatttcacctacccaaattgtcttcccagaggcgaggacacacaacctcaatctgttcgtcgctgtcgcagatcggagagatg

SEQ ID NO: 10589 - DNA, 3000 bp, Unknown
  misc_feature (1)..( 3000): cDNA_ID_1029967_gDNA_ID_2213664_Annot_ID_182026 3000 nt of promoter + ATG
caaaattttgagatttactatctgtgtgtcctccatttatgtcaatttcccaaaactatatgaagaattttttaatcagtttggaataatctgacataaaaagttcctaattttaaccatagagtccaaagtcttgaaatttaactcatgagctgtccattcaccaaaaattactcaaaattatgttactttcttgagaagactctgacttctggtttacttgatattccttgatttcaggtgtttactctgtaaaagcagatgtagaacaggggagagttactgttacagggaacattgacccagctcttctggttaagaaacttagcaaatcaggcaaacatgccgagatcttaggcggtggtggaggaggaggcggcggaggtggaaaggggtttcctaatctgaatgggcaatttgcaaatctcaacatgggtggaaacaataagcctaaaggtggaaaagagagtaaccaagtcaagggtaaagctggtggtggcggtggaggaggtcagaatcatggacatggtcagccaatgcaattgaatcctcaacagattcaacagatgatgatgatgaaggctgctcacggtggtggtggtggtggtcagatgaagatgccgcctatggcagctaaggatcagaagaagtcagttaagtttgctgatgatgaagacgatgagtttagtgaagatgattatgatgatgaggatttcagtgaagatgattatgatgatgatgagttcgatgatgatgaagatgatgatgatgagatgggtcatggtcatggacatggaggaggtgggggtaatcacatgcctcctaataagatgatgatgcctaacaagatgatgcctcagatgggtggtcatcatggtaatggtggtggacctaagggtcccaatgagataatgatgatgatgaatgggttcaaaggcggaggcggtggaggaaagaaaggcggtggtggcgggtttgagattccggtgcagatgaagggaatgggtgagggtaaaaatggaaaggatggtaaaaagggtaaaggaggagagaagggtaagaaagaagggaaagagaataaaggtgggggcaaaaccggaaaaacagatgccaaaagtggtggtggtggccttctagggtttttcaaaaagggtaaaagtgggaacggagatgagaagaagagcgctgggaagaaagatggccatgggggtaataaggtcaaatctcatggtgggggaggaggagttcagcattatgatagtgggcctaaaaaaggtggtggtgggaccaaaggaggaggccatgggggccttgacattgatgagctcatgaaacacagcaaaggaggaggaggaggaggtaacaagggcaatcataatcatagcgccaaagggattggtggtggcccaatgggtccaggcggtccgatgggtccaggcggtccgatgggtcaaggtggtccgatgggtatgatgggtccaggtggtccgatgagtatgatgggtccaggcggtcctatgggtccaatgggtggccaaggcggctcttacccagcggttcaaggcttgccaatgagtggaggtggaggatattatccagggccgcctcaggcaagtcagcaaatgaaccaacaacaatatatgcaaatgatgatgaaccaacagcagcaacaacaacaacaacaacaagctgtagctcatggtggctatggcggtggtcacggtggcgacatgtaccatccgatgatgtacgctcggccttatcctgcagttaattatgctcaccctccaccaatgccgcctcctcactcggattcttatactcatatgttcagcgatgagaatccaggtagttgtagtattatgtgatcatcttttgtaatgttatttagaatatggacatgtatgcttgtcttagtcttatgtttttttttttggggatgtccttatcttttttactttggaggattggaaacaaaatgtgctttaattttgttagtggaatgatgtttataatatctcgatttcggaaaaagaatggttattggttattaggttgcagaaaaagtaggatgtatgttatgtagtgtttatcttagtgtgaaaaggatgttgcagccgcctatatagtaggtataacagcattatcatttatgataatcaacttgtatagtgtgccactactgttgtgtgatcacaccatattaaatttgacccataaagtaccaacctggagactcatgtgttgattatgatgtttcgaaagtaaaataatccaaaaaagtgtggagaaaactttgagaactatccattgtgttcgacccagttattttcgaaaggtcaaattagtgtatgattcgagaaatcactacagttgttttcactagtaagttagtaaccgttgtgtctcttatcaaaacttgaattcatattttggccaatatagtacaatattgcagacaatgtttccatttaccactcctttgccaatgggcttttttagagtagcacaagtaatactttggtataatctattgggcctgaaagagtggcatgccttagccttgtaataaactaatcccggtttaatcagtcaatcatattaatatgataccacttactaatacggaaaacttcccttctatgcttaagtcaagtcaaattttatgacaaaaagactccaattcgtaacaagaaaaattatacataaccaatatctcaagagatttattcttaaaccgaaataccggtttacatagtaccgggtgggtgattatacgtgtcttgaccaatcacattacagagactataactaaagagagaaattaatggatacttgaaaagaaaaaaagaaaaaaaaacgctcgtcttcttcttcttcttcttcttatattacttcttcctcccacacagacaaattttgtaacgaagacgggatcgcgataagatcacggtgatcgaaaagccctaagaagtattttcaagggaaagggacttaaag

SEQ ID NO: 10590 - DNA, 3000 bp, Unknown
  misc_feature (1)..( 3000): cDNA_ID_2992756_gDNA_ID_2213664_Annot_ID_182025 3000 nt of promoter + ATG
caccataaatggattgatatatagatattcattttcaaaatacagaatttggaaattgagaggataaaatttttaattactgcagtggatttgtgtagagcactagatgagaacataggttaggtccaacgtctataaagcaaacaaagttcataaaacaacagtttgatttggatactcattggcatgtgcttcaaaaataccccacatcttataatggttccaaaacattcacaattttattgattagtcaaaggtgtatagtagtggcgtactaaaagcaaataaaaatatcatttttatgataaattctatggaaaccgaaccacaaaggaaaagttaaagcctagtttcctcttaaaaataaaataaactgtagaaatattttaggaacatagctatgatactttcagtatgaatattatcttttagggactaacgtgtgtcatttttcttttgtcttcaattagatttaattcaaagatacctatagctgagcttttaaaatctttataaactgagttatacgaggtaaataggacccaacgttacaatttttcttaacgaattaattctaacgttctcttataattataacagcaatgaatttgaagttttgaacaataagaataaagtaattaaagaaataaccaaactgatatgtgacaaaagaaattaaactgacagcaatgttcgtcacgaggttggttttcttgatataagacgaaaaaacaacagagaaagttaataattttatctataaaaaagaagtgtctaaaatacctccgaaaatgattgctcaaaaaccctttaaaacaatgctaatatttatcccatctttttctcttatatatttagctttcgtggttttcttttattttctttggtctagcctttgtttttagctttcgtgttttatttgacttttttcggtcggagaaaaatttgacttcttaaggttccatggaccgacaccatgtacgcggttcaattcgatgacatgtgaatctatgcaagcttagtctgtgtaatttgtaattgtaggttcgtagagtatgtgagattcgaactatgaatagttttttttttttttttttttaaacttaaatcagttgattttagttattttccagatttgtcactttttgtataatcttaccacagatcctacacgtgtattcattctatctacctaacgcttactcacttagtgtggggattattttaatcttagtaactaaactcagtcaaagtcgtataaaatttaaagctgcactatgagaattaaaataacaagcacaaaatatcagtagtctatttattttcttatggaagaaattaatcacttactattatctcagtgaagtggtgcacatgcgtcacatgcattagcaagtaaatcgattttattgctaacatataaacccacaaaatatttcaactatacaattaaatagttcattaataattgatataaatcggaactaattggtggttgaaagctggcccaagaaaactctatctatcctccacagcaaagagtggaagcgacctacctgtcttatgacccattaaaaccccattaacattattgtaccctttcctgcttatatatttcgatttaaattcaattatacgtttgttattgtttaattttctaatcgagttttctaatcgagttttcaaaagatttggtttgatactactagtaaatttaatcgaattatacaattttttaactaattgagctaaccacattatgttgacaatctaacagtttatgtgagactttttagtatatcgatggtgtatgttaagtattatacgtaagatctagatcgcataatttagcattataggagtctttaactaatgtttaaactcactaccttacaatgtttgcgtaagtgatgttgttaaacaaagtccattttggtgacaaagacggtttcttgcttgcgattggatcctaaaccctctcgtcaacgatcattaaaatcattgatcacaaatcataattaatatcatgaaaatttcatattactatcagtgtcatacgtaaattattgtagtgatcgaagtttgcaaggaaatgatatatgcaatgaccaatattacttattagagaaaattcaatgtctaaataattgttagccttaatcaaaatatctggagaattacttaacacgtctgtctattaatatatggatatagacatttgacaaaatgcgaataataaataataaatcttcaataaaaaaaaacacacgagatgataagaacatgacaaacataaattattgaccatattaattaaagttgatttacatataaaccacacattagatatacgaaattaggaataatagcaaaataaaacaaggaaaaaaaacaaaacagcaaagtatttgtagttaaggaaccttaaatattcgaattaatcgtattcgggaagatgaatacataacacagctaagtacaaaagacgaagctgaggctgtacgttaagcttcttctttccctcaactctgtatcagaaaaagaaaaaacataaaaaaaggtacgaaaatttaaaaagaagaaaaagaaaagatttgatattaaaagtgtcaattaaaaaaagatattttgcaaaatcaaagttgggagatttccttgcaagctgtgccaccgccctctctctctctctctctcttagttttttttacagacatagaaataagaaaccctgaaacagagataaaacaaaacacaagttttgagtgtgttttttcaagtctctctcttctctctctgtccttgttaaacacagcaaccgcctttattacacaaaactctcttataataatctctctcaccatttcttctcttctcttcagaagaaagaaagaaactcataaaggagaagaaataagagtttctctgtcttaaactcattcattctttctctctctataaccagagttctgtctgtgaaaacacacaaatctaagagaagtt

SEQ ID NO: 10591 - DNA, 3000 bp, Unknown
  misc_feature (1)..( 3000): cDNA_ID_2716055_gDNA_ID_2213664_Annot_ID_182024 3000 nt of promoter + ATG
taaatattttagtgagtcctcatgttggccgatagccatatatataagagattctgataaaccgttgaaaactttaacccaaaaacaaaaagtcctttctgtgacatcgaagtgaaaacgataataaagaaatctagcatagttttggacccaagaaaacgttttactctctattttgacaccacacaaataaaaaaatatgtcccaaatgttagctaaacataattaactctcgttaaaacaaaaatgtgatggttacgcgtgaaaatggatgatttatgtatttgtgattatatttccaatattttgctagcctactgaaaagtttaacgaaagcaatggataatggaaagattacaaacttttatattcgacataattttaccaattaggcaacgactttcattacacaaaattgcggaaactatacaaaattagccatggataaaaatggaaaataacaaaccgaaacttggctgtaacaaaatctgttagggatgtttcataaaaatatacaccaaactaataaaattcgaaaccaaccaaatgataaaattttgcctatgaccaaaaaaacataaatgacacaatgtgaaaagaaaaacatatttgttgattggaggaaccttcctgttgccacgtggaacttgaagtttgacacaattgctgacaccactgtactacctatctcttctttatgaatcttcaaatgtctttttttacgctataaactcactttcttctcctccaagagccaaataaacacacaaaaaaaaactcaaaatcatgagaagctccgatcatatggcgtttgccggcgttttgccgattgttttcttgcttatattatcatcagcggatctagcagcgagtcaatcacagcccggtccaacaaatcaaccgtataactacggcagactaagtccagccatggcagtgatcgtcgtgatcctaatcgctgctctcttcttcatgggcttcttctctatctacttccgtcactgctcaggcgtaccagacgccggtgtttctccagctggtggagctagatccagagcaaccgtcaacgcggcggcgcgtggtctcgacgtttcagttgtcgagacttttcctacgttcttgtactcagatgtgaaaacgcagaagcttggtaaaggagagttagagtgtgcgatatgtttgaacgagttcgaagacgacgaaacgctgcgtttgcttcccaagtgtgatcacgtgtttcatccgcactgcatcgatgcttggctcgaggctcacgtgacttgtcccgtttgcagagcgaatcttgctgaacaggtagctgaaggtgagtcagttgaaccgggaggaactgaaccggatcttgaattgcagcaggttgtggtgaatcctgaaccggtggttactgcaccggtaccggaacaattggtgactagtgaagtcgattcgaggagattacctggtgtaccggtggatcttaaaagagttaaattctcgagatcgcatacgacgggacattcggtggttcaaccgggagaatgtaccgaacggtttactcttcggttaccggaagatgtgaggaagaggataatgaaggattggaaattgaaccggacgaatagtcttctggttcttcctagaggagggagttcgaggagaggtaaaccgattgaccggtcaagggctcggtctgatcgatggttgtttcgtaaaacgccttcgtttctgtggaggagtcgtgatgatggttcgattaggttaggtgctaccggtagcgttcgagccagtgctgtaccgaattcaaccggtagtgattcggtacgtgcaggagaccggtgggcttttcttagaaacgcgtcgtttttgtggaggaactcttcggtacatgtgccaagaggaggagtcaataaagacggcgaaggaacttcggttaaatcgaccggtgcaagtggctcaactagcggttcggtgagattaccggtttagttgacttttcttttctcatctttttcatttgtttttgtttgggattgttgataaatacgcaaatacattttcaattttttaattgaattatccttgttttgtttaaaattctctgtaacgtacatatgaagtcagatcgaaaacggattcacttttgaaaactaatgtataaaaaagcttataacaaaacaacggacaatgatgtgaggtgcgctgtggtgcaggtgggtttctcggtttttcaatattaaaaaagtcgtattcgtggacaaagaatatagctatccgatcccctgataaaatatatgctaatagaatatagttttgtgtttgtcgctaaaaatatgctaactgttcaattatgtgtttggtttataaccagagttttacttcctagtttatacacaatattacatgttctaaaaaacaccgactacgcttcacagaaagaaatccattttgcggatgcattttgagaaaaatctttagtcaaagtactactatttagaattattgcattttccaaaagaaataatataatttcatgcaaaattggttatatatgaaaattattgaccgccactaggtctccagtcaggtcacggatctcatcgtgtatgaattatcatgagtcaatttccatccagaaggattatcccttaaaataaatattagttaagggatatatgtaactctatgcatttatttcgctccgttatattacatgctgtgtaatcacatgtatgatgtaatctatgcatatatgtaactctagatactttagacaattggatgaagactgtcatagtgtgcaaaaatactggttttaatttgttttgtcgtctcgtctcgtctataatcttaagacacgtgttacgttgtatcaaatttacataattaatgggctttaggcttgaacaattaaggcccacaaaagcctgttaatcccatgggaagttgaggacgagaaacagagtccgggaaaagaaaaaagagctctcggagattcaatcactc

SEQ ID NO: 10592 - DNA, 3000 bp, Unknown
  misc_feature (1)..( 3000): cDNA_ID_3037408_gDNA_ID_2213664_Annot_ID_182022 3000 nt of promoter + ATG
tggaaaaatgcctttttttggaaatgaaacagttaagtttatggaaattattcatataatcataaataaaccagttaacatacaactaaatatatatgtaatccataaagaaagtgataatgtaactttctttgttacattgctaaagattcaaagatgacgccgtctcagagtatttaccggtgagaatgtgtagtgcaacaaaccgatttgcagcttcagtgtaatgaatgccgtcccagttaacatatttggaactatcataacaaggtttggcggttatgatcgtaccatttgatcttgctgtcttaccgcaaccaacctgatcatcgtagttcagtggtggtcctccggttccacaacataccattatcgaatgatcaaaacctattaccataccaaaaaaaagtttcaagcactgttaacttgcacataagtaagttttggcattccggttaaaatgccaccactaacacaaaagtaaaaaaatgctttctaatttgagtgaactgaacattattaatacttagttacttaccatatttggaatgattcaggatgaggtcggatttgatagagaagatatctacgtatgtgaaacgggaattgggatattgttgagggagttttttgaaaagaccatgaagctgcaaattgaaaagcttagcagcttggttatggtcactgacacaaccaaactcatcaagctttgatttgtcttccccaaaaattgacacaacttgtgctaaacacccaagtggtcctgtgttgtgtatccaatagtttcttgccccctctgcatataatctctagataaagaattacaaaatgaattaatagtatgatgatatcttatactcaaatcaaattcaaatatttcccccaaaaaatgattatccgtgtaacaattaacaaagtgtcatttatagttttatttaagattgaaaaaaaaacgaggattaagattcatgtaaatactaacctttattccatcttgaaatatatctaagattataggaaccagagcaagaacttgatctactgtcttggtgtaaaatgctccggcaatatcattttgtccgatatcaaacatatacaatccattactaaaaaaatattcggacggtaagtatctttggagctcttcatctgacaaacaaaagagaaaaaaaaaaggtacattggtcagtgactaaatgattcaactaagtctaaaatgttgatgaacttttggtatcatttgctatttagttaccttgttgtatcaattgaaggactttggacttaaaggtgatgaattgagagacttgaacaccaaaaccaaaggggctataggatgcagcatttgccttctgaatcgttgacgcagccgcagcaaaattgcagcctcttcggtaagtttgtcgacttatcgaatctaaataaggcctcaaatatggtcgatcaattgcttccactacaaaaacatatataaagcccactcaaaaacttatcatgtaacgagttttatggttcataagaatctttacacccacaacgaaaattacatgagcgtgaaaatcgcgttatatcaagatcaatcagatcatcttgtaacgttttaaaagtcatgttattaactcgactagtttgttatagttcatgcaatccaacgcttccagtaaaaacaggaaaacatgacaactttgccgttgaacaatttgtaaaataatataaaatcctattattattttgctacaaaaaaagtcatgaaaactgaaaaaatagaggaaagattttaaagaataaaggaattattagaaatgaagaatgattacttagaaaatcgacgataagacgtccattgcagaatcttccggaagttggagatctaaagaaggttatttcataggaaggttgtggaaggaatccaagacccgagctaagttctccggtgtcagagttagagtctccgaagttgaaaaccgccggaaagtcattagaaatccggaaagaaccggcgagaggggacagagtatgagagatggctacgaatagtaataatctaagaagagtgtggaaaagagtttccatggctcaaaacaatataatttcagccttatcatttcttacatactatatatacattatatattatggttttaacaaaaaaataaaataaaagataaaaaaaaatatacatccttatgtggatacaaatgtatgcgtgtatacataatgtaatgaaagtagaatgtgagtttgcttggaaatatagatagaaacaaatgatgaagtcctcctctcgtgacattttttttggttttatattcacggaaaccacatcaattgcactattgtgtcgactttacgatatccgaagataaaaaagctcagtatttgggtattaataattaacggtcgtgagaccccatttatattttgtatactgatggaactaaccttttcttttataattgcatgagatgcgtattttttaggataggcccaataagcctgataggcccaaatagttttttcgaggttctctagtaaaaacatcaatatagctggtaaaatataaaatggaagaaatcagaatctcgccggggctatagcttcaccgtgtcgtgtcctaatctattgtcgggaatttgaagctaaagtaacattacaatgaggaaaccacgaacggcagagatggtgatttccggttatttaaccacgattcgatactagtaaattgatatttctcttacattattttgaaggcttcttattttaatgaaagttattttttttttaaataggtaacacaaagttggcatcttttttttgcttactaaattccaagcaaaatagagaaagaattgatatgcgtgcaagtttctgtccaaattcttgtcttttttggaggtgtggtgttgttttatcgacactccactttacacttcacaagtcacaacacttataacaaaagtgatcacagaggccagagttgagagtttgacaccgtcatca

SEQ ID NO: 10593 - DNA, 3000 bp, Unknown
  misc_feature (1)..( 3000): cDNA_ID_3037338_gDNA_ID_2213664_Annot_ID_182021 3000 nt of promoter + ATG
gaagattgcttcttttacctgcatgttatgccacaataaaaagctatcgtggtaacgtcgttttaacagaacaaaacatagcactacgatcatcagatgcttacctcttcacgcgctggaacattatcgaaagccagagcctttgctgaatcaaacaacctaacccaagattccaacatataaaacaggattgcttagaaaactctgttatttgcttcttggtttctggatataactgttcttaccgatctagatgttcctcaagcttgaatatctttcccttgtaaatccgaagtccttcccatacagagtcaccgccttgaacaaccgagtcaaaaacagaaaccttacaaaaataagaagaaatagaacataatcagtgttcaaaatgcaaatcaacaaacagtgagctgttaagttttcttccacatttcaagcacacctttgccatttcacgaggcaaaatctcgtcaccgacccatgcaagaagttttgcattttcaggaactgggagactaggaggaggcaagggactactcaagagggaggaactgtgcttcacgtggctcctgagaatgttgtaaagcggtagacttcgctccagcaaatcgtaatgcgacaaagggaatgtctgaaggaaaagaacaataccaaacacatcttagactgaattcagaattattaaccacacaagaaacaagagccttacccgaggatacttctttggagatgagaaacccgttgattcgtgaacactcttgtaccaccatggtgcccatactccatcttctggtataggaccagccttccatcttcaagagaacataacaaacaaaagtgaaacttaatgctttgatataaaacaaactttaagtgtctcctaggagaggaccatacttaagcatagaggcttgaaatggaatctccaaatcatcacaaagaccgcgaagtgtagtctgcatggatatggttggaataatatgtaagagaaaaagacatctttgtgaaacttttactgttttaaatattacagaaacaaaacctcgggatctcgctgaagctcatccgcatcgatgactgctggtggtgttcccatctgacagagatcactgtatatcgacactaattcccccaagcctaattcgagaaatgatggagggtgtaccttctcaaaggaaggctgcaaaacgaataaacacagaagaactttagatgaaacattggctaaaaatctgcagagaaccagtctttgatgagaaagctaaccaatatgttaagaggatttcgtattaatatgaaatgctttcctctactcatcagttcacttggcaaaccgaaaagccgctgcttcgagatatgctgttcagagggaaaaacagaacaacacaacaaagaaagtttggtaatatgaactttgaagcgtccaaaacaaacaatcagagaggatttttaccttacaataccggtacttcttagatcctgatccatatatgacatctttcacaactttctctccattgcactcctatttaaattacaagagggaaaattaaactcgtgtactcgaagaaagactaactactgaagtgcaaatcagttacataccatcttggagagaacttcgtctctgtatggcctatcaaaacctgtagctttaagaaatgatgcatacaacggctcgtcgacaacttcagtgtcaagtctctgatatatagatacaacatcaatcacaaagaaaaagaacactaaatcatctccatagtgattcattctttctaggatctcatgttttttttgttcttccaaactttccaagttatttattagataaatcatagtctttactctttggagctaacacgtactcaattttttctcagtggagacaaaacgagcaaagcagaattgagatttggttttggatgatcataatctttagagttaacacttggaaaatttgtcaagaagataggaaaaagttgggtatagtacctgagcaaaggagtacatgaggctggtgctgagagatcttggtgcagaccatgagtgaatcacctccggttctgccattgatgacggtgtcaaactctcaactctggcctctgtgatcacttttgttataagtgttgtgacttgtgaagtgtaaagtggagtgtcgataaaacaacaccacacctccaaaaaagacaagaatttggacagaaacttgcacgcatatcaattctttctctattttgcttggaatttagtaagcaaaaaaaagatgccaactttgtgttacctatttaaaaaaaaaataactttcattaaaataagaagccttcaaaataatgtaagagaaatatcaatttactagtatcgaatcgtggttaaataaccggaaatcaccatctctgccgttcgtggtttcctcattgtaatgttactttagcttcaaattcccgacaatagattaggacacgacacggtgaagctatagccccggcgagattctgatttcttccattttatattttaccagctatattgatgtttttactagagaacctcgaaaaaactatttgggcctatcaggcttattgggcctatcctaaaaaatacgcatctcatgcaattataaaagaaaaggttagttccatcagtatacaaaatataaatggggtctcacgaccgttaattattaatacccaaatactgagcttttttatcttcggatatcgtaaagtcgacacaatagtgcaattgatgtggtttccgtgaatataaaaccaaaaaaaatgtcacgagaggaggacttcatcatttgtttctatctatatttccaagcaaactcacattctactttcattacattatgtatacacgcatacatttgtatccacataaggatgtatatttttttttatcttttattttatttttttgttaaaaccataatatataatgtatatatagtatgtaagaaatgataaggctgaaattatattgttttgagccatg

SEQ ID NO: 10594 - DNA, 3000 bp, Unknown
  misc_feature (1)..( 3000): cDNA_ID_2990920_gDNA_ID_2213664_Annot_ID_182018 3000 nt of promoter + ATG
gctattcaaacattacaaatttacaatatatatggactaattttacagaccaccacaatctcataatcagtaagtcatcacttatcaattactccattaaataattacagattaaattgttatatactgaaattttggtattattattttttttttttgaaagaccaaatgtacattttgggaaaaaaaaaaagaaaaaaaaaatctcggtctttttagacactaccatactcaaaatttaaactacataaatatacatatatatatatatatatatatatattcagtgtgtgatatatacaaataaagtctctaatgattttacaaaaagattttcaagaaacaagtgagatatttttcgattgattaattagtcaaagtaccgtttgtaagaaatatcattagacatgtcactactacgtacgtgctctagaaaagggatatattaggcttaccaaaatatcttacatgtcttgttccataaaaatatggtatatataaaaaaagttgcgtttgaaagaaatcaacaacctataacaagaaaaataataacaataaattttgataaccttcaagtttttagatagtggaaatgtctacgtttcttgtccttctcagtcttgattcctttcagaccattttctaatttcaaagaaatattacgttcatgaccaagcctaaagggttaaaccatatgcttaatattttctatttataaatttgtatatattcttcttaattatggaacgtaaatttattttttcagaagtggtcctgcaagagaagattcatagtggatacaacaaaacctagtttttctactgaattggacccgcttaacgatcatgaaaaaccgcaaaaggaaccaatattacaacgaaatgtgtatgggcggtacagaagaaatggacaatcccatcaacactatgcagtaataaggatagtgtctgatgaagatatcgattgccaattcgttatcatattgtattgacaaaaacttagctactgagaatgattaccaacgagaaaaaaaaaacgtgtgataagacatgggatgggcatccaaattgggtagattaaaatatgagaaggatggggtcttatttactcacttgtccaccatgctttaataattcagtaatcattcatgctaattaaccccaccccatctcccaaacaaatccatgtaattgtcaacgatcgtgacgatacaaaaccatatgacgcaaaataaattatcataaccatcatcattatgttggaaacacgttacactatgctatgcttgactttacttgttattaagtgagttagttaacacaactcccgtttaaaactttatagtcttcgattctcaacaaactcccatttatatagtcttcaccgataatataaacaaaacattaacatatattattcatttataaaccattctttgtttaaaaacagatgtaggtacagttttttcaatattcttttacaaaaaggtacaaatatcctttgttttacagactttaggtatgtataatactttacctcgtattacaaatgaaacgatgattatggttgaacgttagttttttttctttaaaatcagttgaacagtaataaaaaacaatattgagaccattaggtggccaatttctgtttttgtctagcattagttgcttagggtaaaaacaacttgatccacattttttccttaaagtatttccgtcttaattttagaaaataattgaatttgagaatcacctaattaaaatgtttatatacatgttttgtttttaaaataatacgacttttgaaataggatggagaaatttactcaatcttcccgagtcttcctgataattttttatttttggcaaaaatactatactttgattaagacttgcgtatgaccaaaatactatatcaaattgtcaaactttagtgaacaatacccgctaaaatattattaatttattatggcctttgtgaataaattttgttaaatgatttgagtaaaaagaaagtaaaaagagaactgtaaatttatttaacgaacggtagctaagtactccaacggtcattttggtcaaccataaatataaaattttgtaaacaaaattctcacagaggttttagataaaacacccattaaaaattaatttaggctttcttgatttgagtaaaaataatttataacagaactgtaaatttaataaattaaaacagctcgatcgaactgtaaaagatttaaaacagaattgtaaattcgttggtagatgcgcccaacgaatatgtaggtcaattattgaagcccatattttttaatttatttggtaaaacattataaaaacatggtgatgtagtttagtcatatttatgttggcaatatgtaacacgttggactagagttatttggatacgcttcaacggaatatttcctttgattttggtcaatttaattctgagtctggttaatcagttttttgtagaaaaattataaagtttctgtgatttttatcactggtaatgtttattttatgtttgatttttgtcttttatattttataaacacataatcttatctaaatattaatttttctctaacataagaactatttggaacaaaaagaaaagaacgtacaacttgtattgaggacagataatgagctatattcactaggatgcattcaaagttggcattattatcttaatgcaaagcgacaaacgaaactcgaaatgattaaatgataatatttgtttatttaaaataaaataaaaaaacgaaatcgtattctataacaaaccaacttgtggaaatgatgaagtgcttcaaccccacaagtaaactctctctgattctctctttctctctttctctcgctctctatctctctctcctctgtttgttatatcaattaatcaagaagatttcttgtgtttttttttttctgttaaagaagatttcttgggagaaaataaggtggattgaaggattagtctttaggaatg

SEQ ID NO: 10595 - DNA, 3000 bp, Unknown
  misc_feature (1)..( 3000): cDNA_ID_3037413_gDNA_ID_2213664_Annot_ID_182017 3000 nt of promoter + ATG
aagttaggaactaggaaggaatttagtgaaaaggctaattatttacttctgattttacagtgatgaaagtaatgatttgttttgaatttacaggttggaattggtttaatgttgatacaacaattatctggagctagcggtatcacatattattcaaatgccatatttagaaaagctggttaggatattcatagtcttactattattatttatgaatttattttgctttcatataaataatactcgtaggagttatttaatactacctattatttatgttatctgtattttcgtcgtttaaacaggcttttcagagagacttggatcaatgatatttggtgtgttcgtggtgcgtaccttaaactaattgattttttttttacgatattaaatttctcaaagctatttcgattataccattatgattattttttactctttgtagatcccaaaagctttggttggtctgattcttgtggatagatggggaagacgaccactcctattggttagaaaaatacagtttatatatagacataacaatataacagtataataattattaacattatcttgataaacattattctaggcttctgctgttggaatgtccatcggatccttgcttattggagttagcttcacgttacaggttactcttgtagaatttctatattggactaatatgagataactatcaatattacaatcctcgcctcttttttttttggacaaaacaatcctcgtcttataatatgtttttttttttgtttgtttctgagacagcaaatgaatgtgcttcctgaattgatcccaattttcgtcttcgtaaacattctggtaaaatctttcattttctttcaaggatttattcattttttcatgcaaatttttatttttattttaaatttttggtattaacttgttataagaaatcttaaattaaatttggttaggtctacttcggatgttttgcattcggtataggagggctaccttgggtcattatgtctgaggtaaataacatattttaatttatataaatcatatagttagacgttatgaaagaaaaaaaaaagtttactgtgttttttgctgttgttgttgttgttgttgcagatctttccgataaatataaaagtttcagcaggaacaattgtagcattaacatcatggactagtgggtggttcgtgagttacgctttcaactttatgtttgaatggagcgcacaaggtctttattttctctattacttttttattaatttggataaaacaatttaccaaaaaaagttaagagttatctttataaaaatacacaaatcaaacataaagttatttaaaaatcgtgttcgaattttgacatttgtatcaaacagttttagatgtgcaaaatgtgcggtcggaaaatatctcttagattcacgttttcttcaaatacttttagcttttgttttcttgtttagattggatgattgagtttttgtttatttattttttatttttaggtatatattgttaaatatacttttaaattcaagtaggtcatttacatattgtttatggtatatataataattaaataggaacattttacatatttgcggctgtcggaggaatgtcattcatttttatttggatgctcgtaccggaaaccaaaggacaatcattggaagaattacaagcttcgcttacggggacatcctaaatgcacatttatattgtaatatactattaattttgtttggtaaaaagataaaatttattttctgttgtcagtcgcattgcaaataataaatgtattttgtaacattatttgcatattgatattaataatattttacatttttttccttcgcaaatcagtggtttatttatcctagtttaagacaacaaatgaaggatagagcaacgatcagacgtatcggacaagtcaagcatgccaaacgatttcaaaacaaagctagcataatcataaaaggatatataatcaaactgatacaagtttgaattagcatcgaaagagatgtcgatgaaaacatacgactttgacatagtcaccttacattgtgacttttaccataatccaaaacctcaattctcattgagataagcttcgtcataacttccggtcttgtaaagacctttacacaaaattgtagaacagtacttaggatgatgaaatattcttcgaaattgaatccggaatgatacctctcatggagaaggagtttgaaggaagagttctctcctccaaagaagaggaagtgtacattgatcattcattgtcttgacaagaggaaaattggacaaacttctcacaaaaaccggaagttggacaaactaacccaaaagctaatgtatatgtcaaagaatttgaaaagcttgtttacctaatcggtttttgggtaatatttgaaccgaaccgatatccatgattcaaaaaagaatcccactcgattattttacttttgtaattaaactgatcgctctttagagtatttggtttgggtaatatgtgtagagtatagatatgtaaaggctaggactgtcatttaatctctcttgtaatctatattgtacttaacctatctaatagaatcattcagttccctattctacaatatgctcagaattaatggaaactcacatttaaattatgtgtagttttaaatttttggcactgaggattttgtcatatctggctaagtacattatgatggtttattcttatgattcaaatatttttataattgttaggaaaaaaagatctagagcaaggccactggccacttgtgcaagtcaataagtgcttgaaccccacgtgtaaactctgtttttctctatctattttctctctctattttatctatcttgtcctctcctctgtttataatcagcaagatttctttttgtttattagaagatttttggaaaattaatatataaagagaggagaaattaagcgtaagagtggtggcgggggaaaataaaagcatg

SEQ ID NO: 10596 - DNA, 3000 bp, Unknown
  misc_feature (1)..( 3000): cDNA_ID_3037421_gDNA_ID_2213664_Annot_ID_182015 3000 nt of promoter + ATG
ctgaaattgtcagttgcaatttcgatgtcagatattgagaagttttggagagatgattggaaatcgtagatatcgtgaaggaccatgccattcatgtttggatctgcacttttgttttgtttgatgatcggtggggcggcgccacttaatggaggaaaggaagagaggcgtttcatggatctgcgtttccatagcttgaagaattttccccaattagaagatgctctgtgattcttgcactgtacgtctgtgtctgcatctgcattgtcgatagcttctctgtttggaggaggatcgtcagatgaagatgaagcggaagagattgagcaacgagttaagcaggcttcgagggctcctcttggtgatttggggtcttgcttctctttatctacctctagtaatcttagatctgggaggagaagggagagaaaacgttggaagaagctaggttttttggtgtacaagcaatgaataagaatacagaggacaagagaaaacagagcaaacatagaaacagaggaaacagaggagctaggttttaccatgagctgaagcagaattcataagaaacgcgttggttcttttatgttttgacgtatgatttatgtcgtttggatcttcttcagtgacataacttgaatatttagagttgtacctgcctcgggagattcaaaagaaaagaacagactaaacatgtcgttcttatgtaaattttgcgggaaattaagagaaaatcggtgaaaattcagggaaagttcgttaattctgcttaaacgttcgttaagtatcaatgaaaatcataacagaacagaagataaacttctagacattaatatcatgtctaccaaaaaaaaactcaaatcaaatataagaacaaacagagaaaaaagtgatttgattgaatgattacattggaagagcacaacacacgggagaagcttctttgctttggtctaccgccatgaaagagtgttggtaggacacttttaagattttctcagaaacctgaaaacctaaaaatagagaagaggatcatagaaaggaaatagaaagaagttaacatttaaaccaaaaataaataaaaatagaaagaagttttgaagttggtgttcgtctcgagacacccgaaagaaaaggttttgtctgtgtgtttaaaatttgatttactaatttaattgttttccgttgaccaatggtatatctactagtagtttttttgttaagctaatagttagactctaaaatgactaaatcctatatttggcaatatgcttttgattttctctttttggattgaactcagaggcattctcttagcttcattcatttatggcagaaagggttaagggtccttaaaaatcgcttcatctgtcggtctcgttatccaaactcatattcctaatttaggtcttttaaggttttaaaaaactactttctttatcttgttgataaggaatttataaaagatcaaacttgagtaatctaagtagttttagttttactaatttcatttactgttactaatcaattgtagatattgacattcttgtatatattgcgacctgatagtaattatctttaattttctatatgtttttattcaagtagtactctgttttgtattttctttcttgtgaatagaatattttctgtgtgtatatgatgcagaaagcctgcattaaaacctgcattggctttattgctttgcaccgtttatttatttttatgattcttatttttgtgattaacaaatattatttcaagtgactcttatataagttttggatagttaaaccacggaccacaatcatgttggaagtgattgttcaatacttcattgttgtataagagaggggacatcgatcatttatgtaaatcttgttaggtactgttctgttctatcaatctatcaatagtccctacgctaactttctgtaccctcgattaaataggtttttgctcaatgacgctgggtccaaattgtaatgactcagttcaacttccgcgacaaaatcattttcatagattttgatgatttctatagtgggcggttttttctatacatcttacattcgcaagaatttgaatgatattagcccatatgacgagaagaagaataattcattacttatgtggttaatgcggagtggaaacgaatatctcatggccaactacaaatccaaatactgtcttttgaatccctgtagttttatactatatgatctagagttttttttggattttgtctcccaaattagaaattattatagtatcaactatccatcacatttatagaaaaaaaaaaaaaaaaaaactatccatcacagcttggatcttgcggtgggccaggaaaaaacacatgagcatcggatctgtggaaaacaactgtcttatcgggtcaaacctttgagtcaattacacgttactgtgcatgtcataaaccatcaccaaaaaggaaaacaaaataacaaaccatgcatcttacttacccagtaacacaatgcatccataatgtacatagtatttgtgaattttttgaggaaagtattagtgaatattattactatgaaataccatgtaattacttctgaattatcttacttaagaaaattcaagtttagtcaatcaacattaaaactatagagaacccccaacgtgtaataatgcattgggagttgggactttcataaaatctcgaataaattaattcaaattgtctaattcgtccaaaattatcctgcatgggttttagctaagccagcctagctacatgtactgatttatacagagataaatatagacatgatatatatcaataaattaggaacaaatcagagtttttagatctaaaaacacggtgccttctcatttcctccggtgagttatccaaatcttgtgtttcttatcatatatcctatattttatctacataaaaattgataagtattcgttgaattcaaagggcattttacgaagaaaatggagacaagaaaagacgac

SEQ ID NO: 10597 - DNA, 3000 bp, Unknown; identical to SEQ ID NO: 10582
  misc_feature (1)..( 3000): cDNA_ID_2716094_gDNA_ID_2213664_Annot_ID_182010 3000 nt of promoter + ATG

SEQ ID NO: 10598 - DNA, 3000 bp, Unknown; identical to SEQ ID NO: 10581
  misc_feature (1)..( 3000): cDNA_ID_3037433_gDNA_ID_2213664_Annot_ID_182009 3000 nt of promoter + ATG

SEQ ID NO: 10599 - DNA, 3000 bp, Unknown; identical to SEQ ID NO: 10580
  misc_feature (1)..( 3000): cDNA_ID_2685704_gDNA_ID_2213664_Annot_ID_182006 3000 nt of promoter + ATG

SEQ ID NO: 10600 - DNA, 3000 bp, Unknown; identical to SEQ ID NO: 10596
  misc_feature (1)..( 3000): cDNA_ID_2716076_gDNA_ID_2213664_Annot_ID_132634 3000 nt of promoter + ATG

SEQ ID NO: 10601 - DNA, 3000 bp, Unknown; identical to SEQ ID NO: 10594
  misc_feature (1)..( 3000): cDNA_ID_2716072_gDNA_ID_2213664_Annot_ID_132635 3000 nt of promoter + ATG

SEQ ID NO: 10602 - DNA, 3000 bp, Unknown; identical to SEQ ID NO: 10593
  misc_feature (1)..( 3000): cDNA_ID_3037338_gDNA_ID_2213664_Annot_ID_132637 3000 nt of promoter + ATG

SEQ ID NO: 10603 - DNA, 3000 bp, Unknown; identical to SEQ ID NO: 10592
  misc_feature (1)..( 3000): cDNA_ID_2716061_gDNA_ID_2213664_Annot_ID_132638 3000 nt of promoter + ATG

SEQ ID NO: 10604 - DNA, 3000 bp, Unknown; identical to SEQ ID NO: 10591
  misc_feature (1)..( 3000): cDNA_ID_2716055_gDNA_ID_2213664_Annot_ID_132640 3000 nt of promoter + ATG

SEQ ID NO: 10605 - DNA, 3000 bp, Unknown; identical to SEQ ID NO: 10590
  misc_feature (1)..( 3000): cDNA_ID_2716051_gDNA_ID_2213664_Annot_ID_132641 3000 nt of promoter + ATG

SEQ ID NO: 10606 - DNA, 3000 bp, Unknown; identical to SEQ ID NO: 10589
  misc_feature (1)..( 3000): cDNA_ID_1029967_gDNA_ID_2213664_Annot_ID_132642 3000 nt of promoter + ATG

SEQ ID NO: 10607 - DNA, 3000 bp, Unknown
  misc_feature (1)..( 3000): cDNA_ID_2716033_gDNA_ID_2213664_Annot_ID_132647 3000 nt of promoter + ATG
atggttatccgtttgggctgttattgttcataagaacgatattgtagtgagctgccacaacatggttttcaaatacaaagatccaacggcacatgcagaagtcatagccattagagaggtagtaatcttcttcaagtaacaaaacaaaaatgacatgtttctaattatggcgaacacacaggcatgcaagaaactgaatgaaattaagctatcggaatgcgagatttacgcatcatgcgagccttgtcccatgtgttttggagccatccatctctcaaggctcaaggtaataagaactttttgtttcttctttctgaaacctcgtcttgattactttgtaaacagagattggtgtacgaggcgaaagtcgaagcagctttagccattgggttcaataggatcttagcagatggtgtgagaggcgttgggtgctaccataactctaacctagagattacaaaactcgatctgagtatcgccgagcaagtgtttcagaatacaaaggggaagttcagtttatcgtaactcgtaagctctttttatcttctttcttttcttcatcagaaatgtatttgcttaaaccctctttatcagttactgttaatgttggcttgtgtttactttcgtccatttagaaattgtatgtatgtatgtaatatactttcttcttgcaatgccatatatatcaactttcttcttgtaattttatcattttatacggtttaaactttaaaccaatgtctgtgtaccaaatagagagagaagcatcaaatctcagcataacggcgatgttaacgccgtcaatattgacgtctttttaaactcccgaggcaaaatcatatgatcgctttacggatttcacctacccaaattgtcttcccagaggcgaggacacacaacctcaatctgttcgtcgctgtcgcagatcggagagatgggtgtcgatttggaatcggtgtcggaagcaacctcgggagctattgggtcgcttctgagtacaacgatcttgtatcctcttgatacatgtaaatcaaagttccaagccgaggttcgagctcgtggtcagcaaaaatacaggtttctttatcctttgatttgggtgcatcggtttctatagatagtgtcggtctcctctcgtgttttttttgtaatggtttttttttttgggtgatatttgcagatatctttccgatgttatgtgggaggcaatttctaaaggacaagtcttttcactgtatcaaggccttggaactaagaattttcagtctttcatttctcagttcatctacttttatagctatagctatttcaagagagttcatagtgaaaggactggttctaaatcaattggaactaaggctaatttgctcattgctgctgctgctggggcttgtacttctgtcttaattcaggtacgtttaccttgatgatctctgagattagctatgttatgttttggagttcttgttaaacaattgaagtcttggtgttggaatgaaaagttgaggtctagtttgctacataatgtgctatgatcgtcttgttgcagtatcgatgaattaaagcactgagtcttatctttgtgtagcctctagatacagcttcatcaaggatgcaaactagtgagtttggagaatcaaaagggttgtggaagaccttaacagagggttcatgggcagacgcatttgatggcctagggatctctcttttattgacttcaaatcctgcaattcaggtacatttctcatgtaaagccatgagctatcgactcgagtagctcacttcaatgtcacttgacaacatgactggctgaaatagttggttactctttgcagtatacagtgtttgatcagctgaaacagcaccttcttaagcagaaaaatgcaaaagccgagaatggttcttctccggtagtgctctctgcctttatggcgtttgtcttaggtgcggtctccaaaagtgttgccaccgtgctcacatatccagcaatcaggtattttacctgttggacaaagattactagtattcttgatttcaccctagtgaactttctggctcagatgaacttctcaagtcacataattttaagactttggctgagtcagacatcatattgggctcaattttgcaggtgcaaggtgatgattcaagctgcggatgagtcgaaggaaaacgaaacaaagaagccgagaagaagaacaaggaaaacaattccaggggttgtgtatgccatatggagaaaagaaggaatgttagggttctttaagggcttgcaggctcaaatcttgaagactgtcttgagctcagcattgctattgatgatcaaggagaaaatcacagcaacgacatggattctcattctagctatccgtagaaccctgtttctcacaaacacaaagggtaagttaagaagtccttagagactcccaccaccaagcttatttcacgtccttgtaagttgtattagatgatgaatgatctacatcagttatgtaaaattggttgtagccggattgtgttctaggtgggttattgtgtgtagttggggtgtaataaaagtaagaatctttgtgtagaagaatcaaagaaaatgatgtaatatgaacgtttcttaagaaactcaaatttataacattattgtatggattgttgagcttcattagtttttgatcattgtgagatatctcccaaatctttggaatcttcaactttaagcgtaacaataattagctggataaattttgcatatcaatttgttgttgtgtatcttttttgcaaacgttgaattttaacatattaccctattttaaaaataaaataagagaaaaataaaaaaataaaaacacatagtgggccgatgcttctaaatgaaaaagaaaaaagaaggttttgccatattggttcccgtcaaatctcattggaccggagtagtatagatttcttcaaggccaatatcgtttcttcagagagaatcgaacggaagatcggaacaagatgatg

SEQ ID NO: 10608 - DNA, 3000 bp, Unknown; identical to SEQ ID NO: 10588
  misc_feature (1)..( 3000): cDNA_ID_2716029_gDNA_ID_2213664_Annot_ID_132648 3000 nt of promoter + ATG

SEQ ID NO: 10609 - DNA, 3000 bp, Unknown; identical to SEQ ID NO: 10587
  misc_feature (1)..( 3000): cDNA_ID_3099721_gDNA_ID_2213664_Annot_ID_132654 3000 nt of promoter + ATG

SEQ ID NO: 10610 - DNA, 3000 bp, Unknown
  misc_feature (1)..( 3000): cDNA_ID_2716178_gDNA_ID_2213665_Annot_ID_132657 3000 nt of promoter + ATG
ttaaaaaggattatgtgttttatggagttatagaagaatatatggctttgactaaaaagaagaagaaattgagcttctttttgttattttccactttggttagttcttaattgcaacgtagaagccttgccctccccaagtttcgcaagtcttcaacaaaaatgttccgcaagtcttcgctattacacgtggcgttgctttcatgtcttgcccgtgactgtcctgttactctagtggtcagagaaagtttctttttcagttgtattttgactattcagattttggtggtaagttgagaaacgagaacttttagcggaataagcattatatgattaaaaaaactctataatcaaagaagaataattgtcttgtagagtttgctaatcctcttctccaagcaaggtgcaaagtctcctctgcatactaggcttagttcaatacatctttcaatctagttaggcccattagcccgttatgtttacaaagttaaaagcccacttacttgagaaaattcacagatgcacacatgcattagattatgtactgcaatctgaaaatgcatgatgagaggtctcatacacaaaacaaaatcaaaaacaatttagaaaaatattagagtaacttataaagactgttacagctgaaactaaaatactaataaattcgacttctggcaataattaaggattacatctcttttgtttagagtataattgaacttttggagctgtaatataatttgtatgtatgatttatgaaaagtgattgaacttatacatagatggaaaagttggcgtaacaacatgcatgatacatacagaacacatgcagccacagcatttgaatagaacacatcatcacaattcccaaacataatcattctcttcagcaaaaagacacactctttccaaatataattgtcacttttactgttttaaattttaagttatgccagctttaaagttgccgacgacaaaagcatgtccatcgtttctttcttcttcggaagattaatcagaggatttaaaataatctaaattcgagattatgttgtataaatatccattttgaaacttgaatgaacaaaaaaccgataaagttttccacgaataagttgttggtgtttttagtaggttcatagataggagggtggaaggtctctagttgggcaataaattgaaaccgcttttttctgacctaccaaatattaatttgatcgaatcattgaaaaaaatacatatataaaattatccatataaaaactatgtagtttgctttaaaatatttcatcgtatgcaatgatatatgcatacttaatccaccacatgtcccttgaaacaaaagcacttaagctctgtgtggttgacattaaatcacacatttcattttgttaaaattaaagtctaaaattttattcatggtagtacatccatcatcaaagaccattttcattgaacaaaataaagtttcaatctctaatcctttgtgaaaattcttactactatatattaattaggtcttttggaatatagacgcgcaacacacattttcttatatatggattgaatggtatccaaatccccaaggtaatgtaatgtaaaaccaagataaagaaaacgagtatgacattgacaattgaacttgtagcgaagtcaggataggacgacttgcggtttctactttctaagccaaagaaacatagttttcattgatttttagtgtttttaaatttgttgttgacttccattaatggaatatttcgtactttgcttcttcttttcgaattttatttacctatataactttgctttattttctacaacacaataagtattgctcataattgaggaagtctatacacacaatattttcctatcctttctttttttctgtcgggaatttcttcatatcctagcatctagattatgattgtacacatacaaaaacagaaaagaactagacttcaaaataatgcaaattagaaacaaaaaattgctccaaaaaaaatatattcaaaactataaataaaatattattatgatttttcttctattttacgtacattgtatatctctagagaagaaaataatttttaaaaaatagtttgggatcaacgtcgcacttattgttttgtcttacaatctcagagtctcaccgtatccaccacgctggtcaacaacttcaacaaaactctcttcctcgaacttcaatcttatcccttcatttcattaccattaattcacaccaacggctaacattgtcctcctcgctaaactgttaattatacgtttggccgtaatgttttgaagtctgcctatatttcttttcaataaatgctcttttaattaggttttaatttggtgaaatccaacctttaaattttctgatgctgttaaatctaagagtttgaattttctaaaatcattgttgtcggttatcatttgtacatcttgatagaactataatatgatcaatataaacttataataataataactgaaaatacaaatgattttgtttgtttgtttataaaaccactgaaaaatgcaagagttaatccactgagttcaaccaaaaaataaagaagtgaattctattagtcataagcttggaccaaaaaatccatctagaagaaaaaaaaaattgaaaaaaaattacaagtttctaagaagatggtgcaatggttagaaaaatctctcaagttattaaatgcatcataaactaatactgtatattactatacacaaaaatcaaagactcccttttttttaattgaatcaaacaaaatccgaaatttcgaaaggtccgacttttcctcacctgaacccgcgttttctctccccctcccaacccaactctccaattcgccggaaaatcaccgccaccgtcacttccggcgtccatatgaactaaagagataagcttttttcttctataatccttcttcttcttcttccttgatctcctttctctgagtttgctgagtttcttaactcagcc

SEQ ID NO: 10611 - DNA, 3000 bp, Unknown
  misc_feature (1)..( 3000): cDNA_ID_2716174_gDNA_ID_2213665_Annot_ID_132658 3000 nt of promoter + ATG
tccacagaaaacatctaggtgtctgcagtgaggctttggctgcaacaaggcctagaggtgattcaaaggttcgtgaaatggagatagagcgcgacttactaaccaggtcaactgtttgttttgtgctttgtacacttacaagatgcatgtttagaaacttccagatatgtgtactgatattatttgcaaatactactgtagtcccaaagacgatcttgagttttctattgtccgagagaatataagagaaaaacttaaagtaagttcaatatttttactcatcaacctcaattcctggcttcaagtagaagaacatttatttagcagaatctttgtgaatgctaaaacatatttatcttgaatgtcttttttatatataaccttctgattttatttttcttgtaatcctctcttctgctttgcagaccatatgtgacagggtagtagttaaaccccataaatcagtgagaaagcttgcaagagtacagcatctatattctcaattggcaggacagctaaaaagagaagatgatgaggttacatgacatttcttacatgattttaacctctcatgatcatctaaatcacttgacttgttctgcaggttatctaaaatagacagatatgagtttcctttaacttataatctgttgtagtctcatactacagtcctctttccattgagtgaaaaaagctacgttttctctcttacctcaaaatatgtttgtctatgtttcagtttaacatcttaactgctttgcatccgacgccagctgtttgcggatgtccagtagaagaagctaggcttttgattaaacaaattggtataacataatttgattccgatgcttttcaaattttctttcactgtcttttcggaaaaaagaatttctctgtagaagtagctatctactaatatatgcttataccgagatacatattcttcttctttttccagagtcatttgatagaggaatgtatgctggacctattgggttctttggtggtggggagagtgaattttctgtaggcatacgatctgctttagtcgaaaaggtgacaactccccttagtgtagcaaacgggtcattcactgttaaatacagtgcatttatcttggtccttttgtgtctcccagggtcttggagcattgatctatgcaggaacaggaatcgtttcaggaagcaatccttcctcggagtggaacgagcttgagcttaagatctctcaggtgaaaaagtcttcaagaatgttgttaaacactctcactgcaatttccatgtcttttatgaaatctcaaatcagattgatatgtgttttctgcagttcactaagtcacttgaacatgagtcagctttgcaaccaatcaactaaagaaaggcgggaattgagattgtttaataactaaattggtttgtatcatttgtgtgtttggtcattggtgtgtatattgtaaatagaagcaacactaatgatgatgctgcatggtacactttaaatcttcttttagctacttgttgtccaatttctgaccagactagaagcctttgaagcgactatgactctatgaggtccatcaaatgaaacacttacgcacgttgtgatccaaagctgacgtatatttccaccttcacgaaaaaatgacaaattatttaggaatattatgtgacaataacaaaacataataattaaggctccaaaaacaaatctttattactacttattaacgaacgaacgtaattagattaccgatagtgtgctaatggggtttcagaaaagtgatgggtggtttcttttggactaatccaatcaaaagggatttgatttttttgggttatatcatttaggaaaagatacttttttgttcccttgataatcaaaactgtcttctccatcactcatattctcttctaattgttctcacaatcatatctcactataaaattgaaatgctttatttctgtagcaataatttcaaagacaactttctatttattatgaaattaatataaatattcttttacccatcacttgaaaaagaagaagcaaatgtacatcttttttagataagacttttagttaacatatactcttgttctccaaattaaatcgtaattcggtgggtttctatttttgatagtatagaaaatttcgaaataaatgtctaattcattcattcattacttatatagatatattttaaaaaacctagaaatgtacatgaactataatcggtaaaataaaaaagaatatggatattagttgaccgccaataatacaatttacccctcttgagggtcatatttatcaaaacgaatcaacatgatttttgaatgcaatggtcgtctccttatttctcttttgcatgcttaaatgtttcttttacataattaaagttttgagaagaaaaaaagtaacggtagcgagaagattccttttgcatttttgaaagtttattgcattcaactaaaaagccaattgtcaacattacagaaatatgttcgtattggcacaatatatgattcttaaacaactcttcttagctttcttcttcttcttttatcattttttcatattgtttaagaatacctactagatgaaaagtaaaaggatagattcgttgtcgatattacagatattaaagatgaactcttgactgctacttaatgtttaaataacgagttaagaatattacataagtcatggcaacaaataaactaataagttatccgaacgttagtgtgttagttgacaaatcaaaacaatgaagtgaggaataccaactccagtcctctcctttcgataaagccgactctttttactcaaatctatattctaatccaacacttttgttttggtataatctccaaatagcttttttggtctcataatgagatccttctcacttcccactaatatatatatacacacacacatatactaacacattacacacacttagagaaagcagagcagagcatagagaaaaacataacaatg

SEQ ID NO: 10612 - DNA, 3000 bp, Unknown
  misc_feature (1)..( 3000): cDNA_ID_2716170_gDNA_ID_2213665_Annot_ID_132659 3000 nt of promoter + ATG
cctatacctttagccacagcaacctaaattcatccttaatgtacaaacaaatttctgaatagtagttgacctctgatttggtcacaggtcaccaaaaagagaaagaaattagaaatgaatgtttcctttctagataatacatgtttcatgtgaatcatttggattttctgacaagaagatatagaagattcccccacttctttgtgttcattaatccgacactcagttttgtttaaagtctcaaacaattgaatttttcttcgttcagtttacttttctgataatataacctttaaatcgtcggaaaaagaaaaaattaaccaactaaagaagaagaaaaacttttttaaaaaaacgaaaagagaaaaagaagacgaaaaacaaacttatgagtaacgtcaatgattagtggttgtgatcgaaacatcacaagccataccattaacacgatatactcgtgtttcaacaacacgatatacttgggttttcgtgttgaatgtcgtgtttcttccagctcacttgtttctttaacacaatattgtcttgttaacaaaaataaatcaaatcttctcttaactttatctttttttaaactggcaaacaaaaattcaaaatgaaatattgaacaaacctatacgaatctacgatacgcaattaataacatctccgtcaaatgttggtcatagacgtactctttctttttgctctgtatatagtaaagtagatgacaaagacaacagaactattaaaaaggaaaaaaagcagtgcaggctcatacgaattcagatacgaaacgcctctgtaacgtaaatgattaatttgatatggacgtatcgttacctccccacacgtggcctgaaggggattgatttgttatcaattgttttgtttgaccatcaaagcttcgacatttattgttattttcaatagttaatataacttgacttttaaaggtttatagaaactgaatatgtaaaagtttgtaagagacagatatttgtttaagaatatataagaagagtctaactctcttccaaatctcaagggtttttcttttcactaatctctagagtttggagcagattaattccacatttccactactaagtggctaagtgctaacagaaaatatattatttacaaagataggacaattttaccttaattgttacgagacgattagttttttatttatttatcccgagcatattttataccgtatatgtcgatctattttattaaataaagattagggtttaaatttagattttatggtttgttaaaaataataatatagatttatggtttagtttaattttgctgaacatccattagataaattaaaagctattttgattcattcatttgataaacgtctatttaaatgtccatagaaatctatgatacatggctaactgtgtttaacctaattaatcagatgtgccattatattaacgaagaacatgatctaaatgttaagaacggtattctataactacatatgatttgcccgctaaggctattttggtaacgaaatggtggtgtactgtagaggcgcaacgttcgaatggtacatgaacatgggacaagaatgctaaattttagataaatatttgaaaaattagtctgagattcgtttcatgatagatcctgattaccaaataaaatcttcattttgttaattattaaacaatcacacagtcgatattaaattacattacaaatctatctatatatacatttttgcagccattttagcaaataaatcttagagttgaacttatttacaatccaatgccattagcattaaatctttttttcaaaataattaattttactttaaattcttaatttaaattgtcaattacattatcaataaaatttaatccagacaaacttcacatcaatcccttaaaattagcataaacgtattttgttaacaatattttaaaataaagttttttgtttaaataaatattgttcttactaaacgttttttgtttaaataaacaaatcatgtatttgaacttatttacaatgtcatgctactgacattaattatttaggcatgaaaatatttaattaaagatttaaatcttctaaattcttgcttttagagttattatatcattatttaaagaggcaaaaaatattaattttttaaatattattatatatatatttaaacttcataaaacattattaatatttaaatttataaaaagtttattatatcaaaaaaattaacatcattatataacatatagagtttaaaaaatctcaaaacaatttcgtcctattttgtgattcgaaattttaagaatgaacatatattaaccaataggcgaaaaatgtgtgggttcaatgtcccgtaacgactaaaatattttgacaatgattcataaagatattataaataagatcaatattaataaaataaatagtttttattgtagacgggtttggcaggacgttacttagtaacaattgcaaactataaaataatttacaaatttttatatatattaattgttaaaaatgagttgtcgggttaaaatctagttatagaccgaatttcttgagcagttttcatgaaactcaaaacgaaatttaacataatgtgggaccaatttcaggatcacatctatatatatgtatatatattcaggcaagacatatcgtacaagttgaagtctcagtgccatacaataatatcaacatcttcgtagtctctctaatggcgtcgcttcagtgttcattccattttctgggcacaaaccctaaaaaatacaatcccagttcgatcttccaaagctactctcgaacctcattcaccaaattatcctctcgtgtctctcgccaggttttttttttttcgttttttgttttcaatcattttcaggtttcagcaaaaccactctgtttttctttgtcttttacgtcacagtatttgaaaccctctttgtgaaacagaggttcctacgctgtacactgtctatg

SEQ ID NO: 10613 - DNA, 3000 bp, Unknown
  misc_feature (1)..( 3000): cDNA_ID_2716166_gDNA_ID_2213665_Annot_ID_132660 3000 nt of promoter + ATG
aatatacccctgtattctcttacttattacggtgttatcggattttgggcatcgacgaatttagctgaattttttttttttctggccttttttttttcttttgctaattgtagaaaatgtttctaaacaattttaagagaaaagttaaagtagttaagacatgatgtgctataataaaacaccaagtcaacaagctgactatttattctaaaatgtcaatggcatatacataactctacgcaaccagcaaaaggccttagatcgtggtccatttaaatatgtacttgttaatatcaaattatcaatcacatgtgatatgtccatgataattcatcaaatatatcatgatatatggtcaattagtttctagtttaaaactcatataacgtaagattatgttggtaaatttaattacaactctagtgttatatttatgattaacacatatatcatatattactagtttgatgccaagtctacgtaccaagtaccattcatttggcaaaaaaaaaaaaaaagacttagttaaacaaagagacaaactgcgctaaacctaaataaaatatacaacttgaaattgattaaactttcctatggaattttgtttgtagggaagccacaaaaaatttaaaaattgtaagctgattgattagatatgaccatttattttgtgttctagatttatagttttgctcatacatcatggcatatatttgagtggtttgtgtaaatatttattacgttttgcactcaccaataattaaatctgcagaaatataaatcttcaacaaaaattgaccttttattaattataaagatattttatttgtgtaatgtcaccaatgtatgactttaagttcatatattggagtgctcgtttttgtaaacgcatgtatatcatagctggagtcatatatatttttcttggtaattagtattttcgatctatagtcaaggtcttttctaaccgctgattaataatatcaaaattccactgctccacaatacattaattatattgtataccaaactttattctgcgtttagattcagatccagtagtagataaaataataattccgatccaatacaattcatttgatgctttaattagaacgatcgatggagcaactaaaaccgaatttggtcattctttgccatttgaaaaacaaccagtcgtctcatttgttgttaataagttaacattgatacgtacgtcggtacgcgagtggcaaaacaaacacatcagctctaagacgaaacacgtttggttttccaaaaaaaaaacgatgtattgataagctatattgacttaaaaggtaatatagtaacagctatcgaaaaatactacgaataaattagctaaattataatattaattatattagactatttaaattagcaagaaatctcttggaatgatctttctattacctattttggttcattctcttgttaattaaccatagtaatccatttgcggattggcctgtatctagacatttgttctgtcgctaccactagaagtttatcattttgaaaatgaaaagataagagagataaaattgtaacgatgtgatcaagaaatttcaacgttgttctttagcagcaacgttggccggtgggtccataatttcggctccaaaccttataacagtgtttgttgttgagacatagctattttattataacattaagcgttgaagttcaatatttcttttccaattagtcgacactatcgatccacgaacaatattcttctttcttttttccgaataaatcggatgcacaatggttgtttttattatgtacgtgtgttggtattagtttaaagggcagaaaaaccaattaatagtatattataatatcccattcatatttggtcgtatacattgttatttttaacttatttgttttgttcaattggattggctgttgacctttcaagatttcattgttgcgtgcttgtttttctcatggtttgaaacattgctgcataaaatgagtaaatagaataattgtacaaccacttggttcaatgtttttacattttatagtctacaaaaactctttataaactagtatttaatttctgattttggaatttcaacctaccgtaaaacaaaacagcgagactatctaattacaagactataattgaattttaaatcttaatttaatattatatgtgcactatatgtttcattctatttaagatagatatttggtaattttgtaaattatagaaatatgtcatgttctctgaacattattaatataggagacttgcatgtttttgtgaattgtttaattggcatagtcaaaggatgtataggttgcatatatagaaatcaacagttcccaagagaaaacatgagagctaataaaaaatttatcaaagaagactaatatggagaaggacgatttcttgaggagtggtcatggaagagaagaaagccatgatgagatgagaaaacttgattcatctcacgatgattctcatcaagaacacgaccatattataagatccaaggtatcataaatttccttttgtatagttttcaaatatttagacgtcatttataaatcgcataaatcaatccttggaattacatacatgtatctttcataatcttatcacatagatggtttgttttatccaaaatccatttttattaattgattgattagtcttaatcaatgaatcttaatttgaattctaaaatcatactaaattagatcttcaaatctcttgtcagtttcataattttctgtctttgcggaggtttttacgaagaatttgctcatctatatatcacaagtacaataattatgagaaagaaagaaaaaaatatgtattggatttttgaggcatgcatatataatttgaggaaagatcaaccaaacgatagatatttgtatatttgttaagcatatcgtgattaaccatatcttataaacgtatgatgagatcagttggactcaactaaagtcgaaatg

SEQ ID NO: 10614 - DNA, 3000 bp, Unknown
  misc_feature (1)..( 3000): cDNA_ID_2716163_gDNA_ID_2213665_Annot_ID_132662 3000 nt of promoter + ATG
cgtagcgaatcaggacaaggtcgactcgcaatccgattatccaatccctcttagccacgatggtatctttgcgaatctgaaaccaaagctagaaaaccctaatcttggtacccttgtcaatccaatttccgggtggggaatctctgaaagtgatgttgaagtcatcgatttgggtaaaaagttttcatctaagctgaaaaggaagcttaaggatactaacgggtttgtcaaagatgagtttgtcaagatgttaaagcagtttcttgagaaaattggtgagaaagttgggatttcagaggctgagtctgagatggttttgggagatcaagctggttctgagatacagatactggtggagaaaaatgggtttttgatgggtagagatgtatctggtttagtgttgaaaggttgtattagtctagagatgtgggagctagtggaaattttgatttcaaactccttggttgatcattcttcatactcttatttagttagcaatcttgttgagaagcaaaggtcagatttgctttgcgtagtgatcaaagaagcttcagatcttggggcaactgagctactttcaatcttgaagtattttttatgcccatcaaaggaagcaattagcactatggctaaggtaagagaagaatgggagagtcaggctatgttggctattgaaaaggtgagcaacacagagctatcaaagaagtctaaagttgcagaagaggcttctatcttgttaatggttgctcatgacgggttttcaacctcagagctttgcctgcattacttgttagcttcacggaatgttgacgaagtcatgtttgcatctgcagtcagtaagttgaatggcaatgagatgggtagctttattcgatacctctctaaatggatgaagaagtatgagatgttcccacaagctggtccatgccctaaagccgcctccaagcttggtttgaaactatgcaactgggttcctgaactcacagacattaccaaatgtttgggacttcttatcgatgagaacttctccactctggttctgtactcggatttgcatgaagagctaaagtctattgcaagagtagccgatgggttagcttcagaatcaaaactttcctgttttgtggctaatgtggttgaaagtttgaagcttggagctgcccgaaactagattttcacaattgttggagcttaatgcaaccctgttttcactttttattatggtctccagtgacatttgtattttctagtttcagttcatctcttaactaaagtataattttgttcgctatctttgagagtttgtctccaacctctgcacattgccaatctcatttaggatgcaccacatggtttaaaattgttttcttttccaagaattctttatcagttacaacaggaagagtaaaaggtttatctttgcaatacaacagcttactttgttgaagaatgagcacaagttgttgctcaacgaagtgtctcacagagccggataataaaaaccgttcctttatgaacactcacgagaccttgccgcaaaatcaaacggctaatgtatcatcaccacgaaagtgaggtactctcgctgaggttgaagaagaagaaggggcaagaatgtaattacatccagaaatgcttcatagttacgcagctgagttattacacttgttcacaaagtaagctgcagtctggggactacccaactcctaactttcttcaccttcttaaattacctatctgtcaattatcatcatttcccaattgtgttgatacttaattggtagtagcaattttttccattaaagttttcatttttttggttttttgttgatggaaaaagtattgatccaacggctgtagaagaacggtgcaacaagattttgaattcggagatgcgtttgttttagttttaaaatagaaataaataaagttgttctctctctctcttcgtggacactggaactaacaccaccgatgcactacactctgtagagactgcaaatggaaagcatcttttggtaatcacgggtactgttgtcttcgtcttagtttttgtcggaaatcagacattagatccgaccagattctctatttggagacagacattactcggatctttatttcattttgtatgattctttattgtagattttgagatcaggtagtgtggatttgagatcaggtacatttacttgcaaggtgagttccagatctggttttggttatttcatttctggagttttatacgtttttgcaattttggagattttgttgattttagattaggatgatcattgcattttctttctctttcttgtttgatttcattggttaatgattgtggattactactatttaatctttttataaaaaaatccaaatccttagctcatgtacttataaaagaatgattttatgtttgatagtgatctatacatagttataaacaaatggctgatccattgaacttagtatgatgaatcctgttacaaagagcttatgtatctctttaatgtctaaaagctctagatagaaccaaaatatgaaaattgcaatctttagtaatgaaagtgttgtgttatagtcttgtgttattgcttgaccataatattttgtgattgttcggactaatgcaggtgttttgaattttggttgtggacataatgggaaagcctgcaaggtggttaaaaagtgtactacttggaaagaaaccatctaaatctagtggttctaaagataaggaggtaacacacttccgcacaatgttgtatgataaaacaaatgaatttcaagcttgcatagttaaatttctcaggttgattacagtagtggttctcgtagaggaccttgactgcttgacatctcttttactagttttttcactttagacattgcaaatttcccactaattttgtgtcgtctactattgtctatggtgtcactttctgatttcatttccctttgttgtctgtttctaattgttcctgacaacaattctct

SEQ ID NO: 10615 - DNA, 331 bp, Unknown
  misc_feature (1)..( 331): cDNA_ID_3037448_gDNA_ID_2213665_Annot_ID_182082 3000 nt of promoter + ATG
ttctggtgagctgaatttgtgtgttccgaccgaaaaatcaggaagaagaagaagaagattgacaaacaaaaaggattcacctttagtgactgagtgagagaaagagattgaaggaaaaaaaaaaaaaagggtgaagctttggagagaggataaccacgtagaggattctaatccgtggttgcaaacgaaggacccagaagtgaacacgatactctccctcccttcccttgttcaatttctttctttgttctcatcattaaatttctttgacccaaagtttcaatctttttcagtttctggaatctcttgcttcgatcgaatcactctcatg

SEQ ID NO: 10616 - DNA, 3000 bp, Unknown
  misc_feature (1)..( 3000): cDNA_ID_2716116_gDNA_ID_2213665_Annot_ID_182080 3000 nt of promoter + ATG
cgcccaatcctggatgatacttctctatcatctcttcatacctgtcaaccaaaccttcccaaaacccgtgcaagtagtattgattctccacataaaccttctctatccatttttccttctgcgaaagcaagagatatatcaacgccgattgatcatcggcctcaaatgctggcctgcctttcagataagctgtcagtatcttcccagtttcgtcacggatcttcccttttggtcccattggggcccaagcatctaataaatccaatgaccactgacaatttctcaacagaaagatacccgtgttcaatgcaacccatgatttttggttgaacagcaagtctggataaccgtgtatcaccagattatgattttcgtaccgaggcaacgggatctcaaacagtatatcagtgaacaaagcatcactatccatccaccaaatccattctacttctggatgagacagcattaatgtcctaatcataggtaatttcgtccaataccctgagagttcctcatccaaattcgccatgttatacacaatctctatcccgtggagtctacagtaatcaatcttgttcttcacagctttcaatagataatagtttccaattggtttatcacagggtccgggggaagaccctgtgagaagcaatattcgagctttgccattgacaatattaggaaactcagggttctgattcagccataccttgcgttgactatcccagttggtgattttgggccctagagtatatgtcgcattgggactaatatcagctttaggcggctcaagcaagtctgtcaaatgcgaatcagatgggatctccgcgattctggggcctagagtatacgttgcattgggactaatatcagctttaggcagctcaaccaagtccgttgaatgcacatcagatgggatctccgcgattcttggctctagagtatacgttgcattgggactaacatcagctttaggaggctcagccaagtccgtcgaatgcgaatcagaggggatctccgcgagaatcggaatggtttccttgatgaaactctgattaacagagtcggcgttggagcttccaaggttcccaacacggattgtgccaagtaggatgagaatggtcacgaagcagcagagaatcatgaacttgatgttgttaaataaggtattctggatctgccaaccgcgcaaaaacccacgggttctccatccaccatttgatacagccgttgtcgacagtcctctgccacttcctgaggatcttgacccatcctgaaacatttcacttgttgcctcctgtctctagatttcactcacaggggagagacctccagatggcacttgaatccagacacggtctaacttataactataatcggtgaagactgtctttttgttactcacagaatgtgtagatcccacactctctccctctctgaactacaccgctctgaaacttcagatttttggcaggatcctgatggaagactagtagatgatggacttggacaatctgaagagcctcttttaaaaatcattaaagaatattaaattggataatggagaaacctggttgtaattaaatatatttgatgcggagcaatatgttttatatgcatgccaacattaagcatcttattaaatgaaaaataaaaacctttcgcatcttcaacatatgaatattcatgccagattgcttggatattttgccagagaggtatcaaaagcatgatgcttgatatctctacaaacttaagtgactctatgcttacatatcaaagaagagccaaccatgtatacgcaactgtaaacaatctactcagaggcttattatacctatatcagccttggtttggaaatgaaatgcatagtcttacaacgtaaaatggcatcaaacttcacgttgaaacctctacgaaatattatatgtaataacaagttggatccaaaagaaatcatatacccaaattcaggaaatggaattggagatggtaaagagctcgtttagtcaactgaccataagaaacgacttcccagcaggcgaagttatatttgcaaaatcttccacaacattttcgttttcaagctcctctataacatgctgcaaacatggaaccattaaaccaagcaattcgttttcatataaacagaataaatgttcattctttttcagtatgctgcagtaacaacttactgctgtttcatcattgccaggtgtcacagtcccttctctatatacgagatttcttaacagcttaaaggcgtagtctatctgcaaaacatttagtagcactgatgatattaacaacataaagctaacagatttagcacacaacaaactgacagacctctataaaatctgatgagcaagtatatcctgaaacagatagaaattgagagaaacagtatgaagaatgatggtgaagaagaagcatcatggaacgaattcatgtcatggtcgattttgaaaaacgttcttcaagtttgtctgcaatgtacttgaactaagaccacctaaagtatagttctaaaattcaattagcctacttatactaacagaaatagagtacgctgagtttatccaagactcttcacgaaacaccacacacagacgcacacactcacccaacagtagatactaatttcaggactatctatggagtataagttactcgaaggtggaatcatgcgattgaaacaagactcaaatgaaaacagaaagaaattcaaccgaaaatgacaaacccgcagaagagtatatacacggaggtcatggacgaagacgacggagtttctttcgccgtctgatttagcaatctccgatcaaaagatttttcaggcgtcaagagttgccaaaaagagaaggaaaatgcaaaattccggtctaatttaacaagaagccaaaattacccggttcggtctatgtttacttgaaccgaatttaatttaccttcccggttcaaaaacccaaaattctagagagagaggacggcaatgcg

SEQ ID NO: 10617 - DNA, 3000 bp, Unknown
  misc_feature (1)..( 3000): cDNA_ID_3037460_gDNA_ID_2213665_Annot_ID_182078 3000 nt of promoter + ATG
ataggtataataagcctctgagtagattgtttacagttgcgtatacatggttggctcttctttgatatgtaagcatagagtcacttaagtttgtagagatatcaagcatcatgcttttgatacctctctggcaaaatatccaagcaatctggcatgaatattcatatgttgaagatgcgaaaggtttttatttttcatttaataagatgcttaatgttggcatgcatataaaacatattgctccgcatcaaatatatttaattacaaccaggtttctccattatccaatttaatattctttaatgatttttaaaagaggctcttcagattgtccaagtccatcatctactagtcttccatcaggatcctgccaaaaatctgaagtttcagagcggtgtagttcagagagggagagagtgtgggatctacacattctgtgagtaacaaaaagacagtcttcaccgattatagttataagttagaccgtgtctggattcaagtgccatctggaggtctctcccctgtgagtgaaatctagagacaggaggcaacaagtgaaatgtttcaggatgggtcaagatcctcaggaagtggcagaggactgtcgacaacggctgtatcaaatggtggatggagaacccgtgggtttttgcgcggttggcagatccagaataccttatttaacaacatcaagttcatgattctctgctgcttcgtgaccattctcatcctacttggcacaatccgtgttgggaaccttggaagctccaacgccgactctgttaatcagagtttcatcaaggaaaccattccgattctcgcggagatcccctctgattcgcattcgacggacttggctgagcctcctaaagctgatgttagtcccaatgcaacgtatactctagagccaagaatcgcggagatcccatctgatgtgcattcaacggacttggttgagctgcctaaagctgatattagtcccaatgcaacgtatactctaggccccagaatcgcggagatcccatctgattcgcatttgacagacttgcttgagccgcctaaagctgatattagtcccaatgcgacatatactctagggcccaaaatcaccaactgggatagtcaacgcaaggtatggctgaatcagaaccctgagtttcctaatattgtcaatggcaaagctcgaatattgcttctcacagggtcttcccccggaccctgtgataaaccaattggaaactattatctattgaaagctgtgaagaacaagattgattactgtagactccacgggatagagattgtgtataacatggcgaatttggatgaggaactctcagggtattggacgaaattacctatgattaggacattaatgctgtctcatccagaagtagaatggatttggtggatggatagtgatgctttgttcactgatatactgtttgagatcccgttgcctcggtacgaaaatcataatctggtgatacacggttatccagacttgctgttcaaccaaaaatcatgggttgcattgaacacgggtatctttctgttgagaaattgtcagtggtcattggatttattagatgcttgggccccaatgggaccaaaagggaagatccgtgacgaaactgggaagatactgacagcttatctgaaaggcaggccagcatttgaggccgatgatcaatcggcgttgatatatctcttgctttcgcagaaggaaaaatggatagagaaggtttatgtggagaatcaatactacttgcacgggttttgggaaggtttggttgacaggtatgaagagatgatagagaagtatcatccaggattgggcgatgagagatggccctttgtgacacattttgtagggtgcaaaccgtgtggcagctatgctgattacgcagtcgatagatgcttcaagagcatggagagggcttttaattttgcagataatcaagtgctgaagctgtatgggtttagccacaggggactgttgagtcccaagattaaaaggatcagaaatgagacagtctctcctctggagtcagtagacaagtttgatattcgaagaatgcacatggaaaccaaaccatagagctaggaaaatcaatgagtgaacggaatcacagtttggcaagattacaggaaacatatagatgatatacaaatactctcacaaacacaatgcaatttgtttaccctgcacttgttccttgtgcttcattgtttggtctcatgaagataagttttaactgtcaaattcttattccatagatgtttcttgtcattgttggtcaatatatggagaaatttgatactgcaattttgcttgttactcgtcttttggtatcttccttttagacaaccagctttggagaaaaggttagacaaaatatccagaggttgcatgtgtctttggttattcattccaggaacgtaatgtgtccagttgaggtattggcatgaccaggtttggagtcgtgtcttgtatgtaaagtatatagagagaggtaaagagaaatgatgagagttttattttgtttatttcacaatatgtgttccattcaggtattaaataaacttttgcacaaaacaaaatggtagtaataatgtatttaccatggaaatagatagttgatcatttgtattttatttaaaaattataaaggttttggcaattttatctgtaaattcgtaatactatctaatattgtttggtagtcgtcacatattaatctttttttttgtttttgttaaaaataacatattaatcttaaaccataattatatttaattttagaaaaagagagatttagtatgctgtgatctgataagatacgattttaaccataataaaagagtataattacttacttaatgctaagagtcgatccctttttttatttattaagaaaaacgcggaaaaataaccgaaggagatttacacttatcacatcgagactctttgatcggagtttcccaaaatccccgatg

SEQ ID NO: 10618 - DNA, 3000 bp, Unknown
  misc_feature (1)..( 3000): cDNA_ID_2716126_gDNA_ID_2213665_Annot_ID_182077 3000 nt of promoter + ATG
aaaaactcatatgtgatactttcaaaaaaacttttattttcgtcaatattctacctactcgtaataagaattgggttattgatcaaatttttgtcgaccgaattgattaaaaataaataaatatatatatatatatatatatatatatatataaaccggagatcaaattaatagttcggatatacttccatggatgcaaaaataaagtatcaaacttcatttatcatgtagaatatatattaaaggatatgtaagatacaatcatttataatttgtttcggtttcacacttaatatagttgagccgcgttaatcattgttctcacttctcactgtttttttgtttcccccaaagaaaacttctcactgatttacacgtacgctatgtataaatccacgaatttgttttttttttatttaactataccaattattgacacgtgcttaaattcggtaaaagtcgcatactttaaaatatttttctttccttttacattttaaaatatttgaggcgaagttttcacacttatatattatggtgacatgttggcttgtatagtaattgtatggttctatacagatgctgagcacatgtcaaaaacaatataaatacaagtacaaaattttgatagaagcaattcgaaagatagcaatacaaataaaaatgctactagataaaagtaggacagtttaaagaaataaaaatttatcaaaaattttgatatagagtaagtatcaataatttgggaaaaaaaaatctagctccacttcaccacctttgtatagccacttcactttgtacaacccaatattaggtatttgtactactcttttaatataaactatgcaatgcttctatttgcacacttttgtataattcctatgattggttacatacaaggccttacaatcattaccactactagtttatatatgtaactaatcaaaaccataatcattatatttgattgtctatttgttttgtttggcacaactatttactaacaaattaaaccaaatcttattatatttaatctccatgtggtcgaaaaattaaatatagttttttatattatcaattgtgatgagacccctctatcacatttttcttgatttgtttgtagctattgtagaagaagaaaacaactacttaaaaaaaaaaaaaaaaaaaaactttcagaagtgataatctttgtccgaaagagattgatagatgactttgataatgagaaacaaatacacaaaaaaaagcatttacaaaaagtacaaaaacgagaatcatatatatatatatatatatatatatactgaaaagaaaaagagaattacatatttaatcatacaaaaagaaattaaaaacaagaaaaagtgaatgattgttgggattatttctcgttaatatgaaaatgtctaccatgaaatgatatgtgaactaacgactttaattcactaaagaagagggtatcccacatcaatgataagtttggcatcaacaatcatgcacaattgcacatcacgcctctgagtaggcgcatgagtgtgtgaatgaggaaatatgaaaaggatgagagagcaaaaagatttcacacagatcacagatggaattcgaatcattcgaccaagaaatatgtgaggaattcgaatcacaggtcttacgcagtcaacggaccatccttttttctatattaatttctaacttctaactataacattcaaaaagtccaaaatatgtgaggaatgattaatgtgaacactggtaggtttatttactgtttttccatttatttacattgacctagtgtaatggtatcatactatcatctgcaatctgtagtgccacgtcgccccaaaaataatgattaccacatccacatgctcttctactaattaaccgttccaaaaaattatctagtatcgtcactaattaatagtataaagtaagattatcatatacgtttatcaaaaaaagaggtgtgagactatcatacttttattaatagccaggaagagaaagaagaaaacgttcaacgtactaacactattcagtatccacacatgtgcgggaatatatgaataaataatagtatcatttaccattttttataacaagatcatcttactttagctctaacccctttttgtttctagattgtctacgaatataaaataaaaatatagtattaaaattttatacgtggctaaacttacattttattgtattatatcacgttaaagctaagtgactaacgaattatatatacgatataataataataatttgtggttaattttaaaattttgttaataaatgttctataaaaattaatatatattgataaatatgaaatttattaaaacaaatttatcaaaaatttcatggttacgtacaaaaaatatataatcaccaattcaccattttgtttatatatgttcttattagattttgatattttgataggtaaaaaataaataaatactggggtaataatttacgaaaagtttttaagtgttagatagtacaccttccatttaaaattaattgtcgtttaaagttttttcacgagtataactaatacgaaacaaaaaaagtaatagatactatcttttcttttcttcttttacctctttacacataaattttggcaagatttgggtatttggtatggtaatagactaatagtagaaatttgtgctcgataaaactttcgatatctaacggcaggaattcgaagtaaaatccaacggcggaaatataataataccaaaacaggggggggctatataattgtataaccctaattagaataacgcatcccactactcattctctcgagagcatcctacagagtaaaacgtgtagagagagactcacttttttttctggagagagagacacactttcaaataaataattgaacttgtttaaaatttgtcttctcgtgaggtggtgaaacgtggcaatattagattggttttttagtttggttggctggagaaaatg

SEQ ID NO: 10619 - DNA, 3000 bp, Unknown
  misc_feature (1)..( 3000): cDNA_ID_1663143_gDNA_ID_2213665_Annot_ID_182076 3000 nt of promoter + ATG
ggtttacaattacaagctcgaagaggctttgaaacatggaagcacgaaggttactgacaaagacatgacaagctctccttcttcacctctgctaacttattttttgtttttaaagattgattagttttggtttttgtcaggtagaatcgtgcagaagcgtatttcccgctaattgttcctcatcagactcactttccagtctatacgaccaattaatttagccccaattgactaaattttttatacttaaaaataataaatattcactctgaccaacttgcgaccgaagaaatcaagaaaagcaaattaagatagtttaccaaacataattatttatatttttaagacatcggatgtcgtcaacaataaatttctgaaggagacaattgctcctaacatgatcgttcaatgattcagaacacaagacaacaaagaagtacataacatatattatatatatggaagctagagagtatatataatgttgcatgactgatataagaaaatatataatgtgtatgtaaagtggtttatgattcacaagttagttttctacttagtaacagcttcttcaagctctcttaagccaccaaccttctgttcaatttcttcgataagttcttcacgccatagctccgctcttgctttctcttctatgtcttcttgctgcatcatataacccaaaacacaataacaactctatccaatcttataatagttgtacacattgtgaatctgtgatgatataccaaaggtcaatggcccgagcaagcccagcccgacccaacttaggatcaatgttacctaccatcagatctgttaacgtttgaattattatatcaagcccaacccggctcaaacttactaagcatgattgatctatcaataggatggatcaatgttacctaccatctatcagattgtgactttcgtttagatgatcaaggttgtggattcatatttttgggtgcatatataccaacggtaaacgctaacctaaaagcacctatttttctttgtttagggaggtttatcgcatgctgagacacatggaggagtactcaaaaccggctctgaacaggtctacatggcctactaagaccaaggtgggatagtctgaggtcaaactagatctgaactggtccacagggtctagtaagaccacagcgggttggtcggtccattgcaacatccctagttataatttgtatgcatttctaagtttttttctttctttcctaatagtattagaaagggagagatacatacagtttcatagacccaatatccagttccatcccctccatctccacggtactcctctgagtcgtagaatggatcctgtattgatccaatatcacaaagtactattaagatcccaatgcagcaaatgtatcaaaagattcagtttgagttgttgttttcatacttttgctgaaccgaagtacaaacatccccaacaagtgaacatgatgtagaacatatctgccatatcaagatcaatatcaaaacataagaaaaagaagaaaaaaaagtctaagaaagaaaataaaatctctcaagaaaccccaagtgtttaacttacaaacattcttgatagctttatcacttagatgccacacgtgtttctctgtaatgatatcacgcattccttctatttgttgaaccatcacagccattaatggcaaatcatgtggcaatgcctttcttacacataagcttcctctcatcaaattcctttccctcttctcattaacattcttctaatttttcaaattctaagacgtaaattcacaagaatatggagattttttttctaattttagtcttagttagagaaaattacttacagatagccaatatccatgattcggtcctgaattctgcttcggctacaacacaatacacaattcttaaactttttttcgtaatgaaatatttttggtaagaatataaaataatatgtaccgagtgattgtaggaagaaggaatatgaagatttgtgaaggtgaaacttgtgaaagcttcagccattgttacttcttgatggtggcaatggagaagaaaaaaaaaaaatgttggtgtaatcttttttattttttcatttattttaatctttaagattagattttttgaggcagaaaatgtgtggataagggaattggtatcgtccactcttcacttttgtgataaacaaaataaaaaaataacgtacgttagcaatcacatcgcataacactttttttgtcttttaaaagcccaatttagacaatcacagtacacattttagccttctaaaacgctcaggttgggaacaactatttgccttaaagagtggtaaagatatttccagcaaaattcaactacaaactttcgtattttacccgtccaacaaactttccattcgcgcaggttagcaatcactaaacacgttcactcctctagacgtgcaagttagtaaccacactaaaattgctaataaatctttggttggtgaaattcaaactttccgcttatgtctcttcccaaatacatcatttgttgaatagcgtacgttggcaactattgccaaacttttaatgatatttccatctaattcaacttcctatgcgcgcatgttagcaatcatcccaaatacatcattcgttgaatagtgtatgttctatttgccaaactttcaatgatgtatatccatctaaaccagcttttattcgcgcatgttagcaatcacaataacacgtctactcttcttagcgactagtattttgtcaaaagtcggaagaaaatctccggccaagtcaacttctatcgctttaaaaagcgcatgttagctattaaaaagcgcacgttagcatcattttcgggaaattgctaatcaaactttccactttcgtcttcttcccgtgtatatctttaatctcctctgtttggtgactattatccaatttccaccgatcttctcctcataaaaacacctcttcctcaacgaattttttatcc

SEQ ID NO: 10620 - DNA, 3000 bp, Unknown
  misc_feature (1)..( 3000): cDNA_ID_3037464_gDNA_ID_2213665_Annot_ID_182075 3000 nt of promoter + ATG
ataaaacactaagctacatatttaatcaatatgaatttaatttaggtgatactgtattagtgtttttatgattacataaagaatcataaaagtttatatttaagctaccagttttactcattagttaaacacaaagaattgattggttcaaaacggactaaaacaagtcgagcggaacaacaattgacctgtgaatatgtgattgtaatacatgcaacgcattttgtttatttttcttgaaacatgagtgactgaaacatattatattcaatatattgaaacatagtttacacacaaatacatcaatccatggatcatggtggtcttattatcatttcggttatagaaacacgacaatgggttcaagttcttcagttatatataatccaagcttatgtgatcttattcttcttctgcttctttgccctatattccttgatgtcactttctaccttggcattcacacgcgcttgaaaaccgggatatggttcatacccgaaaaccgattgaagaacctgtattcattcaaacatttccacattagcttttcatgtattctggttacagtttccacagagcagtataataaggtagcaggagataacaaacaaatcacaacataacataacaccaacaacttttacctcgagcaacacgaagaaaggagccatgagaaaagcttggagtaaattgtctaacagcgcaggtgcccgtttctgtgagtagacaagaatcaataacatatgtgttaggactcatgtatacggatgacaagacacaaaggagaatcaaaacaatgatttctaaaagccagagaacttacctcgaatactccatggccaacgaactgcccggtccaacataacagctgagatgctaacccaacctgagtaaaaagacaattaaattgttacagtatctacataacagagagagttggcgtcttggtgagtattaactgttttccccttgctgttgaatacatataacaaactaatcaaatgattcagactgaagatacatataaactaatcaaatgattcacaacacagaagatacataaaaaagctcctaagttacagatgtctcaaatactatggaagaaaaaccaaactttagttaaacaagtgatgtagattctaattatctgagaccatccaaatgttggtggtcaagaacaacacttgtttccgtccaagcacacatcaaatcctcttaaccaatgagtcaacaacactaaaaacatgacaagtctccggaccaaagaatcagaaccgtgcaaaggtggacaattgcagaacaaactgcaataactactaatcatgaatgttcaaagctagagacatgatattagtactgctgtctcaacgttaacagctaatgaagggacccatagacaacagatagagaggactaatgatataaataaatctatttcttcttccccgagcataaccaatgatataaacgaactttcaagtcaaagcatagaaaacaatgaacaataaatgcatgaaccacactcacatcatataaatatacacatagagcaacacatggatacacatagtcatataccctcataaacatgcttctacgcaattattttctccaaaaatgaagttttttcaaaaaccctaaattgaaattagagaaaaaaaatctaacctttaaggcaagagaagatcctagtcgaacagcaagaaaactggaaccaacccagcaagagaaacacataagagcagctacaaatccagatttcttatccaaaccgatatagaacagagcataaatcaaggcgaatataaacccaacgttaaatcgcaaaacgccgtcgagggtcaacgattgagaaaaccctaattgagaggggtcgaaaattggggtcgacgagtggaggagaagtaaaactgagaagaagattggccaaacgaagatgatgtggattagaatgttgatcggattgctatggtaagcaccgtagaaggcgaagtgtttctcgagatcgaacaatcccattatgcgactcatggataaaaaattcgttgaggaagaggtgtttttatgaggagaagatcggtggaaattggataatagtcaccaaacagaggagattaaagatatacacgggaagaagacgaaagtggaaagtttgattagcaatttcccgaaaatgatgctaacgtgcgctttttaatagctaacatgcgctttttaaagcgatagaagttgacttggccggagattttcttccgacttttgacaaaatactagtcgctaagaagagtagacgtgttattgtgattgctaacatgcgcgaataaaagctggtttagatggatatacatcattgaaagtttggcaaatagaacatacactattcaacgaatgatgtatttgggatgattgctaacatgcgcgcataggaagttgaattagatggaaatatcattaaaagtttggcaatagttgccaacgtacgctattcaacaaatgatgtatttgggaagagacataagcggaaagtttgaatttcaccaaccaaagatttattagcaattttagtgtggttactaacttgcacgtctagaggagtgaacgtgtttagtgattgctaacctgcgcgaatggaaagtttgttggacgggtaaaatacgaaagtttgtagttgaattttgctggaaatatctttaccactctttaaggcaaatagttgttcccaacctgagcgttttagaaggctaaaatgtgtactgtgattgtctaaattgggcttttaaaagacaaaaaaagtgttatgcgatgtgattgctaacgtacgttatttttttattttgtttatcacaaaagtgaagagtggacgataccaattcccttatccacacattttctgcctcaaaaaatctaatcttaaagattaaaataaatgaaaaaataaaaaagattacaccaacattttttttttttcttctccattgccaccatcaagaagtaacaatg

SEQ ID NO: 10621 - DNA, 3000 bp, Unknown
  misc_feature (1)..( 3000): cDNA_ID_3037483_gDNA_ID_2213665_Annot_ID_182069 3000 nt of promoter + ATG
ttttttgatggggtcggcaacatatttattattttccatttttaaatactagaaatctgatttaacttttaattaaataattatactaactaacggcgttactacgcttgtttgacacatacaattgttgacaaaaccggaaaaaggtgttttgcatcggcaaatacaaaacggaaaaagaccccggcgacaacaccacgcactagttcattgatcttcacatggcaacttgaaacgacacaggggacaatcgtgattggtctcaaaccagtttaggacacattcatcgtcaaagtcatgtctaccatatattacgacgttacaagaatgataaatatatcaatatgttaatgtttttataggtgttggccaaaatattgtttgagccaaaagaattgaattttaagattaaaaaagagtttatatgatactgtctaacaaagattcctccatcgtgatggtggtaaacacatgaaccattgatcgattcatctcggtgatgattttttcaccagaatcgacgctcaaacggttattgacatgtggctaagatggagtccgacgaaaatttcttcaacaacaagcggtgatatattgagctctttttgggcctttaatgtttctggggctttatgtatagcccatgtaagatttggttgtggttaataatttctacttttgtgacaaaccctaaatccaatttacagtctttttgtttttgtttttaaatatgtacatagattttttttaatctaatcttaaattacacattatgatcaaactatcagatttaactatacgcaactcatgcgattatgatgtacgaatccacaaacaactccacgatgtgcaactctctctctaacatagtgatctcctacctaacgattctttatggtggatcatacctacgatgaacgatcttattcttacctaagacggacgattctgcttgcaacattatgagacttccgattagtatgccaaaatagttaattagaaaaagttaattaattatattaatcaatttataaaggtattcctaactcatttgacccatttttgggtttttgaccaaaaaatccttaagagcgttacgaacaaggttacatcggtaaatacgcaatacaaaatgagaaacgaatatgttgtagttttccaaaatttaagaaaaaaggaaagtaatagtatagaaaatccgaaaattagaataattgacctaaatccaatctacagattttgttgctaaactaatttattttttctaaaatttaattaattatattaattaactttaaaaaagcattacaaagaaggtttgacccgatattgttaacaaagagcgttaggaacgaggttacatcggaaaatacacggatacaaaacggaaaaagactcatgcgacggcatcaaactagttcattgatatggcaacttgaaacgacagagggggcaactgtgattggtctcaaaccactttaggacacactcatcgtcaaagtcatgtccacaaggtaaagtaacaactcttcttccttcactaaactcttccaaacaaattatgcacatttcaccagtagaactagtggtcatcttgtatatcttcctggctaaagacttgaccacgagcttgcttgcgggcctcaaactaatattattggtctcctccaacgaggctcgaaccgcttcttccatctgatactcttctccaattggaatcgcgtctccaatctgaaaggtaggaataagacgcaaggacactagcaactcatctcccgtagaatagttactacgatcacatactgcaatagcatattcacttagcattattagtgcaaatatggtatcgtcgtcgccgattcctgaactttattagtgcaaatatggtatcgtcgtcgccgattcctgattccattaagaagtaattgaagtattctttgcatcgacactcatcgttatcttcgtcaaggaattgttcggcaaaagatgaaccagtaaacgtgggattgtaaccgtcgatctttgcatttactgtgattgtgccctcgttttctggttgaggattgcgtatgatactgtggctaaaatatattttcatgattgattgaagaatgaagatgatgatgaaaaaagaagaagtaagaactcaaacttctaaaatggttcttgtgtgtttatgttgttgtcacagacgttatttgtagaggattctactacgtttgttatattggtgggatttggaatcatattatttattatagggtcttttgcaaaagtaaccattgtggaaaaagttattaaatttttaacatcataatctgacaaaagaaataagtacaataaagttattaaatttttaacatcataatctgacaaaagaagtaagtaacaccagtggtatctaaaaagactattttgtccttagtgtctaatacttcaatttctatactatttggaaggttttatgaataggcacatttttgctcttgctttattaatatagactcatttctctgatctctgtaaacgtttcttccactaacattctccaatgatcccaataaatcaaattaaatgagaattttgatggaagaaatttaaatgagaagattttcttttggaaagattccatttttttttgttattatcttatttatttttcatttttaaaatacataaatctgatttgcctttctttttttttaatcacaatattggattgggaaagaaaaactctgggtagaataaaattaaataaaaaagcattgacgtgggttgcaaccagagaaaagtgatgacgtgtcatgtcgtgattggctgaatattattgacgaaagaagaaaaaaacgctgtgtctatctctcgactctctctctctctggcgatggctatcaaaccggagatttctgtctccacagccgctccatcgtgcgaaccgaggttaacctactcggagatttacgactccgagtcggagagtaatcgttgaagagagcaatg

SEQ ID NO: 10622 - DNA, 3000 bp, Unknown
  misc_feature (1)..( 3000): cDNA_ID_3037503_gDNA_ID_2213665_Annot_ID_182062 3000 nt of promoter + ATG
tctcgccttcttttagcttttcatctttacctgtctctgcccttaacctcacacagatatcgagtctcggcgattgaagtgaactctcatccttataatttcatccgaaaggtaaaattttgacagctctagtcgctaaaccattgttgtttaggtctccttggaactcttctgaatttgcttttagattagtttactctttttgagcctttgtttgtgtaatcttcgaatggattcatggttttgcgttaatgggttctgtttgttattacagattttggataaagttttgatttttttggttcgcaatgacgctgctcgaagctatctccaacgccgtagcgaatcaggacaaggtcgactcgcaatccgattatccaatccctcttagccacgatggtatctttgcgaatctgaaaccaaagctagaaaaccctaatcttggtacccttgtcaatccaatttccgggtggggaatctctgaaagtgatgttgaagtcatcgatttgggtaaaaagttttcatctaagctgaaaaggaagcttaaggatactaacgggtttgtcaaagatgagtttgtcaagatgttaaagcagtttcttgagaaaattggtgagaaagttgggatttcagaggctgagtctgagatggttttgggagatcaagctggttctgagatacagatactggtggagaaaaatgggtttttgatgggtagagatgtatctggtttagtgttgaaaggttgtattagtctagagatgtgggagctagtggaaattttgatttcaaactccttggttgatcattcttcatactcttatttagttagcaatcttgttgagaagcaaaggtcagatttgctttgcgtagtgatcaaagaagcttcagatcttggggcaactgagctactttcaatcttgaagtattttttatgcccatcaaaggaagcaattagcactatggctaaggtaagagaagaatgggagagtcaggctatgttggctattgaaaaggtgagcaacacagagctatcaaagaagtctaaagttgcagaagaggcttctatcttgttaatggttgctcatgacgggttttcaacctcagagctttgcctgcattacttgttagcttcacggaatgttgacgaagtcatgtttgcatctgcagtcagtaagttgaatggcaatgagatgggtagctttattcgatacctctctaaatggatgaagaagtatgagatgttcccacaagctggtccatgccctaaagccgcctccaagcttggtttgaaactatgcaactgggttcctgaactcacagacattaccaaatgtttgggacttcttatcgatgagaacttctccactctggttctgtactcggatttgcatgaagagctaaagtctattgcaagagtagccgatgggttagcttcagaatcaaaactttcctgttttgtggctaatgtggttgaaagtttgaagcttggagctgcccgaaactagattttcacaattgttggagcttaatgcaaccctgttttcactttttattatggtctccagtgacatttgtattttctagtttcagttcatctcttaactaaagtataattttgttcgctatctttgagagtttgtctccaacctctgcacattgccaatctcatttaggatgcaccacatggtttaaaattgttttcttttccaagaattctttatcagttacaacaggaagagtaaaaggtttatctttgcaatacaacagcttactttgttgaagaatgagcacaagttgttgctcaacgaagtgtctcacagagccggataataaaaaccgttcctttatgaacactcacgagaccttgccgcaaaatcaaacggctaatgtatcatcaccacgaaagtgaggtactctcgctgaggttgaagaagaagaaggggcaagaatgtaattacatccagaaatgcttcatagttacgcagctgagttattacacttgttcacaaagtaagctgcagtctggggactacccaactcctaactttcttcaccttcttaaattacctatctgtcaattatcatcatttcccaattgtgttgatacttaattggtagtagcaattttttccattaaagttttcatttttttggttttttgttgatggaaaaagtattgatccaacggctgtagaagaacggtgcaacaagattttgaattcggagatgcgtttgttttagttttaaaatagaaataaataaagttgttctctctctctcttcgtggacactggaactaacaccaccgatgcactacactctgtagagactgcaaatggaaagcatcttttggtaatcacgggtactgttgtcttcgtcttagtttttgtcggaaatcagacattagatccgaccagattctctatttggagacagacattactcggatctttatttcattttgtatgattctttattgtagattttgagatcaggtagtgtggatttgagatcaggtacatttacttgcaaggtgagttccagatctggttttggttatttcatttctggagttttatacgtttttgcaattttggagattttgttgattttagattaggatgatcattgcattttctttctctttcttgtttgatttcattggttaatgattgtggattactactatttaatctttttataaaaaaatccaaatccttagctcatgtacttataaaagaatgattttatgtttgatagtgatctatacatagttataaacaaatggctgatccattgaacttagtatgatgaatcctgttacaaagagcttatgtatctctttaatgtctaaaagctctagatagaaccaaaatatgaaaattgcaatctttagtaatgaaagtgttgtgttatagtcttgtgttattgcttgaccataatattttgtgattgttcggactaatgcaggtgttttgaattttggttgtggacata

SEQ ID NO: 10623 - DNA, 3000 bp, Unknown
  misc_feature (1)..( 3000): cDNA_ID_3037507_gDNA_ID_2213665_Annot_ID_182060 3000 nt of promoter + ATG
gatgaaaactttttacccaaatcgatgacttcaacatcactttcagagattccccacccggaaattggattgacaagggtaccaagattagggttttctagctttggtttcagattcgcaaagataccatcgtggctaagagggattggataatcggattgcgagtcgaccttgtcctgattcgctacggcgttggagatagcttcgagcagcgtcattgcgaaccaaaaaaatcaaaactttatccaaaatctgtaataacaaacagaacccattaacgcaaaaccatgaatccattcgaagattacacaaacaaaggctcaaaaagagtaaactaatctaaaagcaaattcagaagagttccaaggagacctaaacaacaatggtttagcgactagagctgtcaaaattttacctttcggatgaaattataaggatgagagttcacttcaatcgccgagactcgatatctgtgtgaggttaagggcagagacaggtaaagatgaaaagctaaaagaaggcgagagcaattagggtttagggttttgtaaatggaacactactttctgcgttttaatctgtttccaaatatacccctgtattctcttacttattacggtgttatcggattttgggcatcgacgaatttagctgaattttttttttttctggccttttttttttcttttgctaattgtagaaaatgtttctaaacaattttaagagaaaagttaaagtagttaagacatgatgtgctataataaaacaccaagtcaacaagctgactatttattctaaaatgtcaatggcatatacataactctacgcaaccagcaaaaggccttagatcgtggtccatttaaatatgtacttgttaatatcaaattatcaatcacatgtgatatgtccatgataattcatcaaatatatcatgatatatggtcaattagtttctagtttaaaactcatataacgtaagattatgttggtaaatttaattacaactctagtgttatatttatgattaacacatatatcatatattactagtttgatgccaagtctacgtaccaagtaccattcatttggcaaaaaaaaaaaaaaagacttagttaaacaaagagacaaactgcgctaaacctaaataaaatatacaacttgaaattgattaaactttcctatggaattttgtttgtagggaagccacaaaaaatttaaaaattgtaagctgattgattagatatgaccatttattttgtgttctagatttatagttttgctcatacatcatggcatatatttgagtggtttgtgtaaatatttattacgttttgcactcaccaataattaaatctgcagaaatataaatcttcaacaaaaattgaccttttattaattataaagatattttatttgtgtaatgtcaccaatgtatgactttaagttcatatattggagtgctcgtttttgtaaacgcatgtatatcatagctggagtcatatatatttttcttggtaattagtattttcgatctatagtcaaggtcttttctaaccgctgattaataatatcaaaattccactgctccacaatacattaattatattgtataccaaactttattctgcgtttagattcagatccagtagtagataaaataataattccgatccaatacaattcatttgatgctttaattagaacgatcgatggagcaactaaaaccgaatttggtcattctttgccatttgaaaaacaaccagtcgtctcatttgttgttaataagttaacattgatacgtacgtcggtacgcgagtggcaaaacaaacacatcagctctaagacgaaacacgtttggttttccaaaaaaaaaacgatgtattgataagctatattgacttaaaaggtaatatagtaacagctatcgaaaaatactacgaataaattagctaaattataatattaattatattagactatttaaattagcaagaaatctcttggaatgatctttctattacctattttggttcattctcttgttaattaaccatagtaatccatttgcggattggcctgtatctagacatttgttctgtcgctaccactagaagtttatcattttgaaaatgaaaagataagagagataaaattgtaacgatgtgatcaagaaatttcaacgttgttctttagcagcaacgttggccggtgggtccataatttcggctccaaaccttataacagtgtttgttgttgagacatagctattttattataacattaagcgttgaagttcaatatttcttttccaattagtcgacactatcgatccacgaacaatattcttctttcttttttccgaataaatcggatgcacaatggttgtttttattatgtacgtgtgttggtattagtttaaagggcagaaaaaccaattaatagtatattataatatcccattcatatttggtcgtatacattgttatttttaacttatttgttttgttcaattggattggctgttgacctttcaagatttcattgttgcgtgcttgtttttctcatggtttgaaacattgctgcataaaatgagtaaatagaataattgtacaaccacttggttcaatgtttttacattttatagtctacaaaaactctttataaactagtatttaatttctgattttggaatttcaacctaccgtaaaacaaaacagcgagactatctaattacaagactataattgaattttaaatcttaatttaatattatatgtgcactatatgtttcattctatttaagatagatatttggtaattttgtaaattatagaaatatgtcatgttctctgaacattattaatataggagacttgcatgtttttgtgaattgtttaattggcatagtcaaaggatgtataggttgcatatatagaaatcaacagttcccaagagaaaacatgagagctaataaaaaatttatcaaagaagactaatatg

SEQ ID NO: 10624 - DNA, 3000 bp, Unknown; identical to SEQ ID NO: 10611
  misc_feature (1)..( 3000): cDNA_ID_2716174_gDNA_ID_2213665_Annot_ID_182058 3000 nt of promoter + ATG

SEQ ID NO: 10625 - DNA, 3000 bp, Unknown; identical to SEQ ID NO: 10610
  misc_feature (1)..( 3000): cDNA_ID_2716178_gDNA_ID_2213665_Annot_ID_182057 3000 nt of promoter + ATG

SEQ ID NO: 10626 - DNA, 3000 bp, Unknown
  misc_feature (1)..( 3000): cDNA_ID_2716159_gDNA_ID_2213665_Annot_ID_132663 3000 nt of promoter + ATG
gtaagcaacaaaatcccgatcggaatttctacttttacaggagttttttgggtcggtatggacggttttgaccccagagcagggaccgtaacatctaaacccaccaaaagagatgctcgtatcgttcattttccgttgcttattttcattgtggttgttaatcctcatgagaaaggtttgactgttgcaacttgactcggatcttacacttggcgttccatgtcggcttgtttttgatcttgacgacgtcgttttcgtcaactggggatgaggatgaggatgaggattaggattaggattaggattagcattaggatgatcatgtgtgttttccttttcatgttgcttggtgatatccgccgtggaatcaacatgatctagcttcatgctgaagtacttttctgctccgaaaactccaatctcggcgtcattgtcagctttgatattggctttttctgagatttttgaagaagggttttcttggattgaggagaggacaagtaattgtggtttataagatgagatttggcgaaaatgggcactcttcttttcagcatccatctctttgtatgtgtatatatgttgtttagtgatgactactttatgaagtgttaaaatacaaaatatccaaccaaaaagatttaaaggaaatgacaagaagaagaaagctatggaaatgatggaagatttgcagagagaaagagctttgaatggtggatatgttcatgaggaggaaatttcactattatatagagaaaatgaatcttggtggaggaaatggtgacaagtcatagttagctacacagtttgcaaacccctcaatttttaaaaattgattacggcttttgtattttgtcaaattgatttatggttttccttcaaaagaaatattaggataagtacattatatgtgtgtatatatctatgtaatttcaattactatttgaggcatgtacaaaaaaaaattgctatttaaaatatattcaccgatccaaattacagctgaaaaacttgaaccctaatctctcaatttccataatcaaacacaatacgttgattcaaaaatatatagattttaattttgtttggtctcgaaaacaaaaagtgagtaaagttattattaccgtttgataaaggaagaatctagcttaactttatatagatattttggttcattcgcgttacaaaacatcagttgaaaaatggattccggcttagaaattgtattttagttataagctataaaatattagtatatatttgactattcaaaaaatttgcaacaactttttcttaatatatcaactcatatttactctctgttacatgtaagttctaaagcaatcaatagaatatgccaatatggtgatgaatagtaaattaataatatatgttttgaaaatgtgattctgttttttttctatatacatttcacaacattcatcaatttttatattttcacattttttaaagtgatacagttttgaattataactgaaagtagtcaatatgtatttacgaaggctaaaatttctagtgtcttgagattttttagtgtaaatattttgtttttgtttgctaacttaggtatccccactaatctattcatctcacttaaacactgtagtatcaccatattattcctgatggtacagtaattttacatgcaagccaaatgaacattatgagttggacctttcaacgttatacagtatcttttttccttatcaaagattgattcgaattatctcaatcatcaaattattattttcctttttctcgttagtttgtggatttattatccatgataaaaaaataacatgtggacaatgttacgacaagtggtatgtggaaattgaacaacaaagagaagagagaaatcgaactggcttggtatttattgttggtatgcctattgttcagtacttcataaatagctaggtagaaagattggtgcgtaatggattttgcatttccaacaaatacatatccacacacatttaagtataaattgccttgacgtctgctgaaaagtttggcagtggcaacgtcaaatatcttttcagtatcattattgtccctttagaataataaaactccaaatatataactgtggaaattttctttttttgttttttcatcaaagtacatgtggatcaaaatgattagattttaaatcgctatgcagggttctggttgtttcaagttcacattgtctcttaaacttgtttgatcagcaaagaactgaataggttctgaactagggggatccatgggttttggcaaaacatttaaaaattagcaaaggataatataatatttgggtatgttataaatcaaaaagtcaagatggccgagttggtctaaggcgccagtttcaggtactggtccgaaagggcgtgggttcaaatcccactcttgacactattgattttctgattttttttttgacatcaatagtttgacacaaaactgaaaaaaggacttgtagatataaggcctagatgccctagacgatccactgggctctacaaaccgttcttttccaatatcaaattttgtgaactagcccaaattgtttttaatttttcttttcaaatttaaaaatatgagtttacatattaacttaaaaaatatgagtatatcatacgtctaaatttgataactagcccaatgtattaattttaaacaatcattcaatttaataaaaatgaaaaaatatattttagttgtcacctttataataaagcttttgtgctattatccaaatggaaataatggatattttggtctttgggacaacacacaaatgacgtgtcggattgtgaatggtagtgatcacggaccaccaaagtccaacattacgaaactacccttactcgtttactatatatatacacctaagtttttgtctacaacattcgaaaactcattacaaaattctctctgtttccctccgcactcttgagaaatcgctttcttcgagtcactctcacaatg

SEQ ID NO: 10627 - DNA, 3000 bp, Unknown
  misc_feature (1)..( 3000): cDNA_ID_2716138_gDNA_ID_2213665_Annot_ID_132669 3000 nt of promoter + ATG
agacaagtcgctgagaaattcatcgatctcaacgcttcttcaaacgaccttctctctctcgaatggatcggaaagcttcttgattctttcctctgttgtcaagaagagtttcgagctatcgtattcaaccaccgatctcagatctctaaatctccgatggaccgtttgatttcagattacttcgaacggagcatcaaagctctagatgtctgtaacgccatccgcgacggtatcgaacagatccgtcaatgggagaaacttgccgatattgtgatctctgctttagatagtcaccgtccgatcggagaaggtcagctccggcgagctaagaaagctctgattgatttagcaatcggaatgcttgacgagaaagatcatccttctggaaccaatctagctcatcgtaaccgttcattcggaagagtcaaagacagtcaccaccgttcgattggtcatttcagatctctttcttggagtgtttcaagatcatggtcagcttctaagcagttacaagctttagcgagtaacttggcaacgcctcgaccaaacgatgtcgttgctagcaatggtttagctgtaccggtttacacaatgacttcggttttgctttttgtgatgtgggttttggtagctgcgattccttgtcaagaccgtggattgcaagttaacttctttgtgcctaggcatttccaatgggcagctccggttatgtcgttgcacgataagattgttgaggaatctaagagaagagataggaagaattgttgtggtttgcttaaggagattgataggattgagaagagttcgaggttgatgaatgaattgatcgattcgattcatttcccgttgaatgatgacaaggaagttgaggtgaaacagagagttgatgagcttgttcaagttcgtgaagctttgagaaatggtttggatccgtttgagaggaaagtaagagaagttttccatcggattgtgagaagcagaactgagagtcttgattctctttgatcttgcacatgtttgtctgaatatgatgaatgattcatgtttggattttttgttttgtttttgtttttctctatttatcctttttgatcacttgtaaaaaagaaactcaaagagtgtagaagtgtcatcttctctttgtgatgctgatagtgattctgttcttctttgtgtagctacttgcttagattgaagttattttttcaatgaacagttgtatcaaatacttcattgaatttgaaagattacattcaagaaacaaatgaatctttatttagagaagaggttcaactaaagggtctgttttacaattcaaatgaagcacatacaaaatctagacataaccttaaatttctcatctaatcttcacaatcttctgctggcttgagtccagcttcatgtttgtgacgtcctactttatttcttgcaagtgattcttcctgcaaatagagctcaaatgaaatccaaataaatgattagggattagaacagaacaaacatttgttgtagacagtattcacggtttgcctcagacataagtgatattcatcactgaaaaatctgataatacgtgcaattgtttaggcacatcattggcaaaaccaactaaatacccaagcaaaaaaatgttaaataatgagcaaaggattcttagttatgtgcatcagagagattcccatctagacattagtcatcattatagaacttctgatgtccctgtctattcatcgtcacttgcactagtcaaaagacaccaaaagagtatcaaaacgaagcaaaacagaaaatactagatcaaagttgataaacagtctgtgagatatgcatcagagagattcccatctagacattagtcatcattctcatctcctaacaaggagattctgatgtccctgtcttttcatcatcacttgcataaatcaggcaaccaaatcaaatcagaagctagaagagctaccaaaaccaaatcattaataagctcaaagatcacagtaaaataagagaaaccagatgtgtaaagagagagaaaaaatgcctcagagttgatttttttttcgtagagacgcatctctcaaagtatatttaacaccatcacaggcatcaaaatcaaaatatacataacaaaaacaaccaaaaaacttgcaaaaagatcaaatctcaaaacattaacatgggtcaattctagggtttatcaagaagtgataaatagacgtatttaagaagagaggcggagctaattagggcagagacaagtcaaagatattaatgggctttctactttggcccaacgaatacacatgttaatcaattaacaaaaaacggtttggttttgtcggtttttaaggcaattgaattaacaaaaccggtttggttaaacctttgtctctctctagcacagaagcacacaattccgttggtcgacgtcttaagtttcccagcgaaataaaaggttgtcccttcgtctgcttctgtgagctttctctctgttccaccattaatctttcccctttttctcttattcaaacttttcttcctccttcttcttcctcgggacaaatctttttggtgcctttttttctttctttcctcctccatgatctttctcttctttgtgactttcgcctcctctgtgctcattttcatgaattcttctcttgtttcgacgcaaacacccatttttgtttcctctgtttctgctgcgaaagacccctttttaaaaaaaaaacatcttccgttacagtgaattttgttgtctagagatagactctgtgtccgaatttagacgtcccccatcttcaaagattggtgctcttcttcttcttttaaaacaagtttcatcattttctcaatagggagaaatatacaatcaattccttccaataagtagaattttatcaggtgattgaagtgagtattcgaagaaaatgtttagtctttagaatattttcattgttggttatgggattttgatgctgtattggttttgaacaggggatg

SEQ ID NO: 10628 - DNA, 3000 bp, Unknown
  misc_feature (1)..( 3000): cDNA_ID_3037464_gDNA_ID_2213665_Annot_ID_132671 3000 nt of promoter + ATG
aagttcttcagttatatataatccaagcttatgtgatcttattcttcttctgcttctttgccctatattccttgatgtcactttctaccttggcattcacacgcgcttgaaaaccgggatatggttcatacccgaaaaccgattgaagaacctgtattcattcaaacatttccacattagcttttcatgtattctggttacagtttccacagagcagtataataaggtagcaggagataacaaacaaatcacaacataacataacaccaacaacttttacctcgagcaacacgaagaaaggagccatgagaaaagcttggagtaaattgtctaacagcgcaggtgcccgtttctgtgagtagacaagaatcaataacatatgtgttaggactcatgtatacggatgacaagacacaaaggagaatcaaaacaatgatttctaaaagccagagaacttacctcgaatactccatggccaacgaactgcccggtccaacataacagctgagatgctaacccaacctgagtaaaaagacaattaaattgttacagtatctacataacagagagagttggcgtcttggtgagtattaactgttttccccttgctgttgaatacatataacaaactaatcaaatgattcagactgaagatacatataaactaatcaaatgattcacaacacagaagatacataaaaaagctcctaagttacagatgtctcaaatactatggaagaaaaaccaaactttagttaaacaagtgatgtagattctaattatctgagaccatccaaatgttggtggtcaagaacaacacttgtttccgtccaagcacacatcaaatcctcttaaccaatgagtcaacaacactaaaaacatgacaagtctccggaccaaagaatcagaaccgtgcaaaggtggacaattgcagaacaaactgcaataactactaatcatgaatgttcaaagctagagacatgatattagtactgctgtctcaacgttaacagctaatgaagggacccatagacaacagatagagaggactaatgatataaataaatctatttcttcttccccgagcataaccaatgatataaacgaactttcaagtcaaagcatagaaaacaatgaacaataaatgcatgaaccacactcacatcatataaatatacacatagagcaacacatggatacacatagtcatataccctcataaacatgcttctacgcaattattttctccaaaaatgaagttttttcaaaaaccctaaattgaaattagagaaaaaaaatctaacctttaaggcaagagaagatcctagtcgaacagcaagaaaactggaaccaacccagcaagagaaacacataagagcagctacaaatccagatttcttatccaaaccgatatagaacagagcataaatcaaggcgaatataaacccaacgttaaatcgcaaaacgccgtcgagggtcaacgattgagaaaaccctaattgagaggggtcgaaaattggggtcgacgagtggaggagaagtaaaactgagaagaagattggccaaacgaagatgatgtggattagaatgttgatcggattgctatggtaagcaccgtagaaggcgaagtgtttctcgagatcgaacaatcccattatgcgactcatggataaaaaattcgttgaggaagaggtgtttttatgaggagaagatcggtggaaattggataatagtcaccaaacagaggagattaaagatatacacgggaagaagacgaaagtggaaagtttgattagcaatttcccgaaaatgatgctaacgtgcgctttttaatagctaacatgcgctttttaaagcgatagaagttgacttggccggagattttcttccgacttttgacaaaatactagtcgctaagaagagtagacgtgttattgtgattgctaacatgcgcgaataaaagctggtttagatggatatacatcattgaaagtttggcaaatagaacatacactattcaacgaatgatgtatttgggatgattgctaacatgcgcgcataggaagttgaattagatggaaatatcattaaaagtttggcaatagttgccaacgtacgctattcaacaaatgatgtatttgggaagagacataagcggaaagtttgaatttcaccaaccaaagatttattagcaattttagtgtggttactaacttgcacgtctagaggagtgaacgtgtttagtgattgctaacctgcgcgaatggaaagtttgttggacgggtaaaatacgaaagtttgtagttgaattttgctggaaatatctttaccactctttaaggcaaatagttgttcccaacctgagcgttttagaaggctaaaatgtgtactgtgattgtctaaattgggcttttaaaagacaaaaaaagtgttatgcgatgtgattgctaacgtacgttatttttttattttgtttatcacaaaagtgaagagtggacgataccaattcccttatccacacattttctgcctcaaaaaatctaatcttaaagattaaaataaatgaaaaaataaaaaagattacaccaacattttttttttttcttctccattgccaccatcaagaagtaacaatggctgaagctttcacaagtttcaccttcacaaatcttcatattccttcttcctacaatcactcggtacatattattttatattcttaccaaaaatatttcattacgaaaaaaagtttaagaattgtgtattgtgttgtagccgaagcagaattcaggaccgaatcatggatattggctatctgtaagtaattttctctaactaagactaaaattagaaaaaaaatctccatattcttgtgaatttacgtcttagaatttgaaaaattagaagaatgttaatgagaagagggaaaggaatttgatgagaggaagcttatgtgtaagaaaggcattgccacatgatttgccattaatggctgtgatg

SEQ ID NO: 10629 - DNA, 3000 bp, Unknown; identical to SEQ ID NO: 10619
  misc_feature (1)..( 3000): cDNA_ID_1663143_gDNA_ID_2213665_Annot_ID_132672 3000 nt of promoter + ATG

SEQ ID NO: 10630 - DNA, 3000 bp, Unknown; identical to SEQ ID NO: 10618
  misc_feature (1)..( 3000): cDNA_ID_2716126_gDNA_ID_2213665_Annot_ID_132673 3000 nt of promoter + ATG

SEQ ID NO: 10631 - DNA, 3000 bp, Unknown
  misc_feature (1)..( 3000): cDNA_ID_2716122_gDNA_ID_2213665_Annot_ID_132674 3000 nt of promoter + ATG
gctgtatgggtttagccacaggggactgttgagtcccaagattaaaaggatcagaaatgagacagtctctcctctggagtcagtagacaagtttgatattcgaagaatgcacatggaaaccaaaccatagagctaggaaaatcaatgagtgaacggaatcacagtttggcaagattacaggaaacatatagatgatatacaaatactctcacaaacacaatgcaatttgtttaccctgcacttgttccttgtgcttcattgtttggtctcatgaagataagttttaactgtcaaattcttattccatagatgtttcttgtcattgttggtcaatatatggagaaatttgatactgcaattttgcttgttactcgtcttttggtatcttccttttagacaaccagctttggagaaaaggttagacaaaatatccagaggttgcatgtgtctttggttattcattccaggaacgtaatgtgtccagttgaggtattggcatgaccaggtttggagtcgtgtcttgtatgtaaagtatatagagagaggtaaagagaaatgatgagagttttattttgtttatttcacaatatgtgttccattcaggtattaaataaacttttgcacaaaacaaaatggtagtaataatgtatttaccatggaaatagatagttgatcatttgtattttatttaaaaattataaaggttttggcaattttatctgtaaattcgtaatactatctaatattgtttggtagtcgtcacatattaatctttttttttgtttttgttaaaaataacatattaatcttaaaccataattatatttaattttagaaaaagagagatttagtatgctgtgatctgataagatacgattttaaccataataaaagagtataattacttacttaatgctaagagtcgatccctttttttatttattaagaaaaacgcggaaaaataaccgaaggagatttacacttatcacatcgagactctttgatcggagtttcccaaaatccccgatggcgaaggaaactccggcgtcgtcgtcgatgccttctggtctcaaagcctacacggttcctatcttcctcttcgtcctcgctatgttcttccagcttttccttcttcctcgttcctttcctccttctcattacgacggtacacaattctctaagctcgctttctctctcgactatgtactgtgctacacaattaccttccggttttgattcttttgatttgatttcttatttttcctttttgagttcttagttttgggtgtaaagatgtacagctcagtggatgacgtgaaagatgcgtatcagactgttgcttctaagtggtaactttctcgatctggggaattttcttaaccttgaatttggatttagtccccatgattctacctccacaatcaatcacgagtattgtatgaattgtttttttctatataactaattgctagatgatagtatatgtaggcttggcattgtaaagaatggaatgtaattctaattgaagttgataactagactttaggtgttctaagtagaaactgtgtggctgacacattgtaacaactggtcgtgacagggattcgggttcaggagtttctcttccagctgattttgttaaggttggccgtcgacttcttattagtgctaaatcattcagcctttttatgtgcgtaacgtttcttctaattccatcattgctactatgcagatacaatacgcctatgagctgttaacaaatctagtatggaaaagggactatgacttatacgccattgatgaatcagtagtaagttgttagttctgtatcttcactctttttgttgcagcaaactgaaaaagaaggaagatttactctcttttttccttttcaaatataaccccttgttttaatggttgcagcatattatagaggaacttgaaaaacaatatgctgtggaagattttgcaaaaataaaacttcccctactggaagttgtttcttatggtcagttaaccaacatacctctttgacattttcagttctgtttcttgtattcgtttttatatttcttccgatgccaacttattggtgtataaaacctgtttagagcctgaacgtgaaggttttatgtcaataacatctcaagactttgcgtccaagttccaagattctaagccatggctcattcaggtataaactctgtctagactgtttacacagagatatgtaaatttgtggagacacatttctgcagaactgatactggattatcaagtatagaatatctagtgtacgtttaaaacctctcctacaaaagatacaagcaatctaacatgttgaagatgcgaattgtttcctattaaattaataaatgttggcatacgtttaaccatatttctcttggaatctctttatgctacaaagtgagggagtgcatgttgtgcttcacgttaacgatagaagattttccttttggactgtactgaaatattaatttattggtataattcaatgctacttcttaattaacgtctaaatacctttaggtgtattcttctggtagcaacagctctgcccagttcgctacggtttggagaaggattggtatgatttgctttctgtagcatgtttaaagtgtaaaactcttgccagcctttgttaaagtatgagacaatggaatgattaattgaagagctagaacagtgcatttggcaaggggaaactgaagtatctgaaatagacagagttagttttcaggaaataaatatgttgtctatgatgtaaaaagcaagtgtaacaatatgatcgtaagttcgcaacttgatgtcaatagatatgttttaacaaaaattaggagggaacactaacttaatagttaataatagtatagacatattttgctgtgtatgaaatcattttaccaattatcttgctatgcttaactttcttttataattgcagttgctttgttggatggggttgctaaccatgcgatg

SEQ ID NO: 10632 - DNA, 3000 bp, Unknown; identical to SEQ ID NO: 10616
  misc_feature (1)..( 3000): cDNA_ID_2716116_gDNA_ID_2213665_Annot_ID_132676 3000 nt of promoter + ATG

SEQ ID NO: 10633 - DNA, 3000 bp, Unknown
  misc_feature (1)..( 3000): cDNA_ID_2716112_gDNA_ID_2213665_Annot_ID_132677 3000 nt of promoter + ATG
tgacaaacccgcagaagagtatatacacggaggtcatggacgaagacgacggagtttctttcgccgtctgatttagcaatctccgatcaaaagatttttcaggcgtcaagagttgccaaaaagagaaggaaaatgcaaaattccggtctaatttaacaagaagccaaaattacccggttcggtctatgtttacttgaaccgaatttaatttaccttcccggttcaaaaacccaaaattctagagagagaggacggcaatgcgatggggtcatctttctccgcctcctttactaactccaccaccgccgccgccgttcctcctccgtcgccaccttcatcgccgtcacgttccaatgtaaaatctaacggagaagagagacctcgtttcttcgatggaaaggcgaagaacaagtgctgggctaatgctgacatcgtacctggtcgacatcccgagaggtggcgtaaagacgtcgccggtaacatagtctgcaaacgcttcggaaattgcaatggttgtctctgtttcgagtatgatcacattgttccttattccaaaggtttgatttttcttatcactgcttccccaaatgtgacattttgaatttaggttttgagtagttaaaattaggatcttgatatttgtttctgtgtatataggtggagagtcgatagcggagaattgtcagattcttcaaacaagagttaacagattcaaatcagctcaagaaaatgttgatgccaccactcttaagagctattcttgtggtctgcaatttacgggtatgttgccaaatgttagcttcttcttcttctaattacatgtgatgatggatcatagatttgctcatctgctataagattcaatctttccttgttgggtttgtttttcagtgttcatttctatgttattatgtagataagatgggacaatcttgattgtgatttgtagtatgttccatattctgtagagattaagatcattaatcgtatagatatagtctttcttacctctgttatgctttcgtaaagtgctgtgttgaatagcatgttcgtttagaagtaatgccaatctcatacatgtgggagatgcttttgctttagatcttctttctcttttctctgttggtttgatcatatcaagaattgctattgagccactaggaatctaaatcttctttaaacccaaaagccatgctgtgagttgtttttaggtgttgctagtttacgttttatataggagtgaagcaaagtgttaaatgctcttgggaaatgcattttcttttcaaaaagactcaaaagattatagagctcttggtacttgcaatgattatacacaagtgaactcaagtgtgtgttgtgtgtctattctctgcatatttgctttgactttcttaagatttcttctattgtaaacattgcagacaaggagttagatgttatcgagatggcggtttatggagacgtgttacgacctggaaaagaatgtcgctgcaaaaccgtagctgagctgcttggtcagtccaagtccaaagatggtaaagccgcatgcgagttaccatcatagaaagtagtaatcaaccatgtctttgtaaagctttgattcatgctcatacattggcagattcatcagaatcttttacatatactggaaaccattgtttgtaagagtagtgatgattctatatctctatatacaaatggaaataaaattcagcttacactgatacctaacttttgaagtcaacaaattgtttgttaatatatcgaccacctaattcactattatatagtcgagaaataaaagttactgttacgatagagattttatggttggtcatggagacatgaaatatcaaaaaacgggaaaggtgcgcaattatgtgtgagctattaaagaaagatgtctgccaaaaagttaaagtcaacataaatttcctttggcttttttttttaaaaaattctctctgatatttaaatgtattttttcccatctatatataaaaaaaatatagtagctttcattcattaatacctaaataaaaatttaaaaattggtagttgtatcaatgggtgttcgaatttcggctttgaacaataaatgtagctcccacgtatacacatatcggctggttgaaaaactttatctatggagagagtcacatgatatatggtatccaacaataattcaacaatttaatgtggaatatgtattgattgccgtaaggttcgaaagctcaaatcccaaagaatttatcttactctaaaaaggggctattctatttaaatctcaatatgcattttgataccactacttcggttattattaaacaaagaatttcgaatcgatcccatattatacgaataagaaaactacaacaatgtttgtgattgtatataaagtacacaaatgacaagtgtgaggttaaaaaatgttggaaacaaacaagtcaacaacaacccaccaccgtttttggccgtattagctcactctcacactggtcgccgctagtcaaactctcgttccattgcataattttttaatcctattaatttcgattttctcaacaatgttactcacttaattagaaaaaaaacactactatatcaaattgaactatacaaagaaaaaaagctgtagaaatacttaacacagaaagtaaaagagagtgatcaatcaagtcatcattattcactgtcgatccaaaaaatcttgccgtagatttcgccttaaacatttctatttttgattacacgacatttacttttgatctatctctgtttaatttttgatttcgtcttccgcaattcacgcagaaatcaaaaactctaaaagaaaaaaacaacattctctaaacttttctctctgtatatatctaacgaaaaccgcaacagcaatagtttcatcattcaccggagatccgaatcacaataaccggcgccggtttaagagatagttccggtacacatgtgttgttgacgcggaggagcgaaattctggga

SEQ ID NO: 10634 - DNA, 3000 bp, Unknown
  misc_feature (1)..( 3000): cDNA_ID_2716266_gDNA_ID_2213666_Annot_ID_132679 3000 nt of promoter + ATG
agaaagaagttcttgagtgctttagttggagaaaacccacatggcggtacgattttcctaagagatggatttgcaaaaaccatccaagtgtacattttcttatcagcttcacaatacttgaggttaatctctcttaaacgtatgcagctctgcacaacttccttcacccctcttgaactcacattcaagcatccttgcagatcaagatgcaacaaccctcgacactttttgctgatcatatctaaggcttcatcgtcgatccaagttccacatgctcgcaaagactccaactttggaagctcaaagtctactacaccaagactctttatgcccgtacatctgctgatgtccaaagatcttagcttgccacaattcctccaaacttcaagaatcccatctctcgtgatgccaggacactgagctacgtcaagactttctataaaagggcaatgccgtgatatcttttcgagacactcatcgagcaaattgtggtttctagataagtacaaaaacttgacccctgacttgaaatccttcgtatccttggtatattcttccactccaaagttcgtccctaccattatcatgcacctcagggaaacacatctttcaataatactaaagaatgctagaccagttaacttggaacagaaactcagattcaaaaaggttaaacgccgaaagaacatccctaatttcataaccatctcatcagagaggaaatttgctcctttgaggttcaagtgaactagtgattggtacttgtccagcagatacaagatcccatcaaaagtaaaaccgtggcaatcggagagaagaagcttctttagaggtaacttagcactagcaatcaaacagagcaagtcatcagacaaaaacgaatccgaaagatcaagctcagtcaaacaacgagcaaacaagaacgcatcggttaacaaagactccctcggtctcaatccgattccgttgatcgcaagagactccaagttacgggaattgcgaagaacgaatttgatgcaatccgacgaaatgaaatcacagtcacggaagattatctctctcaagagaagacaattctgcgagagagcaatcaaagatttatctgtgatgaaactattaccagaaatgttaatcttcaacaaacctttgagattcgaggaaagctcgataacaccagaatcagagactcgactcggacttgaattaggatagctaatgtccagcttctctagcaacggaaaattcactccgatggaaaccagatcgctatcactaaaacctccaactccataacatttcaattccttgacattcttcatctcaaaatctgggaaatagcgcgtttgcgagacatctaccgattcgaaatccaaaccggaacgagaaacctggagaagaatcgaattgagatcctgagtgaaatcagagaacctgattcgcttcaagttgcggaatcgaaggagatgacgattgagtaaaggaacagctcgatcggtgacgacgaaagtagagcgaacgcgattggtgattgagaggaacaaggttgatacgagtgaaacagattccaggaatcgataatcgtcttcatcgatagctttgcagattaattcccaacattcttcaggtaaatccatggatgatggatttgatgaagattagctcaaatcaaactaacaacaaacacagtatgtaactaactatatatcatccttcaatttcgctggcagctggcttttaaccttatccaattttaaaatttcgaaactgggcttgttgtggctttttattccttaatggcccaataactatatttgtttttccaacagatattgggcctaacgactgattcatttcaaaatttcaaaactgggcttgtattgacccaataagatataaaaggctcattattcttgtaaggccctcaataagtctagttgttattcaactgtacagttgtgactagtcagtgaccacttgtgtcggtaattaaagtttgaagaggacagacatagagagttcacatgaataatgctcaaacttttggacctttgtcgtctgtatttttttaaaataaaaagaataaaattcttggatgcactctattaaaccatgacttgtcgttttgttcactaaatccgcatgaattgaatttggggagtgacccaatcgaatcatttggattactgtgcctcgatgcaaacaactctatcgagagattacacaatccattctcaatccatattctttccatatatcacaccattttattaatctgattaaaaataataatttcttttacgacaagatgtattttttttttcttggaaattaaaagactaaacttatgaatatgaaggaacattaaaaacaccatttatgtaattggattgtactttgattgctttatgtactttctttgtattcttgatttttctaatttaataaagatatagtataactatacgttaaagaaaaaggaacaaggctttaattaatagataaaaatctgttagctttacgtataaaaggtttaattctatttgtcaactagtagtatcagcatcatctctaacattgggatgttaaattgttgtaatggtagagagaaaatcaaaattttaaagattggctaatgggaagaaactgttttgctaactacacatcctcctcctcactctctccacaactccacgtcttatcaccacgtctgggattaggcactctttgctgctttattagcctttttgtccaccttttcataactgccacatgaagaccaaacacctaaaacctttgtccttctctctctctgtttcccaactccaacagtgtctcttgtctacatctcctccagacaaagataatctctagcatttttcaccatctccataaaagaattagatagaacacgaagcagcttcgtactctttatctctctctctctctctttttgtcttttctctgcatatttgttgataccagacaacaaaattaaatatg

SEQ ID NO: 10635 - DNA, 3000 bp, Unknown
  misc_feature (1)..( 3000): cDNA_ID_2716259_gDNA_ID_2213666_Annot_ID_132681 3000 nt of promoter + ATG
acacgtcatgcttttccttgtcctccaaccccaaactagtgtcacgtattctccacaccaccacttgtccttattatctatcatctttctatttttattttattctacccaaaaattccatttcctttagtttgacgactttactttggttttcaaattataacccaccgatcaaagtcaacttcaaatcagacaacaatcttaactaaactttgtaaaaaaaaaagtaaaacaggctaactcaacaagactgtcaccaagaaaatctgacggacgaatcacaggacctaatccgttgcaacaactgaggactttgaccactactactagagaacgagtacatactacttattgtccactgcgccacatctgataactgctctccccactaaaccctaccacacacgtacctaatccactcatactctaatcttaaattcaattccacgaaaacgcctcccaaattataaataacgccagcgataatctctggcattgactaatataccctctatcgtgagaagcagctaacctggtgacaagggttaatttagtcattagcttggtaatgataatgaatgtgtttattttttctctttagcattgaagtctacaacgctgatttgacccagaagacctctcccctctcccttgatgtgagggctttgtggtctttccgcaaagcagcatagagagagagagagaaagatgactgagatgcacaaaagtgggaaaacgtgactcttttgttgccaaaagaaaagagcaaaaagcagagatcaccgaatttatcacctgtttgtttgaaactcaaaaacaatctaacaagtgtttccaagaagacaacaaaagaaatcgagaaagatagattgagtttcttggaaaagaaaagactaaaaacatcattgcctaaattggagttgtgtccacgctgggggtatttcggtcaacgaaaagtcggtgtacctacatgatcagcttaagaacacgatcgtggatcctaaaatgaccaaaatacccacaagctaccaactgaaatgtcaagggcgtactcggtagtagatcagcccaaaccacaacaaagacgcttaaaattacgtttttaaaaactaaaatcatgacagtgcaaaacgccgcatcacgagggctatagcagaaaacaagacctacgagatatgaccgtcgcggagtttcaaatcggataaacaaaaaaatgagtgaaatgatcggacaaaccttagatctaaatggctcagagggttttacggcggcgctagactcctcgaggccttccatggtggtagcaccggcgccgcttccaccgctgccgcctccgccgctaagagacgtggcaccgctccaggaaagcggtgtggtggggcttgctcgcgtctggtctcctttcttcgatctccgttgacgcacgctccatttcagcttgagaggggacgcgtcgactctattcttcggttcggagtggcggagccgaagaagcgcctccgccaccatggaatcgtcagacatggccactcgaatccagttttcgccggacatagtcgcaactcaaagagagagaggagagatgggagagatggtggcgaaaaagtagagaggaagatatctctgtggcatagttaatgggtggatttgtatatatatattgagttttattgcacagttagatatattggaattaacttatttttcttctcttgataagtgtaggaccctctttaagacatacgtggcatagatcattttgtggcttgtgttggaatagtagcagtaggagaatgaaggtgatacacgcgcgacaatcgactgatgatgagtgtaccacctccgtccatattcaaactttgggaattccactatttagatgctacggtatcatgagttggaaaaataaaaaatgtcatgctagactaatcaactacattacattagatttatacatggcctatgttatattttagagactacatattagtattttcatgttaatttgtgattggatacaaatacgatcaggtatctttttgatgtttgttgcctcgcattcgtgaccattcaatttcttggtcacgtcaactccttacttgtgatcttcgagtatggtaattaataattataagactcatactagaataatacagttcaaaattaaataacgaaactaacaaagaattcctttcagacaagaaaaaacaaacaaccaaacttagatcatattcatatcaaatagaatatcaaagctttttataatagaataatgatgggatataaattgcatagttaaaatgggatggtatgggttgaaacacaaatagaaccatacaaaaatagggttttgaataagtttttgtagacacgtatcagttgctagttgtactttgttagaacaccaaattgtaaacaacacatgtcgtgacataaacgtgttcgtgcaatacacattcttatgttaatcgtatcagtcgaatacatacgtctctctctcgaaaagtagttatcggttccgattgtacgaaagcagtcagcaaactaccattttcgtttcgtcaacacggtaacatattattcattaatatgaaggcgatgttaacatttataaaataaaatgctactttccttatttcttaaccaaaaaatcttaatcagtcgtatgatattgttgttatctaatttaatcgtagctacaaagattttaaagtgcctcataagaacctagcgaatcaaacctcatgagctcactaacgtaacatttactcatctcaagtctcagtagtgatgatgatgatggtcagatggttttaaatttgactttcacttttaccgaaagcacataaaaccgtcccttctggtttactttatcgcgtgatcaattccggtttactagagaaccggactgagaccattttcatttggttccatctatgatcaacatgtacccaccaaaaaccctaaaagctcccggagccgccaagatcagtttccatg

SEQ ID NO: 10636 - DNA, 3000 bp, Unknown
  misc_feature (1)..( 3000): cDNA_ID_2716236_gDNA_ID_2213666_Annot_ID_132687 3000 nt of promoter + ATG
acgtcatgtctgcataatctttacaaaagtaagctaagattaaaagtcgtattctttagttgaatttttttcaaattacaataataacgccatattctccaatggttttaagaatgtgatccatgatggatcatccatcgtttctgtagggtgttttattgagcttaacgatcttacaaaatagccacaaaatgcctgtggttgtcacagagtggaacaacaacaaaaaaaaattaagttagagagtgaattacaaatggtacgtatatgtagtagaacacatataggaggcgacaaaccatctttcaaaaccaaatcttcggaatttggcttaagacacacaactcaaccagatttctcaatgaacctcagtgttttctcctcggttttgagttgaaacaaagccactttatggcaaagatgatataccttggggagatttctccatccaaaaggacgcttctctattgcttcatgtctgttttgaacacataaccaaagagtttcttcatatctagttatctattctctacagacaagcgtttcgtccaaggacttttctaccaactcaggccttctccttggagatagccctctttcgatcatttcctcctcatattccctagccatatccaacattcctttctgaatcaacgcatcaatcacagcattatacgccgctgaatcaggagtatccccagactctttcattgtcttccacacatataataccggctgaagaaatccccatctctcaaacttcctcattagcatcacataagtatccatctttggcctcactccactccttatcatcctaccaaacagacttaggatctcactcggtttctccaaacgggaaaagagacacatgtaagtaatcgaatcgggttgacaacctctcttaggcatctcatcaagcatccgatacgcgtctctcatcctcccgtcttcacatagaagcttaatgattgtgttatgagtcgcaacattaggttcacaacctctttccctcatctcccgaaataccctgataccgaattcaacaccttgcgacgctccaatggctcgaatcacagtgttataagcaaccacatcgagtttcatccttctactcttcatttccttatacaacttcacagctttccacggtttcccgctcttgcacatgatatccatgtaaatggaatacgaaaaaagatccttagtaacaccttcagtatccatcttcttccaatactccttgcatttaccccaccatcccaatttcgaccacccacgaagaatcagattatgaatcttagtattactcacactaaaaccattaccaatgacattcttcccaaaacaaagctcttcagcttcaaccacatgtttatgctcgcaaagcgcatcgaccagattataaaatgatgtttcatctctcaaattgaaatcatccaatttatcatacgcatcaatagcctcctgaacaagatgagccgtcacataacgcttaaagactatacgaaacgtgacgtgattcggcacagattccgtgtttccgatcatgcggttaatcaaagcccaagaaatttcaaactcgaaatacttacccagaatatcgatcacccgattgaatgtctcggtggtatgtctgaatccggattctctctcgacccagttgaaaaactccaacgccttttgccaatcgttgctgtaacatgtgagagcttcgcatactgttttctgatcgtaactggactgatcttcttcttcctgagatcgaaacttcgcatcatcgacatttgaaataggttttactgacagaagccgaacggagtaaggggaagcaatccgaactcgattgagtcgccgcaacaagagcattctcttgtttcccctctccgctccctgtacacacgaaattagggttcatcatctaacgggcgaattttgacccgaatacccattttaaaatctgacccgaataccatttatgggcccaaagcccgctggacttgtgttaatatttggaacatttgggccgatctatcttctacgaatctttcttaggcccatcataattgagccatccagaggtgaaaataaataatcgaacggttaatattggtttgattataaacacaaaagttctttccaggtctccttgtagtctttgttgtagtaaatggcgggagtcatccacgtcagcagtacccagattccggttgcgtttatgtccgcaaccaaacagagctttaggagagcttctgtgatcagatgtgccgccaacactccaaagaaacggtacaccatcgcggttcttcccggcgatggcgtcggtaacgaagtgatcccagtcgctgttgacgttctttgtttagctgggtctcttgaaggttccttctttctcatcctgttgcctaatttaatttgattttcccaactgaaatcgtgtttttggatatcagggatagattttagcttcgaggagttgcctataggaggtgttgctttagatcttgtcggagttccactgcctaaggaaacattgatcagggcaaagcaatcagacgctcttcttctcggagctgttggatggtatggtattattaccataactttcgttcatctcaagtttggattcatctaaagtttggatttttgaattgaaggccgaaatgggataacaatcccaagcatttgaagccgataacggccttgttgcagcttcgtgcggctcttcaagtatttgatgagccctccttcttctgtgaggtgctgctaataaatggatatatatatatatatatatatatatatatatatgttgtatgtggtaatgtaaggtgtccatttacaaaattaaaaactttggggtcaattctgaaaataaaacaatgtgcaaaaaaggacccataaatgcaaagaagtaaagtctgagtgtactagtagtatccatttgacttgcggtttcaaaatccgaaaaagaccaatcaatcctttctccctgaaatg

SEQ ID NO: 10637 - DNA, 3000 bp, Unknown
  misc_feature (1)..( 3000): cDNA_ID_2716228_gDNA_ID_2213666_Annot_ID_132689 3000 nt of promoter + ATG
aaaatcaaattaaattaggcaacaggatgagaaagaaggaaccttcaagagacccagctaaacaaagaacgtcaacagcgactgggatcacttcgttaccgacgccatcgccgggaagaaccgcgatggtgtaccgtttctttggagtgttggcggcacatctgatcacagaagctctcctaaagctctgtttggttgcggacataaacgcaaccggaatctgggtactgctgacgtggatgactcccgccatttactacaacaaagactacaaggagacctggaaagaacttttgtgtttataatcaaaccaatattaaccgttcgattatttattttcacctctggatggctcaattatgatgggcctaagaaagattcgtagaagatagatcggcccaaatgttccaaatattaacacaagtccagcgggctttgggcccataaatggtattcgggtcagattttaaaatgggtattcgggtcaaaattcgcccgttagatgatgaaccctaatttcgtgtgtacagggagcggagaggggaaacaagagaatgctcttgttgcggcgactcaatcgagttcggattgcttccccttactccgttcggcttctgtcagtaaaacctatttcaaatgtcgatgatgcgaagtttcgatctcaggaagaagaagatcagtccagttacgatcagaaaacagtatgcgaagctctcacatgttacagcaacgattggcaaaaggcgttggagtttttcaactgggtcgagagagaatccggattcagacataccaccgagacattcaatcgggtgatcgatattctgggtaagtatttcgagtttgaaatttcttgggctttgattaaccgcatgatcggaaacacggaatctgtgccgaatcacgtcacgtttcgtatagtctttaagcgttatgtgacggctcatcttgttcaggaggctattgatgcgtatgataaattggatgatttcaatttgagagatgaaacatcattttataatctggtcgatgcgctttgcgagcataaacatgtggttgaagctgaagagctttgttttgggaagaatgtcattggtaatggttttagtgtgagtaatactaagattcataatctgattcttcgtgggtggtcgaaattgggatggtggggtaaatgcaaggagtattggaagaagatggatactgaaggtgttactaaggatcttttttcgtattccatttacatggatatcatgtgcaagagcgggaaaccgtggaaagctgtgaagttgtataaggaaatgaagagtagaaggatgaaactcgatgtggttgcttataacactgtgattcgagccattggagcgtcgcaaggtgttgaattcggtatcagggtatttcgggagatgagggaaagaggttgtgaacctaatgttgcgactcataacacaatcattaagcttctatgtgaagacgggaggatgagagacgcgtatcggatgcttgatgagatgcctaagagaggttgtcaacccgattcgattacttacatgtgtctcttttcccgtttggagaaaccgagtgagatcctaagtctgtttggtaggatgataaggagtggagtgaggccaaagatggatacttatgtgatgctaatgaggaagtttgagagatggggatttcttcagccggtattatatgtgtggaagacaatgaaagagtctggggatactcctgattcagcggcgtataatgctgtgattgatgcgttgattcagaaaggaatgttggatatggctagggaatatgaggaggaaatgatcgaaagagggctatctccaaggagaaggcctgagttggtagaaaagtccttggacgaaacgcttgtctgtagagaatagataactagatatgaagaaactctttggttatgtgttcaaaacagacatgaagcaatagagaagcgtccttttggatggagaaatctccccaaggtatatcatctttgccataaagtggctttgtttcaactcaaaaccgaggagaaaacactgaggttcattgagaaatctggttgagttgtgtgtcttaagccaaattccgaagatttggttttgaaagatggtttgtcgcctcctatatgtgttctactacatatacgtaccatttgtaattcactctctaacttaatttttttttgttgttgttccactctgtgacaaccacaggcattttgtggctattttgtaagatcgttaagctcaataaaacaccctacagaaacgatggatgatccatcatggatcacattcttaaaaccattggagaatatggcgttattattgtaatttgaaaaaaattcaactaaagaatacgacttttaatcttagcttacttttgtaaagattatgcagacatgacgtaacaattttctaaaaaaaatcttagttacaacatttttctttagaaaatgccatgacagagcaaaagcaggaaaagttggtaccagatgatcataaatgcaattttccgttacaaaattagagtagctctcatgtcagtattggtggtaattaatgccattctccgtttctttttctaatctccgagtcgaccctgagtataaagtatttttaccaatttcatttcaattttattgtataatcggttttatagaaaaaaatgtgattcattaatttaagttttaggtcacacagccaataagagttaaaagagtaattaattaaggattttaaaaactaagaaaatgaggtgaaaacttaaaacaaaacagaataacaacaatggatggtgaaaatctaaataaagggaacagtttcgtttcatcttctttgtccttgatttcctgaagaagtaaaagattcttattcatacgtttgattgataaacccttttttagagtttcagaaattagaaaccaaacctcccccaaaaaaacaaaaaaagagagagaattagacaagaaaaatagggagaata

SEQ ID NO: 10638 - DNA, 3000 bp, Unknown
  misc_feature (1)..( 3000): cDNA_ID_2716224_gDNA_ID_2213666_Annot_ID_132690 3000 nt of promoter + ATG
attactaatttgtgacgcgatgtcgtttatcttcaggattgggtctgcaatgctgtacacggggcaaaacgagttctacggtagcgtggagaggacgtttatgtacattgtgaaacaagcaactggagttttgactaagctaacgagcttatgggactcgattcaatctgctaaagacattcagctcgatggacacaacctgtttcctcccgagtttagaggcaacatcgatcatttcaacaacatgatcaagatgtctaacatcacttaccccgaccgtgtcgctaaccagacaatccgttatctcaccggagcactaaaccctgtgtaagtaataagtattcgcttgatatgtttcttgcctcacaagctaaatatatatagaagctctgtttgagtatttgactcaaatgcgttttcctcaggagatatgtgttaaatgtgatcgctggtgtaatgctcgcagtcgcattcctcggcctttgtaagtcacaaatcaaaacatatctattttgatctgaagatacagaataatctcattatttttgtttctgtttttcttcttctttcgaaacagtgttttcgttctgtggattgcgagttcttgtctacctgtgagttacacttagactacgttgttatattatcatatcatatccaaatcaaatgtttataatcagtgtttcaattatatcagattggtaattcttggttggattctcgtcacagccactatcctcctcagcgccgttttccttgtattccacaagtaaatgatatttcgtcgtcacttgatctaattcaagattcaatttgtttttatcaaactaatgatgttacttaataaacagtgtggttgcggacacgtgtatggctatggaccaatgggtgcatgacccagcggcagactcagcattgagtcaacttcttccgtgtttagatcctaaaaccattggagagacattggatataacgaagacgatgactgcgacggccgttgacatgaccaatgcgtacacggtcaatgtcagtaaccatgatcagttcccacctaatgcccctttctaccacaaccagtctggtccgctcgttcctcttctctgtaacccactcgaccaaaatcacaaaccgcggccttgtgctcccgacgaagtcctcttagccaatgcttctcaggtacatacattttctcataagtgatacatatgtcaaatgttaatgttaattcaatttgtatatgtttttgtaattaggtttataaaggctatatttgccaagtgaacgcagaaggaatctgcacaacgcaggggaggttaacacaaggttcgtacgaccagatgatgggtgcgatcaacgtggcgttcacgttggaccattatggtcccttcttagctagtattgcggactgtacattcgttagagacaccttcagagacataaccaccaagaactgccctggacttagcattacaagtcagtggatctacgcaggactcgcgtcgctctctggtgcagtcatgttctcactcatcttctggttgattttcgtcagggaaagacgtcaccgatctcaaaccaaaaagtctatgatccagatgaatagattttaattagtggagccagcccattatggactcggcccatattatcacccctttttttttttttttggaaacgttaatgatatatggttttaaaaataaagtcgtacgtgcaaaggaattcgtcaatttttttttatttgttgttttttttgtgcaaacgctcttttattgttttactcggtttattaacttttagaaagtggatagtctgtaaatcaacaacttatttagactattaacttcactagatagctataatagtattgatgtttttttcctggtctaaaaatataaattataaacttttcttttagataatattctacttgtataattatttactaatttcattctatgagaataagaggtgagaaaaaatgttgaacattctaagatacatgacatgagtaggtttttcaataaagcaaagccattgaatttgtcaacgaacgtcgccgttggacccccaaactaaatgtacttagtaattgcgacgactagttggggctagctaggcaccatacctaattgctatttgtgaaattctgacgtgtcggattgctatttgtgcctcgaggccggtgcagaaccaggtgtcctgccgtttcaacttgcaaattattgttttttttccgtcctcagtaggtaagatttttgagtattttagttaaggtccatatgtagcagtcaaaacaaaacaaacaaaaagttaggccccctctttaatttatttttatgcaacgataatcctgtaattgtcggtttttgactctataatgttttttaaatatgccatgggaacgttaagatctatgccaataccaaagtgatgtatcgggcggtccacgcgggacgaagtcacagtcaaatgacctcacgtgtttcaagcacaaaaatcttaacaagacaacaatttcctctcttacatatttgtaccataaaataaattttcaaattaagccaaaaaaataacggaaagtgtttgattggttagtgcttcttataactgtcgaatttcagacaaaaaataaaatagaataggaacaaaaataaaaaacgtaggatttttgtcattagttgtgaataatactaagaatctaactgagacccacttgcaattcttcaagaatttaatatgattagtttcaaaagtaatgctaaacctcttgcgaatcacgctttttatcctcttgagtttttttttaaaaaatagtatgaaactactataacgtatgctttaaatatgttaaaaaatatgacgtcattttgaagatgtttaatgctttaaatagaaacacaccaaacaataaagtgagagtgagtgagtctgattcatctcctctgtttaagcaaagcacttttctaaaatcccacaggagaagagagatcggaagag

SEQ ID NO: 10639 - DNA, 3000 bp, Unknown
  misc_feature (1)..( 3000): cDNA_ID_2716210_gDNA_ID_2213666_Annot_ID_132694 3000 nt of promoter + ATG
acaattattagaaaaatcaatgccttctttggaaaaaaaaaatcggtatgtggctctattaattgaaaacatattttatatttgactttgttttttttattgaaagtgatttgatagcatcgttgaatgatttagtaatatctcccgtaagaatttaattatcccgttagactttttaacagaccagccagatgggaccaacgtgcactgttttttggccggagaatgtataaaaaatattgaagatgcagtgaacactgaccaccattcacttctccacaacttttaatgaccggtttacaaaataaaacatagtactatataattttcaacgtgttagtctgatttttatatttctaaagagaagtactcatctatttttgagctattaatctattacaatttgtgttctgatctggagagtggagagttatttcaaagtaaagtatgtagattgtagaggatctatcgagaatctactcatttaaaatagtttgacgttgtagcaaacaatttttttgtcattgatgatttgtattgtttgtaaatattatttagaaaccaaatcgaatttttagttgaaaattataatctgtttaataagtgataattacatcatgcacatgtacctagtgactcataatgaaacgtatcataatggattgacgagtagttgtctgatattgacatcttaatttataacttcccttttcattgttaatgttccttactgtcttctgattgataataaagacgttgacatgtcaaaccacataattatttgaaaaatatatattatttcttcagattttcatcatttgttataagtctcgataagacagtttttgtttttttaacaattttttacaaaaaacttacgaccataatttagttcaggcgaaaatcagtgaatcattaatcatatttattagtttggatttttatgtgtttttctttttatgtatttgaggatttttcagtttgtgaaaacaaatctaatatgcttatttgatttcttctttatttgctgtattcttaatatatcttgcagagctaaggtaatactcaaattttttttttccacacgtaaaaactcatatttatcagtttggaattactgtattctttttagtagtcctctcactcgccatggcaagaagaaggtttttttttcctttttcttgcattccatgttaatcagtatttgaataaaaaagcaagctaaatcggcaaatgaacttatatccaaataatcaagatatcaatctgtgtaagcattactagaaaagtagagatactcgtgttaccgtgtaaattaaaagaataaaaatgtgcttttcaaaagttatatacttttcttgtgcacccataactttagcaaaagcaaccatcatcattcttgagcaattaaaacaaataatattgatcttcatttggtgccaaaatactttacggtaatgacgtcaaactcgatgtttcttgtcaaagtctgaaagaccaatataaaataacactagacacattataaaattaacatattggttcattgtaattaaaccgtcgaatatatataacgaaaataccaattacgctgtgaataaacaaacaaaatcattttattagtcatcgagtaaataaattcgattataatcctcaatagtcaatatatatatagctcacatcacattatgcgattaacaaaaacaatccaaaacagttaaatgattagaaattaaacgagtctcactaaattattaacgactccaaatcacgagaaggcttaagagttatcatgtcgggagaatttaactgataacctcttccattatctctcaatcacgtgatttttgttcaacgagtaccgcatctcaagaataaaaatggcaatttaggtaaatatttgtcattttcaagggcaatggaacttaaagatgcatttcagaaggaaaagctttgtcgtgttatgagggaaatgtggggacgcagctacttcgctttcaaaccgttggatgaatatcctttaaggttcatcgtacaagatcgacggcactcaccgagggtgtactcatgttgtgacacagaggatcatgtctacttggagtacagctagcagctagagattctgagccgataacgtcgagaattgtagccggctaagtcgtatatgctggtttaaactttaatctgtacttatatataagtcaacgtgcttatcaaaatcagctcccttatcgtgtgataggtgcattgtcttattagactccgttatccgtcaccttcgcatattaaaatcactttttattttttggttttaaattaaagtctccatttctgcaagattttaatgttcgtataaataagcctgaagagagagagagagagagagagaaaacttgttttttttttttccattagtttttttcttactttctggtcgagagaggagagtccaaaaaacccaaatccttggcctctttcaatatcaggagagagaaactgaagctctggcctttgtttctgaaatcgatcgtcttcttcttcttcatggcaagtaacgtatctaggtctttcatttttggtttaatatctaaatcgtagcttttctgggtttttgatttttgtttttgtctcatggaagtgaaaaagatggccattttaagctttatatttaattcggtggacaataataatactaggaagacctaatttttgtgtagcccaattaaacactaattaaatccgccggaatagagacttttggagaattttccggaggatagttgtaaagatctagttatatactgtgtaattaagaggctgtgtctattttcattttttaaaaataataattaaatggaggaatatctgaaacccagtaaattgggatgatttgatggttttgtaaggttatcatcgtcgccattatattgatatgcagatctggtgggtttttctgcatctgacttgatagctttatcggactgagtggcaaaatcaatc

SEQ ID NO: 10640 - DNA, 3000 bp, Unknown
  misc_feature (1)..( 3000): cDNA_ID_2716206_gDNA_ID_2213666_Annot_ID_132695 3000 nt of promoter + ATG
tcgtcatgaagtgataataaatttaaaatctattttttattatattcacatggataggctattttcttgtgggacgagtaaagatggggaatcgttcatagttgagtggaatgaaagcgaaggagctgtgaagagaacttatcaaggattccacaagcgttcccttggtgttgtccagtttgatactactaaaaaccgttatctcgctgcgggtgacgacttctccattaagttctgggatatggacaccatacagcttttgactgccattgatgctgatggaggtctccaggtatgcaaacaaatacctcgattctccctgggaaccgaatgttttcatttgcagccatcatggctctctatgttttgtaggcaagtccacggatcagatttaacaaggaaggctctctcttggctgtttccgcaaatgacaatatgattaaggttatggcaaactcagatggtctaaggctattgcacacagtcgagaacttatcttctgaatcctccaaggtactgaattttgtgctcactggatcttcaacaagcaaattactaacccccaatttgaaatttcttcaacactttatttttcatgtacatttgcagcctgcaatcaacagcattccgatggtagagagacctgcctctgtcgtttccatccctggaatggtacgaaaatcgatactttttccgtcagtttctctatctcttggtctgggtccaatcatcgttgttgatcacttacctttccaacagaatggagattcgcggaatatggtggatgtgaagccagtgattaccgaagaatcaaatgataagtctaaggtatggaagcttactgaagtcggcgaaccctctcagtgccgttcattgagactccctgagaatatgagagtcaccaaggtactaacacatagactgacataactgtacttatatggcttgattctaatgactcaaaacttgagcagatatcgagattgattttcacaaattcgggaaatgcaattttggcattggcatcaaatgctattcatctgctatggaagtggcagcgaaatgaccgtaatgcaactgggaaggtacttatggtctaaaatcttcctttaagatcgccaaaagagttgaaatcatgatgaaattcaatttgagattttgtgtaggcaacggcttctttacctcctcagcagtggcaaccagcgagcgggatcttaatgacaaacgatgtggctgaaactaatccagaagaagccgtaccctgttttgctttatcgaaaaatgattcctacgtgatgtcagcatcgggaggaaagatctctttgtttaatatgatgacgtttaaggtaaaatcccagctacagacagcactatgtctaatgtatgcaaacaatgcttcatctgttacatttaattgtgttgttggctaagcgcagacaatggctactttcatgccgcctcctcctgccgcaacgtttcttgcttttcaccctcaagataacaatatcattgcgatcgggatggatgacagtacaatacagatttacaatgttcgtgttgatgaggttaagagcaagcttaaaggacattctaagagaataaccggcctcgctttctccaatgtattaaacgttctggtttcgtctggagcagacgctcaggtgctgattcatctcatgttttgtaataaagaatccaaatccttagaagtcttagtgtgaatcttttggtttttgtatgcagctttgcgtatggaacacggatggatgggagaagcagaaaagcaaggttctgcaaattccacagggaagatccacgtcttctttgtcagacacgcgtgttcagtttcatcaagatcaagtacacttccttgtggtccatgaaactcagctcgctatatacgaaacaaccaagcttgaatgcatgaaacaggttttagtctttatatatgttcattctctctccttgcatctgagtaacccttatagaagaaagaaatgtctttattttgattccagtggcctgtgcgtgaatcagcagctccaataacacatgccacattctcatgtgatagccaattgatatacacaagtttcatggacgctacaatatgcgtcttcagctctgcaaaccttcgattgcgttgcagagtcaatccctctgcatatttgccagcttctctcaggtgagttaatgaaatgaatataaactagtgcaatgttggatcatgaatcttgagtcttcatgttgatgttttgtgcagcaactcgaatgtccatccactggtgatagcggctcatccgcaagaatccaacatgtttgcagtgggtctgtcagacggaggggtccatatattcgagccgcttgagtcagaaggtaaatggggagtagctccaccgcctgaaaatggctcagccagcgctgtcacggctacaccttccgttggagcttctgcctctgaccagcctcagagatgatctgcttcagtttcttactctgttttttttgtgggggttttagatcttttccgatttattattgttttgtttgtgtggggggaagaaagcattctaacaaggtaaatgaattaatagcttacaagttcttcttaattggttaattcgatgttgcttgcctctgatattttggtcttgagaaatatcagttttgcaaaaggacgaatttgcaattttgcactccgaatctaagcacgaactaaggattgaatgccacgtgcagcttcgagataggtttggatattcgttttgagatacgaaggaagaattactaaggcctatgcggcccacggcccacagacttatatatctacaatgataaatatcttcaaaaatagtaattttgagaaaatattgagaagagacagagaaaaaaaatcgagtgaaaattatctggtgtgtgtatctagaagaagctacagagtgggacgaggtttaaactcgccaatcgccattgacctctcgcttgctttctttaactaaa

SEQ ID NO: 10641 - DNA, 3000 bp, Unknown
  misc_feature (1)..( 3000): cDNA_ID_4266572_gDNA_ID_2213666_Annot_ID_182114 3000 nt of promoter + ATG
tcgtaaaacaatttaatattttatatacaaaatcaactaaatcttaatcacataaaattagcacaaaaaaaagtattcaacaattaaaaaattatcaaatctctatataagttttgatactatattcgaataaagtgtaatattccttttcaatttgtattctttaactaatttaagcgaactaatatatttgctaatcttatacctatcaaaaccgactatcgtttcttatctttatagtatatttgcaagatcttttttggtggatttggataaaagtgcatatcgtcctactatattatttgggaagtacattttaaatgtaaccttaatttttgtaattaattacatgacaatgccattagaaaaatttaatcaaaaacaaaatcttttaatgacatcattaagattaccaaaatcatttaacgacaatattcatctcttaattatagggtttattggatttaaagacgggtcatcaaagatttcctaaactgaagcaaaatatattgaatattaaaatatctatctgttaccaaattataaacaaataagttcgtaaaacaatttaatattttatatacgaaatcaattaaatcttaatcacataaaaattagcacaaaaaaatgtggtacattcgggtctatagtagttttgcaagacttttttggtggatttgggtaaaagtgcattcgggtcatgtagtacattcccctattaaataaatatggtgcactcctatgttattagctaaaatatttagattataatttagagtcatatcataaataaaattaatattaataaaataaatggctttttggcaagacggatttggagggacgtgtttttgaatcaacattaataaaaagtaaaatataattaatccactgtttcaatacgggttaaattattaatttattattttttaataacaattaatatatataaatacttaataataattataaactgtaaaaatataaatattttataaaaataaaatttacaagttttaatatatattacttttaaaaaataaatcatcccgcggtataccgcgggttaaaatctagtttcatttaaacttgttaagatttaaaagtatttgattatttattttgaaatatatgaaaagaaaataaaatataattccttacagtccagacatggaaacaaataaactttgataatctcttcaaattataaattataaatagaaacgttttcatcataactcattcagaaaataaaaaataaaaaataaagaaaagataggggtgaaggaattagcatgattttgattatgatgatacattaagttaattacccaattagatttgaaagtataattttcttgaagcttcaaaatgggtgagtaatataataaaattatgaagcctcgggaaaatgtaaatgaaattaagtagatatgggccagaccaacgatattaactgaataataattgtggactaaatattggactccgtaaaagcccaaaacaaaatataaaacgaacccacacgacacgagttattatcagaaacattactgttacaatgcaaacgcgcaccagtagagcgtatagcgcgtgtgtcgaaaatgcctagtctatatacccaccaaaaacgctgtttttagcctaaatactttattttaaaagaaatcagcgcgtgggagaacccatgaacatttgggtttgtttatccattgttttgatatttatttatttcggttaattccaaaacaaaggattgcttcttcttggtatttttgactaacaaatacttttttttggcgacacacttatgtatagcaaaactaaaaagtatgaattcaaacaaacaaacaccggtataatatgtttacactaaactaaactaggagaagatgtttaatttatgaatgaaaccaaaattggaattattcactaaatgacgatttcgtaaactcagcttaacatttattgacgataacatcataaagagctcaaaatgatattgtactacataaaagaaaattctcttccatactagctataaaagatatttcaaatgaaacaatagtattattggttacaagtaaatcatagtgtacctcttaacaagtcaaataacttaaaaagatcaaaatatgcacaatcattttattaacaatccatatatataactgggaaaattaaagtggcgtaaatttgatcaatttatgtagctagccggtgattataattgaatatacgatgatgttccgagacaagttagttgatcaaaatattaattcatacatatccatccaacatatgttgctattacaatttacatatgataatcttagggcaggcctcataatatatacattaattggtaaaatctggtcaccaaatttacgagcagtagtaatcaatattagtagtagataacccagtttttgtttttttggtctgaagtagataaccccatttctatccataatatctttgtatttaagatacgttttcacgagggccagccgtaaaattgaattaaaatcccatttgtttataagtttatagtaaaatatagtagcttcagacaagtagtactaggaaaataaatcaacttaatagaagaaccagatctgtgaacggagaaagggacatatgagtttgtcaaagtcaacgatagaaacggttacaagaatatccaatgaaagagagccacgtgggagatgcagctgaatttaagtaagaatgatctcataatcttgaccatccaccaataaaaagcttaattaatacatcatcatccaatccggtggagtaaatgcgtagatggatagagaacggtgaagtttccaacaaaatctctgactctgattcagctttctatattcaatcgttcccattatctcattttgtagtttagttttatcctcaacaaccatcttcttcgttatattccttgagataacaacaaagcatcgttcttcacctttaccaaaaagataaaaaaaaagaaaa

SEQ ID NO: 10642 - DNA, 3000 bp, Unknown; identical to SEQ ID NO: 10640
  misc_feature (1)..( 3000): cDNA_ID_2716206_gDNA_ID_2213666_Annot_ID_182112 3000 nt of promoter + ATG

SEQ ID NO: 10643 - DNA, 3000 bp, Unknown
  misc_feature (1)..( 3000): cDNA_ID_3037769_gDNA_ID_2213666_Annot_ID_182109 3000 nt of promoter + ATG
ttggatataagttcatttgccgatttagcttgcttttttattcaaatactgattaacatggaatgcaagaaaaaggaaaaaaaaaccttcttcttgccatggcgagtgagaggactactaaaaagaatacagtaattccaaactgataaatatgagtttttacgtgtggaaaaaaaaaatttgagtattaccttagctctgcaagatatattaagaatacagcaaataaagaagaaatcaaataagcatattagatttgttttcacaaactgaaaaatcctcaaatacataaaaagaaaaacacataaaaatccaaactaataaatatgattaatgattcactgattttcgcctgaactaaattatggtcgtaagttttttgtaaaaaattgttaaaaaaacaaaaactgtcttatcgagacttataacaaatgatgaaaatctgaagaaataatatatatttttcaaataattatgtggtttgacatgtcaacgtctttattatcaatcagaagacagtaaggaacattaacaatgaaaagggaagttataaattaagatgtcaatatcagacaactactcgtcaatccattatgatacgtttcattatgagtcactaggtacatgtgcatgatgtaattatcacttattaaacagattataattttcaactaaaaattcgatttggtttctaaataatatttacaaacaatacaaatcatcaatgacaaaaaaattgtttgctacaacgtcaaactattttaaatgagtagattctcgatagatcctctacaatctacatactttactttgaaataactctccactctccagatcagaacacaaattgtaatagattaatagctcaaaaatagatgagtacttctctttagaaatataaaaatcagactaacacgttgaaaattatatagtactatgttttattttgtaaaccggtcattaaaagttgtggagaagtgaatggtggtcagtgttcactgcatcttcaatattttttatacattctccggccaaaaaacagtgcacgttggtcccatctggctggtctgttaaaaagtctaacgggataattaaattcttacgggagatattactaaatcattcaacgatgctatcaaatcactttcaataaaaaaaacaaagtcaaatataaaatatgttttcaattaatagagccacataccgattttttttttccaaagaaggcattgatttttctaataattgtatttattttaaatattggaatctacaaaacattattttaggtcagttggtcaatgcaattggttagaaaatctgtaaccaatgaaaggaaaatagtgtcaaattatactagtgagtatgttcataagttactaaagtccactaagtattaataaagcgcactatgtgaaactactacaattattattggctatttttgtttgtactacttgttttgtttaatcatggttagttttttaaattttaaaaccaaactttaagttgattaataaataaataaaaacgtagatgagaagggtgttggctaatggctattggttactttccacttatgtatgtcctctcttcttctcttaaaaagcttaattgctttgctattttgatactagtacagtctattcttcaatttatcagcttcttctcttctctcatatcgcggtaattaaaggcgatatactgattgctttctggggagaagttgtcggttgtcttttgccattataattataatgtgaatttttgtaagccataattatttgcactatttatttatttagcccaaataagcacgtatgtatatatagatagactaatttccacgtatccaagacattgccgctaactattttttgttgggaaaatttgatttttgttatatgacgacgacagcgacaccatcaaatttgtttatttatttcggttctcttgttatcccaacgccgcttggattgatatttgtctactatcaaacttcattatacttttgagcgaattaaccaaaagatttgtaatgacacctttttatttcaaaacgtacggataatattttgtcatagaccaaactatttttttcataaaaattagtctatgtactacatatcaaacttgttggtaattcgttggggttggtttctagtcgtcttcccatctcgttgggactaaaacaacattcttttagccactttcactattatataatggaacgaaatgacaagcccgttaaagacccaatagcccaatattgaatcaaaccgcagatcccctttcttcctccaaaattcaggtcacaaacccaaacttctcacccgtatctaaaaagttctcgtggtgtatagtcctaaactagtacacgacagaatcaaacctgtttgaagtatttagcacggatccaaacacgagagacatcccaaggaatctgattctccaatgtttgtctagacataagatgcgttgatggtaaagaagaaacgatacgcacatcagattcacagggttttacttctttttttggtaagattggatttttctctcacccccatttcttattccatgcttcttagatcgttaattgaatctgcatcccgcagtgatcattctttaatttacgaatttgtttttgttgtcttgttgtcgatttttgtcaattttattgtgtaatttaccaagtgtaaattgtgattgaatcgattgggagggcattgcgaggtaaatccatattgtgattttttgtttagtgtctaactagctgtatcgtactccgcataaatcacaggatttttttggtgagaatttggtaacaagaggaaattgttccattgatgacgaagctcctagtgttccattgagaatttttggtttccgattggattattaaagaatagaagaaaaatgttgaaatctggggtttgattttggtatttcaggagacacaagatctaggatttcctttatttagagacgagggattctatg

SEQ ID NO: 10644 - DNA, 3000 bp, Unknown; identical to SEQ ID NO: 10638
  misc_feature (1)..( 3000): cDNA_ID_2716224_gDNA_ID_2213666_Annot_ID_182107 3000 nt of promoter + ATG

SEQ ID NO: 10645 - DNA, 3000 bp, Unknown; identical to SEQ ID NO: 10636
  misc_feature (1)..( 3000): cDNA_ID_2716236_gDNA_ID_2213666_Annot_ID_182103 3000 nt of promoter + ATG

SEQ ID NO: 10646 - DNA, 3000 bp, Unknown
  misc_feature (1)..( 3000): cDNA_ID_3037547_gDNA_ID_2213666_Annot_ID_182102 3000 nt of promoter + ATG
aaatggcggcggctctgcagacgaatatccggacggtcaaggttccggctacgttcagagctgtaagtaaacagtcattggcaccctttagagtaagatgtgctgttgcttcccctggtaaaaaacgatacaccatcactctccttcccggagacggcatcggtccggaggttgtctccattgccaaaaatgtgcttcagcaagctggatctttggaaggttctctctctctctcttgttccctttcttatttaatttagttgctgtttcatttcaattggggactactgttttctgcttggaattgaaagatgtgagcattagaaattggcgagattttgaatgggatttacaatcgtgggttgggctcaaaggccacggagattgcctaatacattgcgtctgtgctctgtatcaggagtggaatttaacttccgtgagatgcccattggaggagctgctttggatttggtcggagtgcccttgccggaggagactatctcagctgcaaaagaatcagatgcagtgcttcttggagccattggagggtctgtcttctctcttttcccactaatcttgttggctcttaattattgttttgggaaatacagtttctcatttagtcattttctcatgttggtataataataacttaaggtacaaatgggataacaatgaaaaacatctgaggcctgagaaggggttacttcagattcgtgcagctctcaaagtctttgcaaatctgagacctgctacagtcctcccacaggtgaccatcctcagagatttcttggttgcctgaactttgtttcttgtgtgaaactctaattttgttgtttttatacagttagtggatgcttccaccttaaagagagaggtagcagaaggtgttgatctaatggttgtaagggagcttacaggaggtcagttttattacttattaaaaattgatcgtaattcttgtctttctcgtgtgacaatatcttataaaatgtcatgtctcatggtaacaggtatttactttggagagccaaggggcataaagaccaatgaaaatggcgaggaagttgggtttaatactgaggtttatgctgctcacgaggtactctattgaaaatctcagatgcagatttccgtggactgattgttaagtactagggtcaaatctaataaagcattttgtatgttcgtcagattgatagaattgctcgtgttgccttcgagactgctcggaaacggcgtggcaagctgtgttctgttgacaaagctaatgttttggaagtgcggttgataattatgttttctttgacttgttttcctctctcttgtttcctgtggaacgaacataacactgaatttttttatatgcaggcctcaatcttatggaggaaacgagtaacagcattagcctctgaatatcctgatgttgagctgtcacatatgtatgttgacaatgccgcgatgcagcttgttcgtgacccaaaacaggtacgtgtactttgtatttgccaaactagtcagctttgatgtgcgacaggtgtaaatccttgcaattatttgattgtttgataaatgcagtttgacaccatcgtcacaaacaacatttttggtgatatattatccgatgaagcttcaatgatcacaggaagcataggaatgctgccatctgctagtctcagtgattcggtatgatataaaataatatgatcttttagtatgcaagcagtatgatctagtctgaacataaacccgccatgtgtaatacagggacctggactctttgaacctatacatggttctgcacctgatattgctggacaggttctaactctatccttcaaacaaacacggtttttgttccctgatatcaaaactagtttaatgccaaaatcaaagagcacaacttgttgattctttgaattttcaggataaggcaaacccattggcaaccattctaagcgctgcaatgcttctgaaatacggacttggagaagaaaaggcagccaagagaattgaagacgcagtgttggttgctctgaacaacggattcagaactggagacatatactccgcgggaacagtatgtttcttgaaccactcttataacatgtttccttttccttaaaaacgtcccgagttagtgtttgagaaacgtttaaacaagcaggcaacaacaaacagtagtaatatttttttgtctttttgtatggggtatgatcagaaactggtgggctgcaaggagatgggagaggaggttctgaagtcagtggactcccaagttccagcttctgtttaatatttgtagaaactttgaagagttcatttccaacaacaaatgttgtaccttgtactcaaagagtctcggttttattagcgatttttataatgtgagattattagagggacttatttgatcgaactgaaacgttgatgtttttttctgagaaataaatatccttgtggagataatgacgtgtcagagtatcactcaaaaagccaaaaattagagagacaaaaaagattcaatctcccccgtagtccttatccggcgccgagtgtggtcaaacgtcgcaagagttttcgctctttccggtgagatctttttcctctgatttctgtttcatggcaagcctacttttagagctgagtttaatcgatgaatcaaggatgtgaatttttgttatttcttgattattcattattatgttcaagaaatctaaatctctgcttgggaactaattcacaatttagacatctctgatgagtttttcctctgttttttatttctatcttatcaattttgtttctggaaattttcatggctttttgaatgttcattgggattgcgtatcttggtggtggtaagtaaaaagtcaaacgccttcgtttttctgcataatctctgagttccatcaaagctctgttttgtgttttcaaggtggacttttcacttgacatgttaggctttgatccttttttgttcacacagatagacaaatg

SEQ ID NO: 10647 - DNA, 3000 bp, Unknown; identical to SEQ ID NO: 10635
  misc_feature (1)..( 3000): cDNA_ID_2716259_gDNA_ID_2213666_Annot_ID_182097 3000 nt of promoter + ATG

SEQ ID NO: 10648 - DNA, 3000 bp, Unknown; identical to SEQ ID NO: 10634
  misc_feature (1)..( 3000): cDNA_ID_2123533_gDNA_ID_2213666_Annot_ID_182094 3000 nt of promoter + ATG

SEQ ID NO: 10649 - DNA, 3000 bp, Unknown
  misc_feature (1)..( 3000): cDNA_ID_3037528_gDNA_ID_2213666_Annot_ID_182117 3000 nt of promoter + ATG
tgtatattttatagtttaaatcaaataaaatgaagataacggaatttgagttagtatgggcaaaaacggttaatggttgtgtcttgtatttaaagatggagactttggaccaattgggacaagttgatggatgtcatatccaagttcattttctcctgatatttttctggtcaggtttagtaatttagcattcgaattccagtcaacaacagattatatatctaaacatagacggtaaaatatactaccgaatatcgaattaggcctttcgactaatactgattttagattttggatgttgttttgacatgttactctgttttctatctaatgctatagagtatacacttactagtgcgcacaacaaaaaacagaataaaattaatctatcatttgttcgtttaagaataatgaaaaaacttaaaacctacacataaaagactgtactttttgaatggaccttctgaatctataatttagatcacaccctttctttttctcatatactaaaatattaatcggaccacacacacccttttgctttgtaaaaatttaaatcgatctcctaattccaaacaacagaacttgttttttttttttttggttttattataaacaacagaacttgttctttttttttggttttattataaacaacagaactttgtggcaacttgtatactaaagtgatgaatatatgtatactacacatacacgacggcaaaatattattatatgaagaacgcaaaactacaaagatgtttccttcgcattatgtggtacataatccaagcacataatagcgtttaaagattaatttatgttttattaaaatgaaatccaaatccagctcaaagactaatgccttggagtctttcctctaaaatccttctagataatttctctaatttcacttgtagaatttcccttttttttgacaaaaatttatttgattcttatttggcttgttgttgtctgtatgtgtgtgtctatctttggtcggccatatttaaatctgtattgatactcgacatctttaaactattaccgatgaccaaagttatatgtttttataaatatagctacaatatatacagatatttgtcgtaattatatatgatctttattaaacttcttaacgcgtgtgacataaagaaacgaaatgttgtctccgtactcaaaagcgtatactcgttaatcaaagcatttttgcttactaatttaatctgtaacgtatggacatttatgtacaatactctatttttcgtagctgtacaaaattgaatacggaataatacaatatttagggaattagtagcatgttccatgcaggttggactagttctagtgtccgccatatgtataaagctgtaaacatctttaacgcatatatttggtttattaaaacaatagttttgtgattactatgacccattcatgtatttgcatataaatgtagtaacttggagttttggttaattagacaaaagatactccgatctaatattttttaaaataagctaattgaaacttcaacgtgggataaaacgggctgacaaaaaaaggttcaacatgaagaaaataactctaactgataaaacggcacggcgtctgaatgactataactctataaggtgacaaaacgacacggtgtcaacatccttaaaggggggaagaagagtcgtcgtgattcgtcgggtggctggctctttgataaatctaaacaataaacgacggaagcaatccgattcttcgtagataggaatagcccgaatagactggtactgggagtgttggacccacttcatcaatgttcgtgtcgatattttcaattctcatactcttctttggtcgcgttcaattattcaaatctcttaacaagtattttcttcacaagaaaattcgccaagcaaattggaaaaaaacgaagaacacacgaaataactagccaaaagagtttaattacttctttatatatgtgatcgttatttatttgcattttactcgtttttttttccaattatgtcgacacttgattaaattagaagcacaaagcctcgaagcaaaccggcaaagataataacatctgccagagctaagtaataaggtttacagttagatgatcgagagaatatgagctttggcaccgcagaaaacgctggccaattacataggaaaatgttcatttgaaaagatatatagctaaacagtatatatgtctcaaaagatagtttgactcgccgcatctttctattaggcactcgacgtcttcatcatatatgcattattattttgcatattaattaatggtagggatcaaattgttacgaagacatgcaatagatcatttggatattcatgcggtcgacatcaaataaaacagctctcgtacatacagacaggataagctcatgaagtttcctttggtatttatttttacgtccttttccatatccattatgatagttatccggtagctgatgtggacttcgtatcttctactgccagtaattgtatttctttttttataagtgcgcggaatatctattttcattcatcctcatcatcatatactaacatcaacttatctacctttttttttttaagggtttgctcgaggtttcatgtcattttttggaaataaattttgacaacatgatttaatgttgaatggtaatgaaataagaaaatcaagatgattcaatactcttcgatatatataaagtgagcgagagggaaagcacagagtatgataaatcaactgaatttagctaataaaacacatttttttatattgatagcgtcgaacagaccaacgacaacacaacggtcaaattaacatggcttaagtcaagcgaggacagaacgtgccaaagccattgaatatattgaatccttttataagcatatcttatttagtaaccacgtgagtcgtgacgatggcttattattagtacgtactacgtaactttgaagaaaagaagccctgaaatttcggaa

SEQ ID NO: 10650 - DNA, 3 bp, Unknown
  misc_feature (1)..( 3): cDNA_ID_3041335_gDNA_ID_2213666_Annot_ID_182092 3000 nt of promoter + ATG
aag

SEQ ID NO: 10651 - DNA, 3000 bp, Unknown; identical to SEQ ID NO: 10641
  misc_feature (1)..( 3000): cDNA_ID_4266572_gDNA_ID_2213666_Annot_ID_132697 3000 nt of promoter + ATG

SEQ ID NO: 10652 - DNA, 3000 bp, Unknown
  misc_feature (1)..( 3000): cDNA_ID_2716186_gDNA_ID_2213666_Annot_ID_132700 3000 nt of promoter + ATG
gactagttctagtgtccgccatatgtataaagctgtaaacatctttaacgcatatatttggtttattaaaacaatagttttgtgattactatgacccattcatgtatttgcatataaatgtagtaacttggagttttggttaattagacaaaagatactccgatctaatattttttaaaataagctaattgaaacttcaacgtgggataaaacgggctgacaaaaaaaggttcaacatgaagaaaataactctaactgataaaacggcacggcgtctgaatgactataactctataaggtgacaaaacgacacggtgtcaacatccttaaaggggggaagaagagtcgtcgtgattcgtcgggtggctggctctttgataaatctaaacaataaacgacggaagcaatccgattcttcgtagataggaatagcccgaatagactggtactgggagtgttggacccacttcatcaatgttcgtgtcgatattttcaattctcatactcttctttggtcgcgttcaattattcaaatctcttaacaagtattttcttcacaagaaaattcgccaagcaaattggaaaaaaacgaagaacacacgaaataactagccaaaagagtttaattacttctttatatatgtgatcgttatttatttgcattttactcgtttttttttccaattatgtcgacacttgattaaattagaagcacaaagcctcgaagcaaaccggcaaagataataacatctgccagagctaagtaataaggtttacagttagatgatcgagagaatatgagctttggcaccgcagaaaacgctggccaattacataggaaaatgttcatttgaaaagatatatagctaaacagtatatatgtctcaaaagatagtttgactcgccgcatctttctattaggcactcgacgtcttcatcatatatgcattattattttgcatattaattaatggtagggatcaaattgttacgaagacatgcaatagatcatttggatattcatgcggtcgacatcaaataaaacagctctcgtacatacagacaggataagctcatgaagtttcctttggtatttatttttacgtccttttccatatccattatgatagttatccggtagctgatgtggacttcgtatcttctactgccagtaattgtatttctttttttataagtgcgcggaatatctattttcattcatcctcatcatcatatactaacatcaacttatctacctttttttttttaagggtttgctcgaggtttcatgtcattttttggaaataaattttgacaacatgatttaatgttgaatggtaatgaaataagaaaatcaagatgattcaatactcttcgatatatataaagtgagcgagagggaaagcacagagtatgataaatcaactgaatttagctaataaaacacatttttttatattgatagcgtcgaacagaccaacgacaacacaacggtcaaattaacatggcttaagtcaagcgaggacagaacgtgccaaagccattgaatatattgaatccttttataagcatatcttatttagtaaccacgtgagtcgtgacgatggcttattattagtacgtactacgtaactttgaagaaaagaagccctgaaatttcggaaatgggttcaaaagtccaaaaacagtttgcggttaaagaagggtacgttattttttttataacttttttttcattttttcatcaaagaaaggtacgttaaagacaaagtgaagacgtagtttaattttgacatgtttagactcattgatattcagaaacttagtcctggaattgtgttgtagcaaaaacaacaacacaacgagagaaagataagataaaagcatatatgatgggtttgtgttgcggatgttacgagaatatgagacatgacacatcatgacatcaatgatatggacaagcatacgatatatttcagaagaaataggatgtttcctccccttgcaagctttagcttctccagtgcattaagtctaattcatcgagctcattgtaggtatacgaaggatttgactgagctaacttaggaaaaaaagattgaaacgaggaatgatttagtaatggtaatttgaccttggttttgtacttcttttaattcataaaccccctccaccgtaaaaatgaaacattagaaatcctaaaagggcagacaagttgatgtccaaaaaaaaagaaaaaagggcagaagagtaaaaacgcgaatgaaagagtcaaagcaaaaaattggtaaaaaaaagcgtgaacggcaggattcgaacctgcgcgggcaaagcccacatgatttctagtcatgcccgataaccactccggcacgtccacctttgctagttgaatcatttgttaaattgaaaacccgtcattttgatctgattttgtactgtatgttgacaaattgaatagtctctgatgatttcgatcaaagagaagccacggggggagcgctagcacttaaaggttcctcgctttcttctcaagtttatagtcttctcctctgtgttggctcatttacatgggtagatttagttttcgagggttttatggcgaagttcgcgatgttctgttaattgcaatgtctttcttctttttttttttttttttttttttggtattcaattccaattttccagtgtgatttgatctgaactcgaattcaaattcagtgctactgagttatgttaaaaccattgtccattgatttttttatgttgaaattgaaaaaaggttataccattcgtttgtattaagatttgtctttcttagggaatgttttacattttttgcagatttgcaccgttttctctctggctttgtgttgtgctagatgcgatgcaatagcaatattttcctggagtttcaagtaactagtggcttaggttcataatagtgtttctttgtaggacgaaagctgtgttagtattctctccactgtaaaggacaag

SEQ ID NO: 10653 - DNA, 3000 bp, Unknown
  misc_feature (1)..( 3000): cDNA_ID_2716182_gDNA_ID_2213666_Annot_ID_132701 3000 nt of promoter + ATG
tggctttgtgttgtgctagatgcgatgcaatagcaatattttcctggagtttcaagtaactagtggcttaggttcataatagtgtttctttgtaggacgaaagctgtgttagtattctctccactgtaaaggacaagatgtctcagaagcgaaatcttccttcttggatgagttctagggatcccgagattactccgagtaagtctcattgtaagaagcctaaggatgaaggaccaaccgaagagcacaacagtagaaatgccccttccaacaagtcagaacacgccgagccaagttcaaataccactgaattctctaaacttatggtttgtgtgtgtcttcatggtcttgttgagactcaattatcttaagctgtcatgttagtttatatgcttttgtgattgagttgaaggttaaactatgcaggaaggcgttgtttttgtactttcgggctttgttaatcctgagaggagtacactgaggtcacaagccttgacaatgggagccacctatcaacctgactggaacgctggctctaccttgttgatttgtgcttttcctaacactccaaagttccgtcaagttgaaacaaatggtggaacaattatctcaaaggttacctctttgactcttcttataagggattgtgtgcggatttgaatttctcctttttgctgatattttatatgatttcactgtctccaggagtggataactgagtgttatgcgcagaagaagttggtagatatcgagcaataccttatgcatgctggaaaaccatggaggaaaagcagtagtccccaagatgctaatcgaggtaaaaagaattatattggaaaggctttagatagaatctccgttttaaccatcctgaggttcatcaaatcaccttgtttttacgtttatgacaagagaaaagcttttcttattgcactgcttcactccgatgtttagttgactctgtgaaccttaattgattgtattcagaaaagagagaacacctgtctaaaaaaccagagaagcaagtagagaaaaaaacagaaacaaggggaacaccatctacctcatccaaggcatgtttaaatctgatgatttggttaaccaaaacgaaccgtattttgctccaatcaatggtctatgactgtttatttccatatgttcacagaatagatcagcttgcaatcttgtgaaagagccattttttgttacagaggtgaagaaatgggccagggatgacctaagtcaaaccatctcatggcttgagagtcaggaggaaaaagtaagggaattaatatgctctttcaaaagacatgttttcttgattgtatgtttccgttattctaaagccattgtaacagccagaaccaggcgaaatcaagcgaatagctgcggaaggagtcttaacctgcttacaagacgccatagattctcttgaacagaagcaggttaatatctctgaagtctgaacaataatagttgccgcctgtgtacatttttggatttgttaaactttgatcagtttctttgagaagatcattggttgaatttattctcgaatgttcttaattttaggacattggatcagttacagagctatggagctttgtccctcgtgtagtgaaggagcttggaaagatggaatcgtcttctaaaaaggaaaattcaacagcatcaaaggaagaagtttgcaaacaagcaaagtcgtggaaaaagatctacgaagctgagctagcaaaaccgggcgaagatgaatcgacctctcgggttgcttgtggctatgacagtgatatgaccgttgagatgactgaagaagagatcgaacttgcttataggaacgtttctttagagtgtctttagatcaaacttgtttcattttgcatatgatctcttaaggaattccaagaattcttgttatactcggtttgttcggtttgagtaggatgttattactgataaaaatttgaaataatccggtctgcttggttcggaaagaatgtttctaattagaatttatttatgctggtttggattcgattgagagatgtaatcggttgcaattaataagtcggtttgatttgatactttttagtgtcgattgacgatgaatttgatcggttaatacaaatttgatttggtcaattaggttcagatgtctccagttttgaaccggtttggttctatccaatttaataaccgttttgtaatatcagacaaacgaattgaaaccggaaacatgtaccgatatggttaggatcgaagaagattgattgaagacaagaccctaatttatttatacccttattgggttttgtcttgtgagagttgtgcctttctttgtttcgcagtagggttgaagcggatagtacgccacctctatctctctctcaccctatcgaactcgcgaagaacatcttcttcttcttcttctccgtcttcgtcttcgcgagctctctcagtagcgcaataaaatgggggcttcgcttcctcctaaggaggccaacctcttcaagctcatcgtcgtatgttccgattccctctctttctttctcagtttttactttgtcttaaacatgcgatgtgatgttcctggtcagcagaaattggaatacgatgagttttatctgctctattaaaccctaaattaagttaatcgtcaatgtgttgggtcaatagaaaaattcgttgacatatgaagtaaactgtgcggagttgtggttccttaatgtgttaatttgatgtaccaagttcttagcttcagttacttttgactatcggctattattagacctcgattgcttctgggcttttttagtcgctcagggattcgtagtttactttgaagaacttgaaaaccaagctttatcaatatatatatggtttcagcatagattttgggtttaaccattatattgttcaacctgctttgaatagttgacctttttctttatgtaattttcgcaagtaagtacatcatatatagttattctgagtaatcttata

SEQ ID NO: 10654 - DNA, 3000 bp, Unknown
  misc_feature (1)..( 3000): cDNA_ID_2716338_gDNA_ID_2213667_Annot_ID_132702 3000 nt of promoter + ATG
acttatagacatggttttcacttatcataattaattgtaactttatattattctggtatgtgtgtttgatgtaacttggagctagtacctaggaggattaagagctgagtgcacaagtgtataaacaaagtgattcagtcgttggaataggtatgccaaatgttaaagatgagcacataggttaatctgatagagagggcaaaatttaggatcaataataaagaagagaggccaaggacactaggaaatgagcttgagctcagcaagctctttcatggatgccatctttggtggcaaagcaacagggatcatatcaagacggtttacaaggatcgttggcttatcaaactcttttctaaatcaagccaaaccaagaatttaccaaatttgacattctttaataatttcttttaatttttaactgattgattctattaaattttcacattagtaattataatagatattaagtatttttgtaattttaggccattacaacgcatactttgcagtttgcaaataatttgacttactaaacgttcttcaaatttgatttagccagttgcatacatactttgctatttctttcctattttaaattgtgatagaaaaatattgaaaacgtcccatgggctctggacttatatcatacattcatagtctaaattttttaagacacaaacaaagcccaagggcccgaacataatacacagtaaacaacactatacacagtacaacgttcacgaatcaaatttgtgcttacaatcatatttacatcatatatcattatcaacatcaaaagtacttgctttttttgtgttttaaattaatttgaaagtagtacaacatcaaaattgaataccaatggtctttgccgttgaaaattttaggtgtatgaacttcatactatgaagagttcaaatgaaaatttattcaaacgtgtcttgatatagtattcaaaaaatcaaaggtaaccggtacgttgagtttgacaacgtacgtattgtaaccaataaaaatattggtatacagcttttttgtgtggtcaacttacatttttcatatttttgtatatgtttgactttgtggctatttgcgagttgtaatttcgctgaagtcaaatcgactgagtagcatggcgtttgttcatgaagccggagacaaaaccctgagacttaaccaatataatacgaccatgctcccgctacatctaacaaaacaactggtcaatataattatagaaataaaaaaattaataactagtaattaaaagtctaaaaactttaacgaatttcataaagtaggaataacataaagcgactaatcggcctaaccgaagaggcggcgggtgagcatgcaacttgttgtaccaaaatggtggctctaacgacttagggatactcgttcttgcttggaagctctacaaagaaaaaattatgccttctcaaaagtgtgaagattgattaaacctttaatttgtgaattaagttatgcatagatacagaacattgcatatttgatttgcatacttgatatggaagaatttcttacaagaatcagataccttgataacttttaaaataagacgaaatattaatcagagaaaaaacgagatatatatgaaaacaaactgaaaggtttttggacatttgaaacgtcatcttgtatgcatgaatgtatatcatcttagttttatgatttatgacgatgggtacatcacgaatataactttgggttctgattagtgtttgcattatataacatcttaatacaatttttttgttttaaacttgaaagggataatatattaaataaaaggggatctagatattattgattcggagaaaattataaagtaaaatggattaataacacaatttacaaaaacattaattgtatatacttaaccaaacggtaaatctaccgtataattgatctgattgatgatatcatctcataaatcaacccacatgttatgtgtaaatataacttattgatttctacaagaaaaaaaaaacaataatcgatttcgaaacaagctttttcttatgaaaaaattcatgtgatttaactgattatactgatagcactatccgacatgatcatctttctttgacgatcacaagatataatcaccatttccggttacttttaaaattattttaaagttttattcgtagatatcaaatggactgttttattaaactatcacacaaaccgatcttcaatatccgatgttcgaattatagatttacttcacttgtggtgttttttttatatatattataaagtaaaaggcaatgtcaactttattagacgataacgggatatgatcaccatttccggaaagatcaggggtaatatttgtcattcaacaatcaaacgagaatccgcgagtccattatttaacactttctcgtttgcttccttaacgtttttagacgcgttcgtgtctgactcggaactcagtttgactcaaactagaagatttttttttcttttttttcgtaaagacctttttttattttattttggtttgaaaaaaactctaaatcttttgctaaagcaaaatatatggtgatgcaagtctttcttttttagaaggtagcaatatttcttttgttttgagtaaaagtgttggaaagttaccttacgtagttacgttgaacattaaagtgtccgtattattcagaaaatctaacaacaagttttgaaaaattcgcgttttaatttttttgttagcaaagttataaaaatatgattgacgaaagaaaaacaagtaacaacgaatattccaattaaaaaaacgtgtggacggcgaaaagctctctttcggtcttcccttttgctctctctttctcaaggcatataaatagctgtcacctgccgattattatttgtaatcagaacgcaaccaaataaagaaagctctcaaactcagtcttgaagcttcaactttatatctaccatatcatcaactaactaattctttttaaaatg

SEQ ID NO: 10655 - DNA, 3000 bp, Unknown
  misc_feature (1)..( 3000): cDNA_ID_2716330_gDNA_ID_2213667_Annot_ID_132704 3000 nt of promoter + ATG
ttttttaatattttttttgtgcaccggaaagtaagaatgatatttaagaaaatataacttgggaattgcatggattaagtctgggggagccggtttagtgtaatttaatataggtcaactcataaactggatgcatatatatacagtatccaaaaaaaaaaagatattacgtaatatacacataattcacatctaaaagtaagacattgacgtgacttgacttatgatgcataaaaaatctgcctggagacaaaaaaacaaaacaaaacattggtctcttgagtgctaaaatctaaaatgtatttatttagttcactagttctatgcgctaaatgggcgcaacaccgaagggtccaattgatattgtattaagccacgggcctcagtttgatttgatctgttgatcatttaaacaatgataatgggcctgggcctctgagagccagatcgagtattttatgtatatgtatcacatgttttagttattttgttgatatcatatgttagctttatcatctacttataagtgttggtaaataattaacgacatacgagtaaattataacacatctataggagaaatataatatacggatataaactagaaacatggcaaaaaaagacatacttatataagcataaaacaatttaattagtttgattcataagcaactttagaggaaatataaacttgagattattataataaccttgatcacgctttcgagatacttacaagcataaataatataaaactagttaaaagttttctcaaaattattatattaaacaaaatgagttggtcatgacacgcacattcatgtcgtttctcaaatgattgtactgagcttgtcagttgatgatacatatagttgaaaataaaatgttattataacttatgagtgtattgacttgaatcatcagaagataacaaaataattaattaattatatcataacgtagaaaaataaataaaattgagatgccagcagcaagcagtgttgtggttggcccgacgccgaatagttagtggttacaacttcattttataaataaggtaggaccgactcaaatcttagtggacctaaacctaaattcagtaattaaacaaaaactttgcccaattttcattaatccgcattactaatggaaagcatggcagacaacacaatccgttaaatcagctttttccctcaaccattaattaaaaaagctaaccctatattttaattttagtttactttgaatgaatctatttttgtgaaatactttggccaaattatgcaaaccaaatttgaaaccagtatgtgaaattgaatgatcaccgatccagagagctagaaatcagaatatacgaataatcgattaaagttgtttgtttttgtatgcgataaatgtgatttattgtacatggcctacatgtccaatgattttgttcgacgaatttatattgagcagtcgatcgtggtccgatgtcgacgtggagagattctgtagagtttttacattatttatttattgaaataaagtgataaatagtagtcaaatgatatttatactttactttcttacacataaaagtatatatattgaggtggtagccgaaatatccaaatccaagtccacactaatttatagaagctacatttgtcatgtaaattctaacattggaagaaaattaaatagtggtatagttggacatttttccctttttaggagtgaatgtaaatatacatggacattaaaactaacgtgcaaaacgtttttttggataaacttcaactcgtaatattttaaaacaaaatgatggagttattaagcaaaattacagaactaaactgtggaatgtaagaggttcttattttatgatcaaaacaacataataattgaacatcaatcatactgtttgtgaaaaaatctttagtttgttcatctcttgaagaataaatacattgcgagtaaaaacagagatgtggacgttttggaacgccatggttataaatatgaagaatttatgaattatgatgcttcagtgaatattcaaaccacttgatttgatcgatagaacttgaaaaatagaaaaataaaagtgggtgatttaaaggaagcataaccaatggagagaaaatgatagaactattcatcaaactgtcgaatttttgggttgatttgagagtgtgaattctaaaacaagaaaatgcgtgaaatattatgtctcccgaaaattctgaagtcttcaaaacattcaaaaaaaaaggtaaaacaaaaaaaaacaaaaacaaagcagttataagttctaacaatataaaaaagatgactagatttctattagatttcgacaaaaaaaaaaaaaaaaaaaaaagatttctattagattcataatttgtagtgttaagagattcgtctaaacagactaaatctaataacacatccactaacaaattcgcgtatgaccgtaggataatttgagccgaagcacatttgcttagtaaaaattgaatgaaccacaacctaatttatgtatttttaatgtcgttttcgtttgtagaaaaaataattttgacccccaaaaattatattctttatcaattgcaaatttcaactcaaaatgatacaaaacttccacacaaaaaaaatgttagttatttacttttccaccaaactattattgtgtttaaagtagaaacattatttagcttaaagttgaaactatttatactacccttgaaaagacaagaagaaatctactattccataaaaaccaataaaaaaattatctataaacaaatccgtgactgttgtggcggcagggatgctttccacgtgtacataaaccattggctacactatcccacttattaaaatctttatctcgccgttcctttcaccggccgattttaaaatccccctttaaatacggacctgataaatctctctttcactttcttcattttcgctctcaccatcgccggtaaaatctcgccggagaaaacaaaaaga

SEQ ID NO: 10656 - DNA, 3000 bp, Unknown
  misc_feature (1)..( 3000): cDNA_ID_2716328_gDNA_ID_2213667_Annot_ID_132705 3000 nt of promoter + ATG
ggggaccaataagatatgcatgtttcctccaatgatgttagttcatttggtaacatgaatcgctattggactttcataactcccttagattatcttaattgatatattttatatgttgtataattgttttagaaccaacattaatggatgcatatactagaatgtatttattctaattatattaatatatcacacctatatatctaattatatatctatctatctataaatattataataataatatatttgattaacatacgttgttttttaaagtattttatacgtatagcttgtgcataaactatgatatgtacctagacggctagacccgttcagcaccgcgtccattcgaatttggactagacaatcgacccaccctatacataataatttgttggttcaaaaaatctcttggattttggtgcttaatttgctcaaaatagtactttggctacactggctagtgcatgtggaaactgatagtagccgttgaaagtcaacctgacccctttgggaaaaggattacaaacttagacccaccaaacctaacctttttaccttagaatacgtgtctttctcaccataattagtttgtttatctctagtaagaattggaactacaaaagtagtttatgtaattaacaaaaacaatgctcgtttgtttaagcaaagcgggggatgggaaaaatgacgtggagaatgtcgattggacctgagttcacgtgattgggagtggtgcggtgggctcaactctccgatgataaagcgaaactgctttttgttgctttccttttgtctcctttttttttcttccagttctctcaccctattttgttcctcatccttatttatgaattttaagataaaaaaatatatatttaagtaattaaaatgtcgattttttttataagttcatttgaattttttaggtttataagtaaaaatcaattggtcatgaatagattgatttaaaacgaaaagaaaagaaactaaaacgtattaacccttgtttaaatacctagttatatacaagcaaatcttcaaacgatattattaaagggatgatgcattagataaaacaaattactagcactctagcagtatcatcaatagtttatggtaataacccaaaccgttcaaccattaaaaaacgatattggtatatagatgtgcacaaacttggtcaacaaaagttcatgtagtcaattataaatcggggattagtataaattttcatacggctttgtattctatcgtggcaccgtggtgtgtaatgtaaagatgattagataagaaatgtgttacacgcccacaacatatgattcaattatttgatggaaaatatagataaaatgtatagagaaaaagtactagaagatgcgaaatccagaaggtaaggggacaatggcatgagttccttcgtgggatttgctttcttaatttcactctttctttctgtctctttccctcttagatttttctgaaattctctagaattttatattagctttagtgctttacataatttacatattatttagttcttttgtcaattagaattacttgtggatcaaactttaatgagcaaatatttctggtcaataaaacgcttcgcagtaagaggtcacaaattaaacccattttttcatatttatattttttgacgtttgatgtgtacggtaagttgaaacttgaaagctatattacaaacttgatttcccatattccttttcatgcatctactattactaacctagctagcaaataaaatgacatgtagcatattggttggtttataatgcatttgttgttactctcgagatttaaactcatatatacatttgttgacaaaaaagtaactttaaatagattttttagattagcgcttctaagttataactatacactgatttctagtgtaatttatgcattctagttctatatacttaatagtaacttttatacagtatttgtgtaagtagttttcaagtgaatttttttctcaacatatacaatgtatattacatataatttacgtgcaccttttaaaaatgaaaaattcgacgaaaatcacacacaacaaaatgtgtggaagcctctatatcttcgtgtcagcatagtaaccattcaaggacgatacaatttttctagggattcaatataatttccctctcctcttatagatagtcgaaaaatggtagaaaaaggaatatttgagactgtttgatgaaacgaagtgccaatatatgaattgtgatcaaagccgtgacgttatctccaatacaaaaactaatattcttattgtactccattaattaattgagctataatacaaattaaatacgtacagaagaatgtttctttgggcctcgatcgtttgcatggggataggtgcgttaatatgagtgctacgttgtgagctgtataaaagaagagtgtgggaataggttttatctgaacagaacttaaccaaaacccaaacaaattgaaagaaaaaaaaaacttttttccttcttccttgatcctttatctttttcgaagaagtgaatctggacgaagaactaaggccgccaattttggaatttgaaccatcaaattcatcaacaacaaaaaataaagatcttaatctttgaatttctacttgtatttaagcttcttgattcaccttaaacccgagttatttcatttctttttccacctctttctttgtcttcttcttcttcttcttccgggtcactaagacatgaaggttcgtttaatcactcatacgctctggttcattgatttctgatcacataatgtgttacattacttattcataaatgtttttttttcttttcagtttttcgggtggatgcagaacaagctacatgggaaacaagagattactcatagaccaagcatatcctctgcttcttctcgtaagttcaagattacgtattcgttgaaaacaaaaaatttgattaccaaaactgttgtccacagtccacttgagac

SEQ ID NO: 10657 - DNA, 3000 bp, Unknown
  misc_feature (1)..( 3000): cDNA_ID_2716324_gDNA_ID_2213667_Annot_ID_132706 3000 nt of promoter + ATG
atacaatttttctagggattcaatataatttccctctcctcttatagatagtcgaaaaatggtagaaaaaggaatatttgagactgtttgatgaaacgaagtgccaatatatgaattgtgatcaaagccgtgacgttatctccaatacaaaaactaatattcttattgtactccattaattaattgagctataatacaaattaaatacgtacagaagaatgtttctttgggcctcgatcgtttgcatggggataggtgcgttaatatgagtgctacgttgtgagctgtataaaagaagagtgtgggaataggttttatctgaacagaacttaaccaaaacccaaacaaattgaaagaaaaaaaaaacttttttccttcttccttgatcctttatctttttcgaagaagtgaatctggacgaagaactaaggccgccaattttggaatttgaaccatcaaattcatcaacaacaaaaaataaagatcttaatctttgaatttctacttgtatttaagcttcttgattcaccttaaacccgagttatttcatttctttttccacctctttctttgtcttcttcttcttcttcttccgggtcactaagacatgaaggttcgtttaatcactcatacgctctggttcattgatttctgatcacataatgtgttacattacttattcataaatgtttttttttcttttcagtttttcgggtggatgcagaacaagctacatgggaaacaagagattactcatagaccaagcatatcctctgcttcttctcgtaagttcaagattacgtattcgttgaaaacaaaaaatttgattaccaaaactgttgtccacagtccacttgagacatgtgcaaaattgcaaatatcattcctaacattcttctttccattgattggctctctgatatttttgttttttcctatttaaaacaagatcatccgagagaggagtttaacgattggcctcacggattactcgcgattggtacattcggtaacaaaaagcagacaccacaaacacttgatcaagaagtgattcaagaagagacagtgtctaacttacacgtggaaggtcgtcaagcacaagatacagatcaagagctttcttcctccgatgatctagaagaagatttcactcccgaagaagttgggaaactacagaaggagctgacgaaactcttgacgagaaggagtaagaaaaggaagtctgatgtgaatcgagaattagcgaatcttcctttggatagattcttgaattgtccttcgagtcttgaggtcgatagaagaatcagtaacgcgctttgtgatgagaaggaggaagacattgagcgtacaatcagtgttatcctagggagatgcaaagctatttctacagagagcaagaacaagacgaagaagaataaaagagatttgagcaaaacctctgtttctcatcttctcaagaagatgtttgtctgtacagaaggtttttctcccgttcctcgccctatcttgagagacacgtttcaagaaacaagaatggagaaggtactactactaaataaagttcacaaccacgattttgatatcaattattttttctatgtctctaaccatttacactgtatatacagttgctgagaatgatgctacacaagaaagttaacactcaagcttcatcaaagcaaacatcgacaaaaaaatacttgcaagacaagcaacagctctcgttgaagaacgaggaagaagaaggacgaagcagtaacgatggggggaaatgggtcaaaacagattctgattgtgagtttctgatctttggatttcttaaaaagattaaactagaaaaattaatacatcaactgattccatttgcttcttctttaatttgcagtcattgttcttgagatctgaatatatggtccacttttcctttttcatgttctttcaagaaaatacaggtaaaataattgacctgatcagtgaatctttgttatattagctttgctcatagtactgaatcttatactaaatattctatgttttggcagatagagaatcttcacaatatcaagacaatttctttttctctctgatgaaaagtttttgggtctctctatctatctgcagagagcccatgagtccctttttttgcatggttgggtccataaaaccaaaacatgttttgggaactaaacatcagacatcgtacatgagatatgtatatgcatacatacatgtgtgtatatgtaaagatagatatatatgcgtacatgtatgtagttttgtattttcaggtggataacctttggtttctagaattcctgtctctgtctctttttttttttaaaactcttttttgtatctttcatttttacatggttttgtttcttcatgtatcacagaagagaactattcagattaataaatacttttatcgtagccttgtaaattattgttatcaatttatcattttgtaatctttgataggaatatcactaaaaccaaataatatccgtaaattaatttagaaactatgagtgtaactatttaatatatagaagtaaaataaacactaaatgagaatataacatttaaaaaaaaaacaaatttatataaattaaagctataactattaactataaacccattcttcaaatataactattaactatatttggtactacgtacttcataaaatgaaagtaaaatccagttttgatggaccatatttcacaaagcaattattggacacacgaacgaaggcccatcctaaaatcgaaatatataaaagttttgttacttactaaagtgtaaccctctaattaggctagaggcttcacttggaacacatgaacatctggagaatgatcaaggagcaatctttaacagccgtccgatcaaaccgacccatttgacacatctcagctctcactgacttcttcttcagtcatcagctctctttctcctctctttcttcagatctctctgcaacgaattgggtttaca

SEQ ID NO: 10658 - DNA, 3000 bp, Unknown
  misc_feature (1)..( 3000): cDNA_ID_2716274_gDNA_ID_2213667_Annot_ID_182150 3000 nt of promoter + ATG
cattttcttggtagacttcatcagctaaaagaaccaaaccctcttgcttgcagaaattaacaatgtcacgctggttttcttccgcaagaacctaaccagaataagaacgcaagattagaagaatgttacattttgttaggctagtcttgaaaatctgtttgtacctgcccagttgggttaccggggtttatgacaaccaaggcccttacagagatgcccttggacctagcttcctctagttgcttcttaaggtcagatatttccagtccccatcctgttgcttcatcaagatagtacggaacctaagaagtacaaatttcaaaaacttgtaccaaaaaacaacattactccatgatgattatatgaacataccaaagatccaccatgaagggcaattgaagccgagtacaatggatactgaggaatcggggaaagaataccatctttctctgagctcaagagaagttgcatcatcatgtgaacctatagagtaaaaaacaccaaaaacacttagcatgaatcctttaaaagaacttactctaactctatgagataacgttttcgttttgattgttaccgctggacttgcaccatcagtcaagaaaatatcatttggatcagcagggaaaccatcacgtgcttcgattccagctgcaattacatcacgtaaacccttgataccctgaggcagaacaaaaaatgaaacattcagcaacataagaaccatctcaagaaagggtttaggacttttaactagactctaataacaaacctggctatgactgtaagccccagttgctcttccgggaatatggtccaaaatcctccatgctcggtcaattgaatcggtactgatagcagagtagaaatcaaatgttaagcaatcttaaaccgtgagcatacatgtcctaaagctgaaatatagcaaggaaaacctcacctgaacaaaccatgggtttcagactcatccaaaagacttgcgtggtcacacaatgcgagaacctgaggcatatagatgatagacgttatatctctgtggctgatatgacaaccaaactagtaccaaaaacattcacttacctcacggaagaactttataggcagctgaccaagagattgaggattcccaatgttgcaatagattatctgccaaaagtaatgaagaattctaagttccttgcacaaagagtttgagaacaggtaacatcaacactaaactaatcataaatccgtcaaaactgccgataaagaaagagattttacctcatcaaagggataagcatccttattagtcttcaagtcttcttgtaacttctgtaagatggaagcaaaaagcaaacaaaaatcaattagcattaaaaacaattttacagattttgttcttggttttacaagacaaagcacatgcatctctgacctgagcaatgttgacaatttctcctcgaacagcatactcacatttcagaacctgttccccggaaaagaaaaaaaactcttagttaacaataaaaccaacttctctgtaatataaagtacaaagaagttatgcaaagcttgtcgatttcatcgttgggaatcacaacgagaagcaaaggataaacctttggcgttaaatcagacaaccacagtaaaaaattgaaacttttttactaaattagaaacaaatccagatcaaccctgaaacccacaattcaaaaacgcaataaaccagctagagaattagaaaccgaccttgggattgatggagtcaagagtaacgggaagagaagaagtggaatcagaagcagacatctccgaagtagaagagaagaaacgagacagagcaggaggagaagaagcaaggggacgaggttgaggagagagaaagcttggacttttgtggtgatgttgacgacgagaatggtcgacgagacctttagcttggttaatcaagaatctccgcatctgtgaatcagctttatactaggaacgtgctctttaagccctaggattgaaaattctctcacgaggaaacaagggtcccaatatccagtgccttgcacaccgaattttgccttgtcctccacgctcagaaattgctttttcgttttttcttttcgaaaatctaattgatgaagatatttgtaggggttttttttaggcggctaattttgttgatttatctgttaaacacacgactaatcccaaaaaaagacatgtcttttatcaaaaaaagatgtctgaagtctatcttccgttgacttaattatccaaaaggaccaaaattgaataatccaatcacagtcgtaatctaatttggggataaatagatacttataaaacctacagctaatttgaaagttataaatttttagaaatctctaaatttaaataaatcacaacaacatgtagcagcacattgctaacgatgaggttttttttgggctacataattgggccctaaaaaggtcggtaaaatcgtgatttaaagcccattatttgtttatatccacgtcaacaaaacgatatcgtattaggttggacgagaataaaaccctaggaattagaaaatttgtacaacgtcaaaacatcgaagattttgatccaacgtataccaagagtttcggagacgacgtcgttttgtctctgcgccgcgttcttagtctgagctcacgcttgttcgtttctcctctaacgtcaactgtgtttttgcatcctcaaaggtttgtgatacaccttattgtttctgttcttttgtacaagcttcacatggattagtgtaaagtcttagaattgggactcggaatttattgttatgttttaggttattcaacccagttatggtatcgttttgaagtagaggtagaaaccctaatttttggggtctgtaaatttggagaaaaaattgaacctttcccttttttgttatattgtgtaatttgggactaatagttcttcgaagctgagtttttttgtgtgtaaattttgtagggtttaacatagttggggctaggaattttc

SEQ ID NO: 10659 - DNA, 3000 bp, Unknown
  misc_feature (1)..( 3000): cDNA_ID_4268705_gDNA_ID_2213667_Annot_ID_182147 3000 nt of promoter + ATG
cagggttgatctggatttgtttctaatttagtaaaaaagtttcaattttttactgtggttgtctgatttaacgccaaaggtttatcctttgcttctcgttgtgattcccaacgatgaaatcgacaagctttgcataacttctttgtactttatattacagagaagttggttttattgttaactaagagttttttttcttttccggggaacaggttctgaaatgtgagtatgctgttcgaggagaaattgtcaacattgctcaggtcagagatgcatgtgctttgtcttgtaaaaccaagaacaaaatctgtaaaattgtttttaatgctaattgatttttgtttgctttttgcttccatcttacagaagttacaagaagacttgaagactaataaggatgcttatccctttgatgaggtaaaatctctttctttatcggcagttttgacggatttatgattagtttagtgttgatgttacctgttctcaaactctttgtgcaaggaacttagaattcttcattacttttggcagataatctattgcaacattgggaatcctcaatctcttggtcagctgcctataaagttcttccgtgaggtaagtgaatgtttttggtactagtttggttgtcatatcagccacagagatataacgtctatcatctatatgcctcaggttctcgcattgtgtgaccacgcaagtcttttggatgagtctgaaacccatggtttgttcaggtgaggttttccttgctatatttcagctttaggacatgtatgctcacggtttaagattgcttaacatttgatttctactctgctatcagtaccgattcaattgaccgagcatggaggattttggaccatattcccggaagagcaactggggcttacagtcatagccaggtttgttattagagtctagttaaaagtcctaaaccctttcttgagatggttcttatgttgctgaatgtttcattttttgttctgcctcagggtatcaagggtttacgtgatgtaattgcagctggaatcgaagcacgtgatggtttccctgctgatccaaatgatattttcttgactgatggtgcaagtccagcggtaacaatcaaaacgaaaacgttatctcatagagttagagtaagttcttttaaaggattcatgctaagtgtttttggtgttttttactctataggttcacatgatgatgcaacttctcttgagctcagagaaagatggtattctttccccgattcctcagtatccattgtactcggcttcaattgcccttcatggtggatctttggtatgttcatataatcatcatggagtaatgttgttttttggtacaagtttttgaaatttgtacttcttaggttccgtactatcttgatgaagcaacaggatggggactggaaatatctgaccttaagaagcaactagaggaagctaggtccaagggcatctctgtaagggccttggttgtcataaaccccggtaacccaactgggcaggtacaaacagattttcaagactagcctaacaaaatgtaacattcttctaatcttgcgttcttattctggttaggttcttgcggaagaaaaccagcgtgacattgttaatttctgcaagcaagagggtttggttcttttagctgatgaagtctaccaagaaaatgtttacgtccctgacaaaaagttccattctttcaagaaagtggctcggtctttgggctatggagaaaaagatatctcgttagtctcgttccaatcagtctccaaaggtaaaagaacaacttttactgtccaatgcttgtcatctaaaaaatggggtttttgtttttaatattcttctgttgataggatattatggagaatgtggaaaaagaggaggttacatggaggttactggattcacttctgatgtaagagaacagatatacaaaatggcttctgtgaatctttgttctaacatctctggtcaaattcttgctagccttgtcatgagcccacccaaggtaacaccctagttctctctaatcggttttcgctaagttcttgcaacagattatgactaaaaagtctaatattgtatttgatcagcctggtgatgactcatatgactcatacatggcagaaagagatggaattctctcatccatggctaaacgtgcaaaggttagtcgaagattacaataccctctaacgacatttttcagtctctttgtatataatgtcacaagcttgaaaatgaacttgcagactttggaagacgctctcaacagtttagaaggtgttacatgtaacagagccgaaggagcaatgtatctcttcccgcgaattaaccttcctcaaaaggctatcgaagctgctgaggctgaaaaaactgcaccagatgcgttctactgcaaacgccttctcaatgctactggtgtagttgtagtccctggttctggctttggacaggtaaaatataaccaaatcttcataactttaaatgtcttacaaaaggatcgaacttgaataatgggttttggattcattgtggtttaggttcctggaacatggcactttagatgcacaatacttccacaagaagacaagattccagcgatagtgaatcgtctgacagagttccacaagagcttcatggacgagttccgcaactaaaaggacctgaccatgaagatgaacttaaagacccttttgaagaaaagtgtgatcagtttgagttattaaaaaaaagaaaacttgtgttttgaatttgatcaggcaattgtgatcagctaatttaattttagaatattttgtacttccattccatggcatgtcatatgaagatatgaaaattagtaaatttattgggcttataaatgggccttatattattaatgggccttatatttatttttcatatgatatttctggagaaagcgacagtatattatcttcaatttttccattttgaagaattttctcaagaaaaaaaaaaatcaatg

SEQ ID NO: 10660 - DNA, 3000 bp, Unknown
  misc_feature (1)..( 3000): cDNA_ID_1461791_gDNA_ID_2213667_Annot_ID_182144 3000 nt of promoter + ATG
attcataaccccttccatttggtgtggtgaaaacctctgaatacttgtatttggatactgaatacttctgcctagcatgtcttggtgttgtagaagcgtatttttccaatttgtatcggatccatgaaggccatccatacgttgccctaactgttgctgcggaaccccatcaggacccatatgtgaaacccttgttcgcttattcaagccaggcatagaagacatttgtccttcttgactttctctctttctatgaaaagatgtaccagggttcatactatcagagccataaggcagcatcgcatctagtccaccaggcgaagcgccagagacactgacagaatttgatccttgatcctgcgtgtttcttgtacttccaattcccatgtacctttgttgctgaggtggtaccaaggccagagaggaatttggtgcatcttgcaacggctgacttcttaatcccgccagcatattagtaccaaggttttgaatagcctggttgttattggtttgctgcattatcaaatgccctggcaaatttcctcgctctgaactttcaggaagccgatcaatgcacacctttttcccctgaatcttattctgagacatgactgtcacttctgccatttgccttaatctctttctccgcaaagtagaaagcgacaaatcgagctatcgagtagagaaaaaaaaacattttagacactataataaacaactgagaacagaaagcacaaggagtctttttaatgagatattaccttagcagtcaaaggatttttactcagcctatcaagtctgggtaaaggatccagacagagttcaggttgtaaggcttttaatatcctggactccacttcctgcagttgatgtaaggatcagtacagaagataatagtttcagtgctcagatatacgacctataagccacgagctaccatgattaccatgagatcaccgtacgtccatgagttgtctgacattgatggaatatcttttaccacattctcgagtgacatcttaaggcgcaatttatttatcacaggagagacttgagatgaggtatgtttccgatagtcatgcacctacaatagtatgtgccaaaaattaaagaaaacatgatgatgtaagatggtacacagcagtcaattaaaaattagtataactaggttttttatgtttacttctggtcccagttactccattatgtttcagaaacaatcaaatacatgtacaattgagtttggaagataaacttccatgtacttataattacgacatttttttaatcttgattaagtgtagataatttctgttgagctctttttaaatatatttatatacgtttggactgtttccaagaacttatggaaggctttatcccaaaaaataattgcagataactcacctcacatataaccaccccatccacaaatttgcaaggtatatcttccaaaatgtccccaggaagcctgccagcctcaatagcctataaagcgtacaaagggattaaaaacatttactcagtagaatgaaactcagaaagtgtatttaacaaaacgcgagtaagtagtgcagtgaaatgcattattcgggtagaacaagtggggaaaaaaaacatcatcttcacatttactaaatctaagtactttgaattcattcaccaaaactttgattacatgttcaaatcaagtctataataacatagttcgaaagatttaccgaaaggagaccctctgctgccctatcatacggatgtaagacctttggaacatctcgaaacgatatctgttgcatagcctggtattcaaaaactcaaatttgtgaaaacgtgaaggttttaaaactcaaatacaagaaatcacaagataaataaattcatatagactctcagtacatacctcagaggtttttcctatagagtacccatttggatagaggctcaatatgaaggaaacttcatgatctgcagagaaaccaaaatgcactcaattcaacatagctagaatttagcaaaacattatgtgtcaaagtggttcgttgagatccaaacctggagatatatcgggtaaagatggcttcgaaaacccggaaacatcgccaatattgctatcatcagtggcctgaaccaaacgtaataaattttctatataactttccaaaataagcgaatttagttggaacacaatacaactaaaattctaagttaaattacctttggtttcccagatagaacgattgcttttggggaatcaggagtagccaattcagtagaaatcttaggtcgaaactttctaccaaccttcgatatcttaaacgagacacccatggattctctccagagagatgaagctcaaacctgtctaggtactgtcaataaacgatacagaaataaaaaagacacgagaattgaagaaatcgaagaatgaattttaagaaagctagagaaattgaaaccttatgagcttgttacagagaagatcatcaaacaattggatcggatagaaagcgagagaaatcaaaggtgactaagaatagagcaatgaagaattcataaacatggaatttgtgaaacacaggtgggaaatttttgaagaagatgcgatcggaagagaaaggaagagagattattgttagggttcttcttctaacttcaaagtagcagaaaaagaaattatcttttgtgtctctgtgcacacttggatttcggtttaagacaaaacggaagttgaaccagttattaattttggttagcttcgattaaaatttgggtaaccgagtttgggggtagaatagacattttgcaaattagggttttgcttgatatataaaatccttcacccttataagcctttcgtcgcctcttcgtgtgatttactgagtgaaaaaagcttatcgcggcgattagttcccggcgaagaagaagaagagagataagaaaatggcgactaatggatctgctagctcagcgcagctctctcagaaggaagctgatgtcagg

SEQ ID NO: 10661 - DNA, 3000 bp, Unknown
  misc_feature (1)..( 3000): cDNA_ID_3037589_gDNA_ID_2213667_Annot_ID_182143 3000 nt of promoter + ATG
ttgatgtggcggtggtaagctcagcgcctagtagtagctgtcttgatttcttgtgggaggagaataatccggacacgcttctgattgatacacaatggctcgaagatatcatcatgggcgatgcgaataagaaacatgaacctaatgatagtgaagaagccaacaacgttgatgcttctctgctttctgaagagcttcttgcttttgagaaccagaccgaatatttctcgcagatgccttttacggagggaaactgtgattcctcaacgtctctgagtagtctctttgatggaggcaatgacatgggtctatggtcctgaacggttctattgtacaaatgacatgagtgttttaaatgagttcttcttcgacttgtctgtttgctatttattcttcaaaccttagccagtgtcaaacaaaaacggccactacgactattgttttgaagattgcgatattttaagttgtaagaatgtagagaataatgtttgggaagaacaaagctcgattcatatttgtgataaacgcaaaatatagattcgattcaaacaaaaaggtgcaaaacatctaagggtcttaagagaaacaagtgagaagaaaaaacagttacggttcgataactcttcaatcccaaaagtaacaaaaaagcatgtctataaccattaaaccattgagtaaaggctatcaactttactcccaaccagcagctggtgcccctgagggtggcgcggcagcttcccatccaccatctgccggtgcagctagaacagcaaaataaacataacattagaatcaagatctgttagaatagggttcaaatggttatcaaaaactcaccagcggaatcactccaagaagcagcagcaggtgcagcagagattggtgcctgaccttctcctggccatgcagcatcagggatctgagcggtggtccattggtctccacctaccattccatattctggagcaggaagtgcaccatattctgcctgagggccagcttcatcttcatcctctggcttagtctcctcaggttccctgtaaaagaacaggtcaacctgcacaacaccataccatatgaaaaattcagtcaataaacagggaaagtttttaatgaacagatgcctttctaatctaagagctccaagaatgatattcttaccatgacatcccacttctgtccagcagcaatggttccacgcatctgaaggaccatgcgagccagaagccagaaaaggcacccaatgctgtgctttcccttgttgttggctgggataccaatgtcaacaaatctcattggagagtctgtgtcacagaaagcaatgattggaatgtttcccaaagcaccttccttgataggctgcaacacacacaagacatttatcaataacaaaaatcattaatcaatcactagtatatgaatcatatgaagagtttacctggtggtcagttcttgggtcagtaagaatcaacagccttggttcactgaaggatgtctgcatctgattggtgaaggtaccaggagtgtgtcttccagcaatggcattggctccagtgtactgagcaaacttcaacacagctctctgtccatagggcctagctgactggacgatgatgtcctgtgggttctcaatggcaacaataactctagcagccatctggagcttttcccatgttttgccaaggttgaagatgtaaatacctgagaatgacgaaaacttcaaaaactaagttccatactcaccacttacaattgtaaattacaataaaagagcaacaataacacacactagcacaaatacaatctcaaacatcagtcaaaactaaaatctcaatttttttttttttacaaacacacagagagagatagaaatgaaacttgagcctttgatcatttgttcatacatttctgtaaacaagaacactagagaagacacagaaacaaaagccttttcttagatacgaacgcagagaagtgagcgtgctgacaaaaacggctagttgcaacattttatcttttctcagtcagcgacatatttagatccgtcgtgagtaaaatctactctcgatacaataaaacaacctataaatccaaaaaccatctaaaacaaagcagcataaaccaaataaacagatcatcaacatttatacaaatccgaaatatcaacacagaatctcaacactataaccatcaacatacatacatacagatagtttatcaaaaaatatacgagaaattaccatcgttgcgtctcttgaagacgtaacgctccatctggtaattgcaattcttggttccaagatgaacctcagcggcacacatcatcctgacatcagcttccttctgagagagctgcgctgagctagcagatccattagtcgccattttcttatctctcttcttcttcttcgccgggaactaatcgccgcgataagcttttttcactcagtaaatcacacgaagaggcgacgaaaggcttataagggtgaaggattttatatatcaagcaaaaccctaatttgcaaaatgtctattctacccccaaactcggttacccaaattttaatcgaagctaaccaaaattaataactggttcaacttccgttttgtcttaaaccgaaatccaagtgtgcacagagacacaaaagataatttctttttctgctactttgaagttagaagaagaaccctaacaataatctctcttcctttctcttccgatcgcatcttcttcaaaaatttcccacctgtgtttcacaaattccatgtttatgaattcttcattgctctattcttagtcacctttgatttctctcgctttctatccgatccaattgtttgatgatcttctctgtaacaagctcataaggtttcaatttctctagctttcttaaaattcattcttcgatttcttcaattctcgtgtcttttttatttctgtatcgtttattgacagtacctagacaggtttgagcttcatctctctggagagaatccatg

SEQ ID NO: 10662 - DNA, 3000 bp, Unknown
  misc_feature (1)..( 3000): cDNA_ID_2716316_gDNA_ID_2213667_Annot_ID_132708 3000 nt of promoter + ATG
aagaagaagaaattctttttatggtcaaacatattataggctattaatttcctatatcctcaaatgttttgtcacgaatagaaatagggaaataaattatatgcggaaaaaatgatttattcctatggttgattacaaaaatcaaactacaatgttcgttacaagttccggcacgttttcattgcacaagccgtgaagaaactgttgtaagttgacggcgacattacataaaggcgttaacccatttaattcattcgggtcccaagagtttctgttaaatactaatttacccttctgaggtaattcgtttagtggtggttaggatattcgttattaaagggcgtaaatgagggcatttgcaaacgctatagtctaacggagttctgacggagttaagtctcgcgtcggctgcgatggctaatacgaatttaatatgtgggatccattagcaacagtacgacttgtgagtggatatttatcgatgaatggtgtcaattacttatccccgacaaagtttaaggacacgtgaagtattgttatgtgcgtttaggatgtcaacacgtgtcggaatcttggcggtaccaaccttatttcatgcatgatttgcgttttttttccctctttgctaaaggatattatagcgttcatacttcataggcctaattttcttttctgtttttaattacaaaaactgagtgtaattaatattagaatttgtggttttgtatgttggtaaaaggttaacgatttctgtttagtcctaatatgaattttgttacttgctcagttaaatattatttctataacaataataataataaaatcttttaatcgttttgttcaatgaagtcgagcgttgaattttatttgaataagaggcaatgccaaagagtaccaaaaaagaatttaaaacaaaatgtcgtagacgatcgcgccaagggaaaaaatcatttttattgaattatttatcgcaacttgcaaaatgagaacataatactttgaactttgaagactcttcaatatcatatgatttcaagagttgaacaacaacttgagtctaatatatacacatgtatgtgtgtatttaattacacaatatagatccattgtcattttctaatacatacaaaagaccaaataatattcgctatttcacatgaagattatctacattgttggaagcgcaagttgggtttcgatcacatatttgatcatgtccaaaataagggaatgtcatattctaacagatttgatatgcaaaaatcaagattgtgagaagattctactaagactaccaaaccaacgttaacggcaaaaaagaaaaggcaacggcgaaaccttccggtcaccactcgaagttggactctcctttaagcaatagagtatatcaacatttatcaaataaatagttgttgttttgagacctaagttcatatatggacataatcaagatggtgtcaacagttttgggttaggtgtgcttcagacttaatctttgagctgggtaagatttcctttctatctagtgttacgagctagcgtgtctctgtaacaggttgtcttcgggtaagtttggtcttgcagcttgagcttgtggtgggaattctctgtacagtcgttatcttcataaataaaatggtacttatcagaaaataaaataaaattagaagacaatattgaaagattatacaactcatttgcattgacgtatgacaatactaaacataaaatttgtttaaaatttaggggtaacgactacgaatgtaggtccgttttacaacaatgactaaaacaaattggttctttgacaccgacagatactttggatgtgaacaccaaaatgttgcagcttcttcacatgctcctcttgtactatgacaataacatatgtgcctaaagattatcgcatattaataagtatccattacatgcggaacaggaataacattttttcaacaattgcataattgaaaccggatagaaatacaacaaggacactaagtcaaatcattagaatacatgtcatggtctacagaaaattaatagattagacaaatattttgtttagttgcatataatatcatgagtaattgagtattagagtattttactcatgatacataagaaacttataactattctttcgatattctcatatttggaaatagttaggaactgtaaaagctaaaactgattgatgattacatttggtggcgtcaatttgttttacatttatcaaatttctttcttttttcggcatagggatacattttttgtcatgctatagtgagtaaattagaaatccgacataactaagcatcaggaggaaaatccaaatgatgaagtggtccacttaaaaggtcacgttagctagaactgaaccaaatgttgtacgagttttaagattatatgctcttggtcctaatgccaaaaccatttgtttttcccataaaatttatttacatgcgttatcttgtagtatggcaaaatttggagtatcacttaatagttttcacacgtaacacgtaaaaaatatagttttgatagttggttttacaacacttttacttgatagttgttcttacaacacttatacttgtaattaagtcacttctacggtttaaaaattatttatagaaacgataatcaactttgtccaagtttgggcttggaaactaaaatcaacattattcatatgggccaaccaaaaatgcatatctttagcttattttttattcgctcttgcttttctcaatcttcttgactctttcaacgaacattcgcgccataagctcctaagttcctctcatccaatggatcacaaatgacaaagaaaaacaaaagacagagaaaacagagacaaagcgagaaacaagacaaggaatacagaaaaattagtaaatcgaatcaccaaaaaaaaaaaaaaaactactttgattaatcaaaaaaaaaaaagagttgcttgaaactcccggcggcctagctccggttaagtaaatg

SEQ ID NO: 10663 - DNA, 3000 bp, Unknown
  misc_feature (1)..( 3000): cDNA_ID_4268709_gDNA_ID_2213667_Annot_ID_132709 3000 nt of promoter + ATG
ttaaaccgtagaagtgacttaattacaagtataagtgttgtaagaacaactatcaagtaaaagtgttgtaaaaccaactatcaaaactatattttttacgtgttacgtgtgaaaactattaagtgatactccaaattttgccatactacaagataacgcatgtaaataaattttatgggaaaaacaaatggttttggcattaggaccaagagcatataatcttaaaactcgtacaacatttggttcagttctagctaacgtgaccttttaagtggaccacttcatcatttggattttcctcctgatgcttagttatgtcggatttctaatttactcactatagcatgacaaaaaatgtatccctatgccgaaaaaagaaagaaatttgataaatgtaaaacaaattgacgccaccaaatgtaatcatcaatcagttttagcttttacagttcctaactatttccaaatatgagaatatcgaaagaatagttataagtttcttatgtatcatgagtaaaatactctaatactcaattactcatgatattatatgcaactaaacaaaatatttgtctaatctattaattttctgtagaccatgacatgtattctaatgatttgacttagtgtccttgttgtatttctatccggtttcaattatgcaattgttgaaaaaatgttattcctgttccgcatgtaatggatacttattaatatgcgataatctttaggcacatatgttattgtcatagtacaagaggagcatgtgaagaagctgcaacattttggtgttcacatccaaagtatctgtcggtgtcaaagaaccaatttgttttagtcattgttgtaaaacggacctacattcgtagtcgttacccctaaattttaaacaaattttatgtttagtattgtcatacgtcaatgcaaatgagttgtataatctttcaatattgtcttctaattttattttattttctgataagtaccattttatttatgaagataacgactgtacagagaattcccaccacaagctcaagctgcaagaccaaacttacccgaagacaacctgttacagagacacgctagctcgtaacactagatagaaaggaaatcttacccagctcaaagattaagtctgaagcacacctaacccaaaactgttgacaccatcttgattatgtccatatatgaacttaggtctcaaaacaacaactatttatttgataaatgttgatatactctattgcttaaaggagagtccaacttcgagtggtgaccggaaggtttcgccgttgccttttcttttttgccgttaacgttggtttggtagtcttagtagaatcttctcacaatcttgatttttgcatatcaaatctgttagaatatgacattcccttattttggacatgatcaaatatgtgatcgaaacccaacttgcgcttccaacaatgtagataatcttcatgtgaaatagcgaatattatttggtcttttgtatgtattagaaaatgacaatggatctatattgtgtaattaaatacacacatacatgtgtatatattagactcaagttgttgttcaactcttgaaatcatatgatattgaagagtcttcaaagttcaaagtattatgttctcattttgcaagttgcgataaataattcaataaaaatgattttttcccttggcgcgatcgtctacgacattttgttttaaattcttttttggtactctttggcattgcctcttattcaaataaaattcaacgctcgacttcattgaacaaaacgattaaaagattttattattattattgttatagaaataatatttaactgagcaagtaacaaaattcatattaggactaaacagaaatcgttaaccttttaccaacatacaaaaccacaaattctaatattaattacactcagtttttgtaattaaaaacagaaaagaaaattaggcctatgaagtatgaacgctataatatcctttagcaaagagggaaaaaaaacgcaaatcatgcatgaaataaggttggtaccgccaagattccgacacgtgttgacatcctaaacgcacataacaatacttcacgtgtccttaaactttgtcggggataagtaattgacaccattcatcgataaatatccactcacaagtcgtactgttgctaatggatcccacatattaaattcgtattagccatcgcagccgacgcgagacttaactccgtcagaactccgttagactatagcgtttgcaaatgccctcatttacgccctttaataacgaatatcctaaccaccactaaacgaattacctcagaagggtaaattagtatttaacagaaactcttgggacccgaatgaattaaatgggttaacgcctttatgtaatgtcgccgtcaacttacaacagtttcttcacggcttgtgcaatgaaaacgtgccggaacttgtaacgaacattgtagtttgatttttgtaatcaaccataggaataaatcattttttccgcatataatttatttccctatttctattcgtgacaaaacatttgaggatataggaaattaatagcctataatatgtttgaccataaaaagaatttcttcttcttgaaccatcataagaaaaatgtgtgtttagtctattgatcagttttgtgttcaaaaaaaaaaaaaaaatgtctatcgatcagttaggtgtaaaaaaaaaagttacaaaactcgtgacaaaaacattctatattggacacacatcactgtcacttcagactaaataaaaaaaaagaacacgttatttcgttttctttatttattcgggagaggttaaaagccacagaaacttattggctagaattggttatttataacaacaacacatgagcaaaaagctcaaaacatctacatactctttggaatcctcgattttttgtacgtgtaaagaagtcacacaagaaaatcttgggttgttgtaatcttcatcacactagt

SEQ ID NO: 10664 - DNA, 3000 bp, Unknown
  misc_feature (1)..( 3000): cDNA_ID_2716308_gDNA_ID_2213667_Annot_ID_132710 3000 nt of promoter + ATG
tttctattcgtgacaaaacatttgaggatataggaaattaatagcctataatatgtttgaccataaaaagaatttcttcttcttgaaccatcataagaaaaatgtgtgtttagtctattgatcagttttgtgttcaaaaaaaaaaaaaaaatgtctatcgatcagttaggtgtaaaaaaaaaagttacaaaactcgtgacaaaaacattctatattggacacacatcactgtcacttcagactaaataaaaaaaaagaacacgttatttcgttttctttatttattcgggagaggttaaaagccacagaaacttattggctagaattggttatttataacaacaacacatgagcaaaaagctcaaaacatctacatactctttggaatcctcgattttttgtacgtgtaaagaagtcacacaagaaaatcttgggttgttgtaatcttcatcacactagtatgtcaacgggacaagcgccggagaagtccaatttttctcagagatgtagtctgctcagccggtacttgaaggagaagggaagttttgggaatattaatatggggttggctcgaaaatccgatcttgaactcgccggaaaattcgatctcaaaggtatttatttatttttccctatctattccgacggccgccgcctataaagaccaaagtttatatcatatacttttagtatcctgcttcgttgattattagcataaagtttaactatatattttttttgttgaaatgcaaaattttaaatcatttttttcttttcttttctttaaacttaagcatggtattattttggacagcttaagtatattaaagttagagattctgtgaagttttttaaaaaacgtaataaacatgtaatttgattttgataaattttaatcggtttgcaatttctgttctaatttgttttaggacaacaaaatgtgattaagaaggtagagacctcagaaactagaccgttcaagttgattcagaagttttctattggtgaggcctctacttctaccgaagacaaagccatatatattgatctcaggtactgtacacacaaacttcatatgtattcgaactcctaaagtgtttgttttcacattttgtagcaattgaattagagaaagaactaccggttatagatgtatggactatggagtttgactaattgtaaaaatgggtttgatttgattttagtgaaccggcaaaagtagcaccggagtctggaaattcacagttgaccatattctttggaggaaaagttatggttttcaacgagtttcctgaagacaaagctaaggagataatggaagtagctaaagaagcgaatcatgttgctgttgattctaagaacagtcagagtcacatgaatcttgacaaaagcaacgtggtgattcccgatcttaacgagccaacgagttccgggaacaatgaagatcaagaaactgggcagcaacatcaggttgtggaacgcattgcaagaagagcttctcttcatcgattctttgctaaacgaaaagacaggtaaactaaactccgaaactgttttgtgcttggttatgctttttctaggccgctcgtcaaaatgtatgcatagattaggatcaaagtttcttaaaaaagttatatgtaaaaatagctaataattaccatattaagacttattcgagttattctaggaatcccacatcggattagaagcgtattaccaatcaagtttaagttgaacattcatgaaattgaacatagggtggtcctagtatgtttatgaattatgattcctagagtaagatttcgagatgtgactcaagtgtcatcatttataaagaacatgtaaaaaatcttacaagttacaatgaaattcgagatgggacctagagtagtatataagagatatgagtccatcatctatgtgtccttgatctaggaaaattattagtaaaatgtcgagaaatttctagttaaaaaacactaactaagagttctttgtaaatcaaaacttcaatatctactttgtcttaaatgttgattaattgttttgatttcagggctgtggctagagctccatatcaagtgaaccaacacggtagtcatcttcctcccaagccagagatggttgctccatcgataaagtcaggccaatcgtcgcaacacattgcaactcctccaaaaccaaaggcccataaccatatgccgatggaggtggacaagaaagaaggacaatcttccaaaaaccttgaactcaagctttagggcgtataaaatgcacgatcgagttcacgtttctagttttcacttatttaggatttgaacccaaatacccttttatattttcttccattacttttgaccaatttaagttatttatagtactgtattacgtagctagtatttatatttcaaaacatacatattttgatacttgttttttagattctttaattaaaattgtcatctggattaccctttatcgaaattttttaatcacctgatataatctcaccagtgatggatttgcgttgttagtaatttttctaagtggcaaaagtatattaacctataataggtttcaaagatatacatataatgtttctatcaaagatattagtataatattttaccacatgatcgaaatctcaccagttatggatttgcattgaatgttctagcgattgggctggaccgtctcaggaacccaaccttaatgaaaaaacatcgtctcattgattttaggtcgttaagtctgttttgcccttgtcttatcccgtaattacgaaattagccttctaccatttcctctgtctgcttctctcttgccgttttctaaaaccctaaaaatttctgttgaaccccaaacattgaagtttatctttctttttcattgttcgatctcaaagcacagagattgcttaaacctaactgtctcagttcttttaaaaacagtcatctctcacaaaactctcttaaccctcttcatatgctttgagaaaaa

SEQ ID NO: 10665 - DNA, 3000 bp, Unknown
  misc_feature (1)..( 3000): cDNA_ID_2716298_gDNA_ID_2213667_Annot_ID_132714 3000 nt of promoter + ATG
gttttttcttaaactattaaagcattaattatgctgggaattagtgatacacatatatacagaaaaaaaaaatccgtggaagaaaaaataaataaattacgttcttcgttatgaacattttttgtgtgcgaccgaaaagaaaaaacatttttgtagattaagaaaaatataggctaaattgagggcgggaggtctaatatgtccaatctaaagtgggccgttaaggcccattagtgtttctcatgttttatcttcttaaattctttattgctcaatggctgctgattaccggttcgaatcgtacggaatctagttttagttaagaagatgtgctgatctaattactctatgatcaaaatcataaaattggagccaacaaaaatatcataccaaacacatgacgtggccatgtggaattgttggcaaccccaaaacatccaaacattggtttgttgcaaaactaatcagataattaatgagattaggtacagtatttcatatacatttaaggacatttaatgaaaattaatgctacattagaatgttagggttgtttgattggtgaaaattacaattgccagcaattatgttactgtaaaattgccattcacattttcacccaattgatcaataaaacttttcatcgtcattcttttttttttccatttgaaaatctgttttttttttctgtgttggatgtaattttttttctttgaaatatttttattacaaatatttaaccgtaataaaataaaatacagtctactatttttagaacgtttattgcaaagttctaaaattgctaataaagtcttccaagtgaaaaatattttaccgttgaaattatgtttatttattactactagctagagagcctaggcttcgaccaatttttagttacgatattaccctcatcgttataggctttattaggaaagtaaaccggtgttgttaaaaggttttgagggtattatggtaaaacgtagtactgcggctgtatcttttttttctttcctaatcgaagacgacattcgtcggaaaagaagttgtctgaataaggaaactctctctctctctaaacagtctccgcatattttctctctctaaagactctgtcttttttactacggagagagagagagagagagagagtgtgcgtgtgctggtttcgagcgtggatattaagggacagagcaaaatcttctttggtgggagaaataaagaaagattttgcattttgagcaaaaccagtagtgaagtgacaacattaactcctgacattgttagggtttcatcttcttttctctctttctcaacctctcttgccgattgagaacttggattaagtttggaaatactgagaattggaaagttcccagctcaatgctggatcggcaacaggaggatcttggtatgttctttatggattttgcatgattttgagttctgagctttggttttttttttccggattatattaaagttgggatttttatggttgggtctttacttagagtagtggaatcagatctgagaagcatcgtgttccgatgaattagatcctcgatttctatgtctggccatttatatggttcatgacctgtttttgtcttccttttcatttcccgagattctttgtttctcatcaaagttatattccgtgattgtcctacttatttcgtgagaatgactctggtttcattcatcttttgctttcaacattgttagcaagttggcttttttttttgtaatctctgagtaacagtttctattattgttttctcaggtttcttggcattaatttgagtttgttcagttgaattctgttaatctcagtgatacttctgctggttggttagcattagcaatctggtcttgtgagaatgaggtcagatacggttcttgactacgtggtattcgaattatcgccaaagcattcaaagtgagtatatgttccacttcaagatttcatgatttctagtttgttctgtataaacaagtgtgtgtttttcctttgatagatgcgaattgtttgtatcaagcaatgaacagacagagaagctagcttcagggttgattcaaccctttgtgaatcatttaaaagttcttgaagcaaaagcgtcgcctgttgctcaatcctctattagattggaggtggagaaaagcaacacttggttcactaaaagaacattagagaggtttataacaaagaattcaatatcattttggtttcttttcacatagccttttttcgatatagtaatagtttcttccaccatttgtcctttcagatttgttcaatttgttaatagtccagaaactctcgaaaaggtcaatacatattattccgagatgttgcagttggaagcagctcgaacattatattcgcaggttgtaaccactattttgaaacttgacttctaattgtgattcttgaccgatcgatctttcctaaagttttgttgtcatttttttggttcttaaagcggagtgaagactcaaagtttggtgcatcaggtgtgtttgattttactgttgttactttgctcgtacattgatctttaacatcaatttgaatcctatttccttccgtttcagatgatggagctgcagcagatgccacaaagtaaagcttctctgcgtttatgtttgttctgtgtttaaagagttttatattgattactttttcttctctatattcaggaaggagctcttaaaggctatagacttaagacttgaagctattaaaaaggacttgacaacgtccatttctcatgcatcagctagcggtttcgaccctcatactgtttccgaactcaaacaatttgctgatagatttagtgcacatcatttggagtaagccttttattgttttgctacttttcatttgatgaaacctatctttcatgctttgttgtttgattgaattggaatggttccatcagtgaagcatgcagtaaatatatctcactatggaagcaaaggccagacttgatcgac

SEQ ID NO: 10666 - DNA, 3000 bp, Unknown
  misc_feature (1)..( 3000): cDNA_ID_2716294_gDNA_ID_2213667_Annot_ID_132715 3000 nt of promoter + ATG
ctgagaatgacgaaaacttcaaaaactaagttccatactcaccacttacaattgtaaattacaataaaagagcaacaataacacacactagcacaaatacaatctcaaacatcagtcaaaactaaaatctcaatttttttttttttacaaacacacagagagagatagaaatgaaacttgagcctttgatcatttgttcatacatttctgtaaacaagaacactagagaagacacagaaacaaaagccttttcttagatacgaacgcagagaagtgagcgtgctgacaaaaacggctagttgcaacattttatcttttctcagtcagcgacatatttagatccgtcgtgagtaaaatctactctcgatacaataaaacaacctataaatccaaaaaccatctaaaacaaagcagcataaaccaaataaacagatcatcaacatttatacaaatccgaaatatcaacacagaatctcaacactataaccatcaacatacatacatacagatagtttatcaaaaaatatacgagaaattaccatcgttgcgtctcttgaagacgtaacgctccatctggtaattgcaattcttggttccaagatgaacctcagcggcacacatcatcctgacatcagcttccttctgagagagctgcgctgagctagcagatccattagtcgccattttcttatctctcttcttcttcttcgccgggaactaatcgccgcgataagcttttttcactcagtaaatcacacgaagaggcgacgaaaggcttataagggtgaaggattttatatatcaagcaaaaccctaatttgcaaaatgtctattctacccccaaactcggttacccaaattttaatcgaagctaaccaaaattaataactggttcaacttccgttttgtcttaaaccgaaatccaagtgtgcacagagacacaaaagataatttctttttctgctactttgaagttagaagaagaaccctaacaataatctctcttcctttctcttccgatcgcatcttcttcaaaaatttcccacctgtgtttcacaaattccatgtttatgaattcttcattgctctattcttagtcacctttgatttctctcgctttctatccgatccaattgtttgatgatcttctctgtaacaagctcataaggtttcaatttctctagctttcttaaaattcattcttcgatttcttcaattctcgtgtcttttttatttctgtatcgtttattgacagtacctagacaggtttgagcttcatctctctggagagaatccatgggtgtctcgtttaagatatcgaaggttggtagaaagtttcgacctaagatttctactgaattggctactcctgattccccaaaagcaatcgttctatctgggaaaccaaaggtaatttaacttagaattttagttgtattgtgttccaactaaattcgcttattttggaaagttatatagaaaatttattacgtttggttcaggccactgatgatagcaatattggcgatgtttccgggttttcgaagccatctttacccgatatatctccaggtttggatctcaacgaaccactttgacacataatgttttgctaaattctagctatgttgaattgagtgcattttggtttctctgcagatcatgaagtttccttcatattgagcctctatccaaatgggtactctataggaaaaacctctgaggtatgtactgagagtctatatgaatttatttatcttgtgatttcttgtatttgagttttaaaaccttcacgttttcacaaatttgagtttttgaataccaggctatgcaacagatatcgtttcgagatgttccaaaggtcttacatccgtatgatagggcagcagagggtctcctttcggtaaatctttcgaactatgttattatagacttgatttgaacatgtaatcaaagttttggtgaatgaattcaaagtacttagatttagtaaatgtgaagatgatgttttttttccccacttgttctacccgaataatgcatttcactgcactacttactcgcgttttgttaaatacactttctgagtttcattctactgagtaaatgtttttaatccctttgtacgctttataggctattgaggctggcaggcttcctggggacattttggaagatataccttgcaaatttgtggatggggtggttatatgtgaggtgagttatctgcaattattttttgggataaagccttccataagttcttggaaacagtccaaacgtatataaatatatttaaaaagagctcaacagaaattatctacacttaatcaagattaaaaaaatgtcgtaattataagtacatggaagtttatcttccaaactcaattgtacatgtatttgattgtttctgaaacataatggagtaactgggaccagaagtaaacataaaaaacctagttatactaatttttaattgactgctgtgtaccatcttacatcatcatgttttctttaatttttggcacatactattgtaggtgcatgactatcggaaacatacctcatctcaagtctctcctgtgataaataaattgcgccttaagatgtcactcgagaatgtggtaaaagatattccatcaatgtcagacaactcatggacgtacggtgatctcatggtaatcatggtagctcgtggcttataggtcgtatatctgagcactgaaactattatcttctgtactgatccttacatcaactgcaggaagtggagtccaggatattaaaagccttacaacctgaactctgtctggatcctttacccagacttgataggctgagtaaaaatcctttgactgctaaggtaatatctcattaaaaagactccttgtgctttctgttctcagttgtttattatagtgtctaaaatgtttttttttctctactcgatagctcgatttgtcgctttctactttgcggagaaagagattaaggcaaatg

SEQ ID NO: 10667 - DNA, 3000 bp, Unknown; identical to SEQ ID NO: 10661
  misc_feature (1)..( 3000): cDNA_ID_2716291_gDNA_ID_2213667_Annot_ID_132716 3000 nt of promoter + ATG

SEQ ID NO: 10668 - DNA, 3000 bp, Unknown
  misc_feature (1)..( 3000): cDNA_ID_2716287_gDNA_ID_2213667_Annot_ID_132717 3000 nt of promoter + ATG
tgaagtgtatttcattcccccctgttgtgaagctggaaattgcatgggaccaccttcctgattcataaccccttccatttggtgtggtgaaaacctctgaatacttgtatttggatactgaatacttctgcctagcatgtcttggtgttgtagaagcgtatttttccaatttgtatcggatccatgaaggccatccatacgttgccctaactgttgctgcggaaccccatcaggacccatatgtgaaacccttgttcgcttattcaagccaggcatagaagacatttgtccttcttgactttctctctttctatgaaaagatgtaccagggttcatactatcagagccataaggcagcatcgcatctagtccaccaggcgaagcgccagagacactgacagaatttgatccttgatcctgcgtgtttcttgtacttccaattcccatgtacctttgttgctgaggtggtaccaaggccagagaggaatttggtgcatcttgcaacggctgacttcttaatcccgccagcatattagtaccaaggttttgaatagcctggttgttattggtttgctgcattatcaaatgccctggcaaatttcctcgctctgaactttcaggaagccgatcaatgcacacctttttcccctgaatcttattctgagacatgactgtcacttctgccatttgccttaatctctttctccgcaaagtagaaagcgacaaatcgagctatcgagtagagaaaaaaaaacattttagacactataataaacaactgagaacagaaagcacaaggagtctttttaatgagatattaccttagcagtcaaaggatttttactcagcctatcaagtctgggtaaaggatccagacagagttcaggttgtaaggcttttaatatcctggactccacttcctgcagttgatgtaaggatcagtacagaagataatagtttcagtgctcagatatacgacctataagccacgagctaccatgattaccatgagatcaccgtacgtccatgagttgtctgacattgatggaatatcttttaccacattctcgagtgacatcttaaggcgcaatttatttatcacaggagagacttgagatgaggtatgtttccgatagtcatgcacctacaatagtatgtgccaaaaattaaagaaaacatgatgatgtaagatggtacacagcagtcaattaaaaattagtataactaggttttttatgtttacttctggtcccagttactccattatgtttcagaaacaatcaaatacatgtacaattgagtttggaagataaacttccatgtacttataattacgacatttttttaatcttgattaagtgtagataatttctgttgagctctttttaaatatatttatatacgtttggactgtttccaagaacttatggaaggctttatcccaaaaaataattgcagataactcacctcacatataaccaccccatccacaaatttgcaaggtatatcttccaaaatgtccccaggaagcctgccagcctcaatagcctataaagcgtacaaagggattaaaaacatttactcagtagaatgaaactcagaaagtgtatttaacaaaacgcgagtaagtagtgcagtgaaatgcattattcgggtagaacaagtggggaaaaaaaacatcatcttcacatttactaaatctaagtactttgaattcattcaccaaaactttgattacatgttcaaatcaagtctataataacatagttcgaaagatttaccgaaaggagaccctctgctgccctatcatacggatgtaagacctttggaacatctcgaaacgatatctgttgcatagcctggtattcaaaaactcaaatttgtgaaaacgtgaaggttttaaaactcaaatacaagaaatcacaagataaataaattcatatagactctcagtacatacctcagaggtttttcctatagagtacccatttggatagaggctcaatatgaaggaaacttcatgatctgcagagaaaccaaaatgcactcaattcaacatagctagaatttagcaaaacattatgtgtcaaagtggttcgttgagatccaaacctggagatatatcgggtaaagatggcttcgaaaacccggaaacatcgccaatattgctatcatcagtggcctgaaccaaacgtaataaattttctatataactttccaaaataagcgaatttagttggaacacaatacaactaaaattctaagttaaattacctttggtttcccagatagaacgattgcttttggggaatcaggagtagccaattcagtagaaatcttaggtcgaaactttctaccaaccttcgatatcttaaacgagacacccatggattctctccagagagatgaagctcaaacctgtctaggtactgtcaataaacgatacagaaataaaaaagacacgagaattgaagaaatcgaagaatgaattttaagaaagctagagaaattgaaaccttatgagcttgttacagagaagatcatcaaacaattggatcggatagaaagcgagagaaatcaaaggtgactaagaatagagcaatgaagaattcataaacatggaatttgtgaaacacaggtgggaaatttttgaagaagatgcgatcggaagagaaaggaagagagattattgttagggttcttcttctaacttcaaagtagcagaaaaagaaattatcttttgtgtctctgtgcacacttggatttcggtttaagacaaaacggaagttgaaccagttattaattttggttagcttcgattaaaatttgggtaaccgagtttgggggtagaatagacattttgcaaattagggttttgcttgatatataaaatccttcacccttataagcctttcgtcgcctcttcgtgtgatttactgagtgaaaaaagcttatcgcggcgattagttcccggcgaagaagaagaagagagataagaaa

SEQ ID NO: 10669 - DNA, 3000 bp, Unknown
  misc_feature (1)..( 3000): cDNA_ID_4268705_gDNA_ID_2213667_Annot_ID_132720 3000 nt of promoter + ATG
gtctgatttaacgccaaaggtttatcctttgcttctcgttgtgattcccaacgatgaaatcgacaagctttgcataacttctttgtactttatattacagagaagttggttttattgttaactaagagttttttttcttttccggggaacaggttctgaaatgtgagtatgctgttcgaggagaaattgtcaacattgctcaggtcagagatgcatgtgctttgtcttgtaaaaccaagaacaaaatctgtaaaattgtttttaatgctaattgatttttgtttgctttttgcttccatcttacagaagttacaagaagacttgaagactaataaggatgcttatccctttgatgaggtaaaatctctttctttatcggcagttttgacggatttatgattagtttagtgttgatgttacctgttctcaaactctttgtgcaaggaacttagaattcttcattacttttggcagataatctattgcaacattgggaatcctcaatctcttggtcagctgcctataaagttcttccgtgaggtaagtgaatgtttttggtactagtttggttgtcatatcagccacagagatataacgtctatcatctatatgcctcaggttctcgcattgtgtgaccacgcaagtcttttggatgagtctgaaacccatggtttgttcaggtgaggttttccttgctatatttcagctttaggacatgtatgctcacggtttaagattgcttaacatttgatttctactctgctatcagtaccgattcaattgaccgagcatggaggattttggaccatattcccggaagagcaactggggcttacagtcatagccaggtttgttattagagtctagttaaaagtcctaaaccctttcttgagatggttcttatgttgctgaatgtttcattttttgttctgcctcagggtatcaagggtttacgtgatgtaattgcagctggaatcgaagcacgtgatggtttccctgctgatccaaatgatattttcttgactgatggtgcaagtccagcggtaacaatcaaaacgaaaacgttatctcatagagttagagtaagttcttttaaaggattcatgctaagtgtttttggtgttttttactctataggttcacatgatgatgcaacttctcttgagctcagagaaagatggtattctttccccgattcctcagtatccattgtactcggcttcaattgcccttcatggtggatctttggtatgttcatataatcatcatggagtaatgttgttttttggtacaagtttttgaaatttgtacttcttaggttccgtactatcttgatgaagcaacaggatggggactggaaatatctgaccttaagaagcaactagaggaagctaggtccaagggcatctctgtaagggccttggttgtcataaaccccggtaacccaactgggcaggtacaaacagattttcaagactagcctaacaaaatgtaacattcttctaatcttgcgttcttattctggttaggttcttgcggaagaaaaccagcgtgacattgttaatttctgcaagcaagagggtttggttcttttagctgatgaagtctaccaagaaaatgtttacgtccctgacaaaaagttccattctttcaagaaagtggctcggtctttgggctatggagaaaaagatatctcgttagtctcgttccaatcagtctccaaaggtaaaagaacaacttttactgtccaatgcttgtcatctaaaaaatggggtttttgtttttaatattcttctgttgataggatattatggagaatgtggaaaaagaggaggttacatggaggttactggattcacttctgatgtaagagaacagatatacaaaatggcttctgtgaatctttgttctaacatctctggtcaaattcttgctagccttgtcatgagcccacccaaggtaacaccctagttctctctaatcggttttcgctaagttcttgcaacagattatgactaaaaagtctaatattgtatttgatcagcctggtgatgactcatatgactcatacatggcagaaagagatggaattctctcatccatggctaaacgtgcaaaggttagtcgaagattacaataccctctaacgacatttttcagtctctttgtatataatgtcacaagcttgaaaatgaacttgcagactttggaagacgctctcaacagtttagaaggtgttacatgtaacagagccgaaggagcaatgtatctcttcccgcgaattaaccttcctcaaaaggctatcgaagctgctgaggctgaaaaaactgcaccagatgcgttctactgcaaacgccttctcaatgctactggtgtagttgtagtccctggttctggctttggacaggtaaaatataaccaaatcttcataactttaaatgtcttacaaaaggatcgaacttgaataatgggttttggattcattgtggtttaggttcctggaacatggcactttagatgcacaatacttccacaagaagacaagattccagcgatagtgaatcgtctgacagagttccacaagagcttcatggacgagttccgcaactaaaaggacctgaccatgaagatgaacttaaagacccttttgaagaaaagtgtgatcagtttgagttattaaaaaaaagaaaacttgtgttttgaatttgatcaggcaattgtgatcagctaatttaattttagaatattttgtacttccattccatggcatgtcatatgaagatatgaaaattagtaaatttattgggcttataaatgggccttatattattaatgggccttatatttatttttcatatgatatttctggagaaagcgacagtatattatcttcaatttttccattttgaagaattttctcaagaaaaaaaaaaatcaatgtggagaagatcaccgtcgtttattctcgacgagcgacgaagctcgaattcacctccaatg

SEQ ID NO: 10670 - DNA, 3000 bp, Unknown
  misc_feature (1)..( 3000): cDNA_ID_3037593_gDNA_ID_2213667_Annot_ID_182142 3000 nt of promoter + ATG
actattgttgtataagttctagtaaggtatttagttttatactctttctgcttgattttttttccttttcttataacttctttgtggttctatatatgtatataacaaaaataaacttttgaaatgaaaatgtatgttgtagaatttaattcagaattatcatgaaaccgatgttgaccattgatgttttaataaaaggtaggtggtccatcgacgagattccaagctggcaatagaagatctaagaagtagagcttaaaaagtttttaacattttttgtattttttttttttgtggaacttcatgttgtaaaagttgtcgtggtgaagaaaatatggtggtatgtactattttgtatacaatgtgatcaaacgtctaggtcatttgaatctcatttttgagttatgcacattcttgttaaagtacaaatgcacacaaaaaattagaatattgatattgtatcttccaaataatatatttactattcatatttgacatgatgatcaaatgaaacttcacaaattctcgtatttgattcagttttacataaatatttaatactccacaaatatcaaatgaaactccacaaattctagtatatatatattcctctgtcgtgcaaaaataggatattttggaaacgctgggaagtaggagtagccgagtaggaccaaagagacaaagctagtcacaagttgtcatattttttagttcgtgaagtccaaatcaccactattttcgcagacctgcgacttcgagacttttcttcctttttttaatatatatatatatatatatatatttcctttgacaaaatataatattgttaacttatacaaaataaaataaaatcatgttatccactacatttacttgatatggtaaacaaaattagaagttggatgaaatcagaaataaatgtgtatgtatcaccaagttgataataattagtggcctttacaccgaatctggtccattacttttttttctaatttgacatatagtaggtttctccaacttgtataaacgccgcttattttcaatttaattcgtaattaaacaaatatgttcagtatataattatgataacatttttctatcattcttttctgattctgttttttcttaaactattaaagcattaattatgctgggaattagtgatacacatatatacagaaaaaaaaaatccgtggaagaaaaaataaataaattacgttcttcgttatgaacattttttgtgtgcgaccgaaaagaaaaaacatttttgtagattaagaaaaatataggctaaattgagggcgggaggtctaatatgtccaatctaaagtgggccgttaaggcccattagtgtttctcatgttttatcttcttaaattctttattgctcaatggctgctgattaccggttcgaatcgtacggaatctagttttagttaagaagatgtgctgatctaattactctatgatcaaaatcataaaattggagccaacaaaaatatcataccaaacacatgacgtggccatgtggaattgttggcaaccccaaaacatccaaacattggtttgttgcaaaactaatcagataattaatgagattaggtacagtatttcatatacatttaaggacatttaatgaaaattaatgctacattagaatgttagggttgtttgattggtgaaaattacaattgccagcaattatgttactgtaaaattgccattcacattttcacccaattgatcaataaaacttttcatcgtcattcttttttttttccatttgaaaatctgttttttttttctgtgttggatgtaattttttttctttgaaatatttttattacaaatatttaaccgtaataaaataaaatacagtctactatttttagaacgtttattgcaaagttctaaaattgctaataaagtcttccaagtgaaaaatattttaccgttgaaattatgtttatttattactactagctagagagcctaggcttcgaccaatttttagttacgatattaccctcatcgttataggctttattaggaaagtaaaccggtgttgttaaaaggttttgagggtattatggtaaaacgtagtactgcggctgtatcttttttttctttcctaatcgaagacgacattcgtcggaaaagaagttgtctgaataaggaaactctctctctctctaaacagtctccgcatattttctctctctaaagactctgtcttttttactacggagagagagagagagagagagagtgtgcgtgtgctggtttcgagcgtggatattaagggacagagcaaaatcttctttggtgggagaaataaagaaagattttgcattttgagcaaaaccagtagtgaagtgacaacattaactcctgacattgttagggtttcatcttcttttctctctttctcaacctctcttgccgattgagaacttggattaagtttggaaatactgagaattggaaagttcccagctcaatgctggatcggcaacaggaggatcttggtatgttctttatggattttgcatgattttgagttctgagctttggttttttttttccggattatattaaagttgggatttttatggttgggtctttacttagagtagtggaatcagatctgagaagcatcgtgttccgatgaattagatcctcgatttctatgtctggccatttatatggttcatgacctgtttttgtcttccttttcatttcccgagattctttgtttctcatcaaagttatattccgtgattgtcctacttatttcgtgagaatgactctggtttcattcatcttttgctttcaacattgttagcaagttggcttttttttttgtaatctctgagtaacagtttctattattgttttctcaggtttcttggcattaatttgagtttgttcagttgaattctgttaatctcagtgatacttctgctggttggttagcattagcaatctggtcttgtgaga

SEQ ID NO: 10671 - DNA, 3000 bp, Unknown
  misc_feature (1)..( 3000): cDNA_ID_2990839_gDNA_ID_2213667_Annot_ID_182140 3000 nt of promoter + ATG
aaatatatataaaaaggaaaaaaaattgtatcaaataatttaatagttttgttatgttaaattagataaaatgttatttattatgtattttttattgatatatatatatatatatatttagccaaataaattaatggtgtaatgatcacttgttatatctgttttttttaatagaacgtatttatcagttttttcgtagaccgtatcattccctcatccatctatcataattttacaatatttttcttatcagcaagtgtaatttgtaacatgaaaataaatgaatgaatatggcaaaatttattacaaaattaaaattattacgaatctcaatatataattacaagatacaacaaaaaagaaagaaaaaacaatgggcaaaaaacgatactagttttgccatttatgtcctcatctctcttagctgttatgcatcaatcggtgggtcatgcacctatacgttctctctctatctcactcaatatatatacacgaaccttcctcgttatttcctcccaagaacatctctcaaacattcctctcttcttcttccaatattttgatccccacacacactcacatcaacacatataaatctcctcgtaaaccctaaaccctagctagtttcaacaactctcttgttccaaccccaagaaaaaagttcaatttcgttagcaatggccaaagttgggaagctgacaaagcttaagtcggctatgaagaaatggccttctttcgccaagaaccaccaccactcaacctcctcagccgctgtttccgacgaactctcagaagacaacaatctccatgtggtttacgttggtcaaactcgaagaccttacatgcttagaccagacatcatctctcacccactctttcaagaactcgtggatcggtcttcttctagatccatcgaacaagatcgtgagattgttgtagcttgtgaagtcgttttgttcgagcacttgctgtggatgctcaagtctggtcaagaaggaggatccgttgaagaattggctgagttctatacttattgacatcgaccgattgattttatacatttatttcgtataatatataccttttttgttgttgtttgttgttgctgatttgtattttcattcgatgcggtgtgtgatcaaaacgtgatctcgtaaaccatgtcatttgcttccgtttttctgagcaattttatgatgatgatgagcatatgtagttttcttactttgttaagaccaaccaagaataaatttctactaacaacaatctttatatatattttccttcaaaatgtatttcagtacctatattaattgtaatatacataaaaaaagaatgcaatgatttcaagaaaacaaactaagttttctggtaggttttgtttctatatttattttattatggcggttttgtaaacttttgtttctattttcgtaacgtatctttctcatatgagtcatgagtctcatgacataataaagaaggcctttgatgatgttcgataaacaaaagttggttgaatatgatgagtccaattcatttattttgctttatataaacaaaatatgactagcaatgatttctatcatcgatattcatttttttttttttttgcgtatcatttgtatggtgtcagtttcaaatctatttttgtgtgtgtataaaatagaaaatacgtatgcaatttcttttaaggaaataataatggtcgctctcatgacgcgttggtgacctggtcccaatttcatgtccctactctcctttctagttgcagacattatatatttatcttttaatattcttgaactttcagccatacaaaataaattaaagcttacaggttaattagtcgatatactaataaatttgtagtttgttgtactaattggcattacttacaccaacatatgtgcattaatatacgtttatagacataaattggtagataaaataactgacattaattttccgaggtgggtacgaaaaggacgcgcagaataattattgaagataagtataattagtaagaccaaaataaattaatttcctacgtaggacgaagttctaatcattataatcaaagaaaagaagtttctttgctaagtttaattaagcttgttaattgattccgacacgctaatgattgacaagtcactcggtgtgtcttttcagcaaacttcatgggacttcttcttctacttctgtcttgttccttacattacatcaatcctatgatattatagtgtttatataaactcggttggtagctaaattgttatgggttgctgcttgttttaacgttgattatagaagaaattaataattacatttgattcgaactcaggttagttactagaagaaattgtaacgaccaaaagacagtgttgggccttagtgggccgtgcaaagagatgggagttatgaaacgacaccgtttagttttaacttagtgtcaaacactctaacctgaacagaaggtctcaacaataagagggggactagcaagaagactctcaagggaaggacaacttcatgaaagctcaggtgaagtgaaaccaaactcatcctttgtcttgacgatttgatttctcttgtttttgtttgtgcaattccctatggattcttctttggtcgttggtcttttttgtttttgtctgtgggtcgatgtgattttatcaattcttgtctttcaagtgtttgttgaaatgcctcaatgggaaaatgtaaggtttttcagggaatccattaatgggttctgctcaacccaaggattcaagtaaccctataacttcagctccgaatagggctgcagtaaaattgcttaagtctctcttcattgggttatgcgttgtgctagagtttccaaagagatgatctttcatttctcttttgcaacctcttgttatcaatctatgggatattaaggttattctccattttcattccggaaagaaattaaccagttagtgttgttcccattgatccagcaacttcagaact

SEQ ID NO: 10672 - DNA, 3000 bp, Unknown; identical to SEQ ID NO: 10664
  misc_feature (1)..( 3000): cDNA_ID_3037601_gDNA_ID_2213667_Annot_ID_182138 3000 nt of promoter + ATG

SEQ ID NO: 10673 - DNA, 3000 bp, Unknown; identical to SEQ ID NO: 10663
  misc_feature (1)..( 3000): cDNA_ID_4268709_gDNA_ID_2213667_Annot_ID_182137 3000 nt of promoter + ATG

SEQ ID NO: 10674 - DNA, 3000 bp, Unknown; identical to SEQ ID NO: 10662
  misc_feature (1)..( 3000): cDNA_ID_2716316_gDNA_ID_2213667_Annot_ID_182136 3000 nt of promoter + ATG

SEQ ID NO: 10675 - DNA, 3000 bp, Unknown; identical to SEQ ID NO: 10657
  misc_feature (1)..( 3000): cDNA_ID_2716324_gDNA_ID_2213667_Annot_ID_182134 3000 nt of promoter + ATG

SEQ ID NO: 10676 - DNA, 3000 bp, Unknown
  misc_feature (1)..( 3000): cDNA_ID_3037605_gDNA_ID_2213667_Annot_ID_182133 3000 nt of promoter + ATG
atgactggttaagtggtccataatccatctcttgtccttattttcctccctttttataccaaccatttatgtatatcttaattacgctgaaagcatgcgtcttagagtcaagtcgccacgaacactctgatatattaatgcttaaaactaattaatctcgattttgccatagatactgttgataactaattcaatcaaaggagatcaacgaaaggaaggcgatagaagaagttaacgtaagaacaaagttccatggggaccaataagatatgcatgtttcctccaatgatgttagttcatttggtaacatgaatcgctattggactttcataactcccttagattatcttaattgatatattttatatgttgtataattgttttagaaccaacattaatggatgcatatactagaatgtatttattctaattatattaatatatcacacctatatatctaattatatatctatctatctataaatattataataataatatatttgattaacatacgttgttttttaaagtattttatacgtatagcttgtgcataaactatgatatgtacctagacggctagacccgttcagcaccgcgtccattcgaatttggactagacaatcgacccaccctatacataataatttgttggttcaaaaaatctcttggattttggtgcttaatttgctcaaaatagtactttggctacactggctagtgcatgtggaaactgatagtagccgttgaaagtcaacctgacccctttgggaaaaggattacaaacttagacccaccaaacctaacctttttaccttagaatacgtgtctttctcaccataattagtttgtttatctctagtaagaattggaactacaaaagtagtttatgtaattaacaaaaacaatgctcgtttgtttaagcaaagcgggggatgggaaaaatgacgtggagaatgtcgattggacctgagttcacgtgattgggagtggtgcggtgggctcaactctccgatgataaagcgaaactgctttttgttgctttccttttgtctcctttttttttcttccagttctctcaccctattttgttcctcatccttatttatgaattttaagataaaaaaatatatatttaagtaattaaaatgtcgattttttttataagttcatttgaattttttaggtttataagtaaaaatcaattggtcatgaatagattgatttaaaacgaaaagaaaagaaactaaaacgtattaacccttgtttaaatacctagttatatacaagcaaatcttcaaacgatattattaaagggatgatgcattagataaaacaaattactagcactctagcagtatcatcaatagtttatggtaataacccaaaccgttcaaccattaaaaaacgatattggtatatagatgtgcacaaacttggtcaacaaaagttcatgtagtcaattataaatcggggattagtataaattttcatacggctttgtattctatcgtggcaccgtggtgtgtaatgtaaagatgattagataagaaatgtgttacacgcccacaacatatgattcaattatttgatggaaaatatagataaaatgtatagagaaaaagtactagaagatgcgaaatccagaaggtaaggggacaatggcatgagttccttcgtgggatttgctttcttaatttcactctttctttctgtctctttccctcttagatttttctgaaattctctagaattttatattagctttagtgctttacataatttacatattatttagttcttttgtcaattagaattacttgtggatcaaactttaatgagcaaatatttctggtcaataaaacgcttcgcagtaagaggtcacaaattaaacccattttttcatatttatattttttgacgtttgatgtgtacggtaagttgaaacttgaaagctatattacaaacttgatttcccatattccttttcatgcatctactattactaacctagctagcaaataaaatgacatgtagcatattggttggtttataatgcatttgttgttactctcgagatttaaactcatatatacatttgttgacaaaaaagtaactttaaatagattttttagattagcgcttctaagttataactatacactgatttctagtgtaatttatgcattctagttctatatacttaatagtaacttttatacagtatttgtgtaagtagttttcaagtgaatttttttctcaacatatacaatgtatattacatataatttacgtgcaccttttaaaaatgaaaaattcgacgaaaatcacacacaacaaaatgtgtggaagcctctatatcttcgtgtcagcatagtaaccattcaaggacgatacaatttttctagggattcaatataatttccctctcctcttatagatagtcgaaaaatggtagaaaaaggaatatttgagactgtttgatgaaacgaagtgccaatatatgaattgtgatcaaagccgtgacgttatctccaatacaaaaactaatattcttattgtactccattaattaattgagctataatacaaattaaatacgtacagaagaatgtttctttgggcctcgatcgtttgcatggggataggtgcgttaatatgagtgctacgttgtgagctgtataaaagaagagtgtgggaataggttttatctgaacagaacttaaccaaaacccaaacaaattgaaagaaaaaaaaaacttttttccttcttccttgatcctttatctttttcgaagaagtgaatctggacgaagaactaaggccgccaattttggaatttgaaccatcaaattcatcaacaacaaaaaataaagatcttaatctttgaatttctacttgtatttaagcttcttgattcaccttaaacccgagttatttcatttctttttccacctctttctttgtcttcttcttcttcttcttccgggtcactaagac

SEQ ID NO: 10677 - DNA, 3000 bp, Unknown; identical to SEQ ID NO: 10655
  misc_feature (1)..( 3000): cDNA_ID_3037608_gDNA_ID_2213667_Annot_ID_182132 3000 nt of promoter + ATG

SEQ ID NO: 10678 - DNA, 3000 bp, Unknown; identical to SEQ ID NO: 10654
  misc_feature (1)..( 3000): cDNA_ID_2716338_gDNA_ID_2213667_Annot_ID_182130 3000 nt of promoter + ATG

SEQ ID NO: 10679 - DNA, 3000 bp, Unknown; identical to SEQ ID NO: 10658
  misc_feature (1)..( 3000): cDNA_ID_2716274_gDNA_ID_2213667_Annot_ID_132722 3000 nt of promoter + ATG

SEQ ID NO: 10680 - DNA, 3000 bp, Unknown
  misc_feature (1)..( 3000): cDNA_ID_4265991_gDNA_ID_2213668_Annot_ID_132724 3000 nt of promoter + ATG
agtgtaacccagacctccaacaacgtttacttagctaaaaccaggcgtcaataaaatgccttgctttaaaagttcagtaaattagtggatgagaatcccaaaaggagaaacagcaaaaccaccactacttgcatagatcagtactttataattaactggtgagctaaaggaatgcatcatagtatatttatatcaaccaaagagcccacaatctcctctgtggagaatgtatcaaagttcatagcacctaaactaagtaatcaactaataagagtgggcaaattaaattgaaagtgaataaacaacctccaattgaaacactgactggatcatcatgtccagcaccaaactcttcaagagaatctgcaaaggcactaactccagtagatgcctctcctaaagctcccctataacaaaaaataatgcaattcctaagtttcagaaaagacaactgaagagaaagatacaacaaggagacagaaaaaatgaaggtgagaacgagaatgctaaatctaattcattgaaaaattccttcccattgagtcttaaatggtacaaagtttaaaactttcagctttcaatggtcaaacagttcaagagaatgacttatgaataagacaaagccttatataatagagaaccagagaaagatgattaagatattacgacaaaaaacggaaacaaccaaaaaaagtaggtagagatactcttcttacatgaacttcttaacacctttgtataacttctgacaacgatctttaagctcatcacttgtcccttccaaggagaagacctgatccagtcaataaatcaatcaagtttcaaaactttattggagaaaacttgaatatatcactaatgaggtaaaaaggtagtgtacctgtttttgaaacattggggaatcctcaagattgataaaacccgccattgttaagataaaacacgaagaagcttcagaccaaaagtctacgaatcgagtcaacaagacaagacaagtaaaccctcgaattgctgtcttcttcgatttgaaaatagatctcgcgagtttcagaggcgttttcagctgtctgatgatgttttcatttgcttcgagaagagagacacagaaaaatctgggaactaaagttgtttacaaataaacccctcattttattatttattacagaaacagaggaaaataatatcagataacaaaaccatcctcatgtcacatgtcttacgaaatttaagtaagccactttaataagttcaaaatgttgttgtaacaacactcaaaaagtagaatttatccatcttgctcagcttttaggctctccaaattttccatttgaaacaacaaagttacaaaaaattctttgtctttgttcgtatgctctctaatttctctgttaaagattttgtcctcatagttgcgatcgtcatctctctgttttttttcgataacggtttttgacatgtacacccacacacaccccaaagaaatggatcgaactcattaattttaggatgtaagcaaataccccaaaccattagattgcacggtcttgctcttgttatctctcgtttgatttattctagtttctttcttctgtccaaaaacacttttatatcttcttcacggcttgtttccaaaacctatcattataatttatttccattaaaattttactccattgtgttggtttgaaacctatgtatatgatgacttagaaaaatgtgtatgtatttttagtatgagtttttaagttttacttttgatttattttggagaaaaaaataactaagattataaagtttgaggttctctattaaaaatgataatgaaaattatgttaataatgtttttacttataacaaataaagaatatgttcaaaaaccaaattaaagctagagaaaaaccatatacattcaacatctaaagaaaactaatatggtagtgcaattaaacctgactaatctcgaaagaaaaatcaaaccgaaaaaaataaaaataaaaaaataaacttctgagcttatcctatgagaaagttaactcaaagtaagattttaaaaaaatatcaaaacggaaatctgttgagcaaattaataaatagaagattaaaaatttgtacttgttgttcaagcttctttaatggagaccccagttctttatatttttttgaagaacacatcttgagaagacatctctcatcatccatgtcatacacctcgtacagcatccgatgatttaggttttgtggtgaatatatcttagctagcatcaacatattctatcaaacagttttaagattgaaggaaaaagagataaaaaagaagaggttttcatcgtattctttacatgtacattcaacatcttatcaggatatgcgccatgagcacttgttagcttgtcaagttcgaactttaaacaactagttctttacatgtacattcatcaactagttttttaccatttgagatgaaagagttgaaaaaattattcaacccattcaattttaaaaaattgaaaaaaatgagcaagttataacaacaaaatgttcaacttgttcagctacaattttggagatgaataagttgaatgatattcgatccaaaacttttcgactcaatacttttaatccattcaattttaggcaaccatccgtagccatacatgtaggattaaattccaacgaaaatcctaaagcaaatgacttaattacttttttcataatgcttatttactttcatttttagaaaaaaactaaagtaacggtcttcatagaaaccataggttaaaataaaataaaataaaaggtttttaggttccaactttactttttaccacacaccaatcatttcaacttttgacaattgcgtcaaatacatatccccaacggtaaactttactctctgccttacattattgtcatccacttgttgcaaagttccacattacaagaatcattcgattctcttctatcatcatcttcttcttctccatcaaaattcaccaaaac

SEQ ID NO: 10681 - DNA, 3000 bp, Unknown
  misc_feature (1)..( 3000): cDNA_ID_2716402_gDNA_ID_2213668_Annot_ID_132727 3000 nt of promoter + ATG
gaattcaagatcttaccttctttaattatctttttaaactactattaacctaattttcgttttaatttttgattagttaattctctaaatgtatctgattcgttctccatccaccacacgaaggattgatcctatccacgatggccattttctttgtaaaaaaccagcacctaattacatctaactattgtttttatttagagagattgtataagttatccgaatattattgttgttgtgtgttgactgttggtataatattaaaattgagctcggtttaaattaggttcgcgtgtgtggagttcatccataagagcaatcttactttaagagaagttttgatttaaggctaagggttcaaaagattggagagatgataacaatttagagttcgagttgattaaccagtgttgtattcattttaattaattgatttgttgttatgttaatatatatattgtgtgttatgattgatgaattgttttgtaatctcttaagatcataatgaattgttagcgtatggttgtggccgaattgtgatttttttttttttttgctaatcgaaatataatgtcacatattcatagatcataaaatctcttgttcaaacattctttggtgatcaaagtaacgtgaaatttaaggattccgcaattcaagatagtgaatagtggatgttgtcaagatactgaatagtggatgttgtcagtacaacaattgtgaacgattagaacgtccatctatctaccaagctatcgacatttaagtggctatagtgctagctatttaagtagttatgctatatgttggcttcaatttatagaattaagcttgttatgagttattattggaattaggattgtgattataattgtttttatatttgtgcaattataagatataccaatatattttaacaaaaagtaaaagaaaagaaataggagtataaatataaacgaaacacaaaatagaactgtttaggagaatataaaacttttacgttgtctctacctcttcaaattcaccaaatttattttttaaatagtttccatcacttgtcaatgtcacatcacctatcatctatctctctttttctccctctcgtcctttttcatcactttcatcattcatgcatctctgcccccattctctattttcttctatatttctctagtcaaccaaaaattttgccttaaggaaaccaaaagagaaatccaattgaaaaggatattaaaattaagggtaatattaaaaagaaaattttgggcccaacatcagaacaccattttatgactgtttctattgtcgactgtttgacaaactgaacaaacaatggctttgattggtgaacaaaatcaaagcactacaatttctacaatttataaatttatcaatcaaatatcaaaattgttacactgtttttttacagtttttctgtactatttttctttttcttttttatacatcattatgtaccatcttaccattataactaccaggtaaaaaacttgtaaatttttatattattaataagacccaatatatatatatatatatatatatatatatatatatataagttagcaatccaatggtcttgcagtctttcattattgtaatgatgcttattaggttttgtactaaaattaatgctaatcaatttagaatttacataataatatttagaatcatctgtttttgtaactatcttagttttagaactaaaaataaaataacccaaaaaaaactggtaagtactagtctctaatagctatgctttctttctacaatattatggtagtcaaattataaaaatatggggatgtttcgaatctttctaccgtaaaactggttgtgtccaaacgtatatatttgggatacaataaaataaaaaataagactattaagccaatgaatcataatgaggccataattttaaacgattaatgggctcctaaatatctatcttcataattcacactccacatgaatctattcctagtaaccctaagtgttttaataataggatctagagatgttcgaagatataattgcattttacttttcgtcgtacttatgacgaagcaagccttggacatctccgttttaaaacagggatctcatgatcttgaaaaggattcttcaagaagcacagaaaaagacaaattcgtatgaattattgactcatatcaaagttatttcatataaacaaaatcctatgaattattgacactagtcaaaactcaatgaacagattgattggccgtgaatgctacggtccatgaagggatcgagtgtggaccagtctctgcaatatatgttgttaggttgacttgttttcactagaatcgtatgtttttccaatccatcagtacgtttaacttcaaaccaccgtcaaatgaaagctaatttaaacttcttctttttttgtaatattttgtgtcaacaattgaatttgatccatggtgagagaaacctctaaacgccggagatatttgtgatgttttaacgtggtctttcatcttcaattgctagttacgcctagaaacatatgtgactttaaactatcagataaagacttataaaacacacttttaaaaagtcataaacaaagacatctaataataatcaacccttaattacacaaaaaataataatgtaaaacaatattagaatgatcaatttttaaaatatttagtttttttttttttttggtgatagaaactaaaaatttagactataagccgataaagctgataagcccattaagtataatgagaccctagttttcaaatttggactagacaagcccatttacggttttggtgtaacaccaaaaaatactgttcaatttacaataatacccatatatcacttcatcttcctcgaagaatcttcataatttttaattcatcctccattagaatccctagggttttcttccatacacaatcagactcaacgataagtaccaatcggagaagagatcacaagtggatg

SEQ ID NO: 10682 - DNA, 3000 bp, Unknown
  misc_feature (1)..( 3000): cDNA_ID_2716395_gDNA_ID_2213668_Annot_ID_132729 3000 nt of promoter + ATG
cggtatcagtcctttacttgcattagttccttattgtcacagcaaatatgccacagagatctgaagcttgaaaataccctcttagatggaagtcctgctccacgcctgaagatctgtgattttggttattccaaggtctgccatatatctccagcatgcacttgaatgtgctagtgatttcttaatttatcctgttgtaacaagctcctctttcttctttttccctccatttgcgaggccccttgtcacttccatgtgagctatttttcttcttttgtagtcctcactgttgcactctatgcccaaatcaactgttggaactccagcatatattgcacctgaggttctttctcgcggagagtatgatggcaaggtaatcttattggtttgcaagtattagtatatcaagtatgcttagcatcttgatagagacatcatagtttgaaaaaatttcctgcgtagtaatgtagctctttcaactttttctcatgcataatatgtttatacatcaagaaggtatcgcccatattggcagatatctgctgtggccttgatagatttgggcagtaaacatgtctttttaattatccaggaccagaatgtgttatttttccattttttatcatttaatcgccattccttttttgcatttctcgactctttaagtgcgtttgttcattgataattataagctttctagccttgagccatgcataaagaattttttagaaacgcaatggatcccaaatacttatcttgacccatatgctctatgaaattgttatgatcttattgtttggatttggaaacatcaacttcacagaaatcatcagagttttggtacttatattcttccttctcactcagatggctgatgtatggtcttgtggtgtgactctttatgtcatgctggtgggagcatacccatttgaagaccaagaggatcccaaaaacttcaaaaaaacaatacaagtaggtttctttgtttttgcattctttgcttaagagttgacacgacaccaccactgatcgttgtgccacattgttacagagaataatggctgtcaagtacaagatcccggactatgtccatatctcacaagattgcaaacatctcctctcccgtatatttgtcaccaactcgaataaggtatcatcactctgtcgaaaagcttgtccatcctttttgagataattacttgtataacttatcatttttcttgtcagaggattacgataggtgacatcaagaaacatccatggttcctaaagaacctgccaagggaacttacagaaatagctcaagctgcatacttcaggaaagagaacccgacattctcactccaaagcgtcgaagagataatgaagattgtggaagaggcaaaaactccagctcgtgtttctcggtcgattggagcatttgggtggggaggaggagaagatgccgagggcaaggaggaagatgcagaggaagaagttgaggaagtagaagaagaagaagacgaagaagatgagtatgataagacggtgaagcaagtgcatgctagcatgggagaagtccgagtcagttaaaaaaaaagattgattttcttttcacgaaagtattctaaaaccaaaaaaaaaagaaaaaaaagttttcgttggtctgtcgaatttgtctcttgctctgtgttgagttcttattttcttttcttggtcataatttttaaggttagtctcataaatgctttggaattttgcttctgaaaatcttgtaaaatctgcagtagaagaaagaacaaactggtttgatgataagttcggtttgggcgaataaaatattttgtatattatatggtctattttgcaaattacctcagatttcaccttgtttattttgctaattaattttcatatacaaacagagcttaaaaattacaatttacaacatttttatacttgtgaaattgaaatctcgtgtaatactattttgtcatgttataatttttcaaaaatttatcgttgctgtttttaaaatatggatttaaaaccgatacatggaattattttcctttgaaatcaaaatatatttgtttttgatgtctgtgaaagtgagggagagagagagtgaacctttttaactatcccgccatacgaaaatcgcagaaagctgtaattggagacgcgctctttcttctctctcgcctcgtgatcttaccggaaaagtttcgtcgccggagtttcactatttcgccgcagaagcactagagtttcatctgtttgaaaatgtaatctcgatcttcccgtttcccagtcatttctaggggtttttgttcgctttttctcacaccgattcatttgcgaataatttttgagtgtattgttcggtgttcgtctgtgtgtaaagaggaattttcgttagttatagcagaatcgcttcatcttctagttggagaacttattagcttctggatttggttagttcttcgttttcctatgcatagattttgaaattaatcgtcaaattcgttgtggtgtattgtaattgtcatagcgatcatgattacagctcaaaatcggcacaattgtatcttccagctggtacagtatgcaatttctgcagtttatgttacaatttcatcagattcaactaatcgcaatgccacttgttttgtttttgtacagtaaatggtggtgacaagaggagataaatttgctggaagctctttggcatgtaaatctatgatcggtgctaataaaatgaggcaaaattgatcatatccctgtccattttggttttataaagaacttttcacggatcttttgttttattcttcctgattgtgtaaatgcagtgggagtcatctccatgaagttaataattccagaagtcactttcctcaaacaaattggttgaaagttgccaaggcgtttgagtgtataccatccttaaataagtttatgggctccaatttcctttactctctagaaagtcaaaagctgggaagagatagagaaatg

SEQ ID NO: 10683 - DNA, 3000 bp, Unknown
  misc_feature (1)..( 3000): cDNA_ID_3037642_gDNA_ID_2213668_Annot_ID_132732 3000 nt of promoter + ATG
cagagtaatgacatctggaaactctggattcttcgcttccaatgtcaagttgactgatgtcacaagaaaaacaaatcaaagttgaccagaaaaagaaaaagcaactaattaattacataattaagagagaaaaaaaagagagagtgttttagtaaaagaaaattaatattcctgaaaatatgaatttgccaatttgtaacgttttctgaaaatttcctctgccaaagtccaaaggagagtttttctttattactagggcattctctgcagatttcttctccttaagccatggtatgaatctatttttctaaacttcttttatttcagagatttcttctctgtttctattgcaccgatcattcctatgttttattatctgcgatattgtaatactttacatgcatgtgagaagtgacaaatttcagattttgtaattgttttcatctatagatacgatcgtcttaaatctttagtcatataaaaaatttgattgaagttacgcatgattttcagataatcactcattaggtgttagacaattgtggatagctaattgtactatatacagaaaagagattgttactgttcactgattcatgttctgttacatcttttggttggtgattttcaatatctcttaatctttattctattctgtgttttcattacttacatttaggaattgcccccaaaagtgaaaaacatcttgcttttggattctgaaggaaagcgtgtagcggttaagtattactcagatgactggccaacaaattcagctcaggaagcgttcgaaaaatccgtgtttacaaagactcagaaaacaaatgctaggaccgaaggtagatttcgacatcaaccatgttttagatacttcatagtgtacttgttgagtatcttttatcaaatcttttccgtcattacaattgctagttcttgatatgtagtggaagtgacagcactggagaacaacattgttgtgtacaaatttgtgcaagatctccatttctttgttacgggcggtgaagaggaaaacgagcttatcttagccagtgtgcttgagggactctttgatgcagtgacccttctccttaggtttgtctaatcatagcttcaaatttttgttatattatttctacattcccaacttcgctcaaattttcgatcttcctctcttctgaacccaaattacagaagcaatgttgataagagagaggcactagacaaccttgatctcatctttctaagctttgatgaaattatcgatggcgggtataaaaaaaaatcttcttttcgacattactaaaaccattagatcataaatggactgtttcataggttacatagtcaaataaaactatcttatatttcagtattgttctggagacggatgcaaatgtaatagcaggtaaagcagggatcaatagcactgaccctaacgctcctctatccgagcaggtacagtggttttgaaattgtgatcatatttttcttgataattacatcatcttgatacaaactttgaaatagttacattgatccgaactctcaagtaacaccatcactaatgaacttgatacatttctctgcggtgttttttttttccttcagacgataagtcaagcactcgcgactgcaagagaacatttgacaaggtcacttatgaaatgatgtgtgttttgctcttcggtaataatggttgtttttgtcatggtgaatgtgtgttttgtctcttgtagttgagtgactatactcttaaatataaaagttactttgcacttgggagatagttaccgttcttaaggtcaaacaattctctggtgatttcttcactctttttcatgttccatacacaattaaattacaacatacagtatatacctaagattaaaatataattcaacatctacctgttcgagatgctcataagctaaaagtatgatgtattattgcaaatttgcaataggccaaatgggtttaggtagggatactttttttttactatttcaagttttcaactgtgagatatactttactagtaccgtaaccattacattttttaatcaaataatggatctgattggtaaccaaaagttgtataaatattttagatgttagctttatcggaacagtgcaaaacttttagaacgagctctacaaaaaaagctgagagtaaaactttttgtaacgtttttgataaagtttttatgattgataactatcaaaactgtacaaaagtgtattgtgttaccattcaaacccaatatgttttacaatccaaaaagtattgatgaagggtaatattgtatttaacccaaaaaaaaaagatgaataaaaaatgaaattacaacaaaatgtcgacatttagttggcgtgtggctacaatattcggaagaattgtatcttctatgccaagactctaacccgtttctcaactgcaaacttcctcacgatgtcgacattacttgtatctttctccaacttgcttttgtctgatttcatcatcagatggatctgtctgattctcatatttaattcccattcgtgttttttcggattgcgagaatcctacgttatttcttcacttttcatgatcccgaggacatcttagaccccaaatgttcttcgtcgatgttcgtaatcaatcagaattttgattgtttcgattgaagtttgttgttttgattaccgaaactgattctgggttttcttatttaggttctttggaaactggttcctctatacttgttcggatcagaaacaaagtctctctcaggtatttcatcgaacacttcgtcaactatttcatttgacttaaaggttcatattttgatgtctttacatgtgatttgattcaaagtctcgcaatttcttatccattgctaggtttatttactaatgtaatattgaatttgctctgatatgcttgatttgttaaatggtcctctgttttttttaaaaacagcaacagagtccattttgcagatagttcctgaggcaatg

SEQ ID NO: 10684 - DNA, 3000 bp, Unknown
  misc_feature (1)..( 3000): cDNA_ID_2716381_gDNA_ID_2213668_Annot_ID_132734 3000 nt of promoter + ATG
tgctttttctttttctggtcaactttgatttgtttttcttgtgacatcagtcaacttgacattggaagcgaagaatccagagtttccagatgtcattactctgtctggttttctctaaaccggttcctgattcagtccggaccgagatttgggtaatatttggtacactcttctcttgggccgtgtggatcttgggaacattaaaacgggtcttactcgacccggcttaatcatccgaaactctgtcagcccaagcatgtgcctccacaggcccgcctaagttatttatgataaattagttcttttttggtaattaagaaaaatcaagcaattacaaacggacctgtgaccacttctaatcctactatattatttggaaaatacattttaaatgtaaccttaatttttgtaagtaattatataggtatgccattagaaataaaattttaaaaagtaaattaatttatctctttaaggattaaaaagtcaaatactaatttaattaattaaattaattaaaaaacgaaatatattatcaatttccaaaaataatagccaattaaaatcaacatataagatttgatatctaaattttaattaatttaatttaattagaaaaacgaaatacattattaatttctaaaaaaagtaaccaattaaaatcaacaaactatatttggtatctaaattatcatattaattttttattaattattattgttcacttctcatctttatatgattctatttttacggaaaaataatatcatcattataaaaaaataattagagttttttcgcatatgccataatttgaatttttaaaaacgaatataaactgttcaatacatgaaataatattgtaacgggtgaaaaatagatttaagaaaactttctactgagtaacgggacataaatttgaaatatttatattcaatttcatacatattatattgaaaatttataatcttatatactacaatagttaataacatatcagatgtgattcaatttttaatacaagctggaaaatcctagaattgacgggtttagatcgatattaatacaagatgatatactacatgtgaaactcttaaattaacaatcaaactacaagtgtataatctataatcttaaacactaaacaatatagataatatcaacaaaacatatacaactcatatttactatacatttaaaatcaaataaaataatatcatatatttttaaatcatctttacaataaaagtttttagtttaactaaaatataagcctacctgcggtatactgcagattaatctctagattataggacttattggatctaaagacgggtcatcaaagattttctaaactgaagcaaaatatactgaatattcaaatatctatctgttaccaaattataaacaaataagtcaatttaatattttatatatgaaatcaattaaatcttaatcacataaaattagcacaaaaaaaagtattcaacaattaaaaaattaccaaatctctgtgttatataagttttgatactatatttgaataaagtgtaatatacctttttaatttgtattctttaactaatttaagctaactaatatatttgctaatcttattatcaaaaccgactatcgtttcttatctctatagtatttttacaagacttttttggtggatttgggtaaaaatgcattcgggtcatatggtacattcccctattaaataaatatggtgcactcctatgttattagctaaaatgtttagattataatttagagtcatatcattaataaaactaatattaataaaataaatgactttttggcaagacggatttggagggacaggtttttgaatcaacattaataaaaaaataaaatataattaatccaccgtttcaatatgggtttaatctttaatttatgattttttaagaccactaatattaaacatatcaaatcatcctaatttagaaaaaattatataaaaccaaaaatgttatgtggtatgtataatgttactatatataaaattaaactataaaatataaatgtattagagaatgatacaatttgcaaaacttttatatataaaaaataattctaaaattttaaaaattactacttttaaaaaaaatcatgggacgggtaaagaaattacagaacgtgttttattttggaattgagttatatggtggatgtatttgaatcaatatttataaaattttaaaatattattaatatgctgttttaataggggtcaaaacttcagttttttaccaattgtctcatgaattcgtggtatagcgttacttaataacaattataaactgtaaaatataaatattttgtaaaaataaaatttacaagttttaatatatattacttttaaaactaaatcgtcccgcggtataccgcgggttaaaatctagttgctagtttattgttgattacaacgacattgagaaaataatcactcaccagctaatcaacaataaatgtaacaacatcaaaaagattgtaattcaagataatgattttttttcgtcagcaaatgaagattatacgttttgatgttatcataataataatagttatcactaataaaaaatttagatatgtaaaagctttagagaaacaagtatcataatcctaaattggatcctaaattaatatttcttatcttaatagagccaaagagtatttgatccatttggtagaaaataaatataactaaaaacgaataatctaaagacttaagtctttgtaagatccaaataatctatacgtggtagtagttatcctcacttaaatttttacagatcatgattcctattccatcattttatgtatatatatccgtgataggtttcatgatctgtaaatgtcactacagcccctataaatgtcactcttcacctgtccatttttttacacgacaacacttgcaaaagaaaagagcgataaatttgatgaaacatcttttagtctctacctaaa

SEQ ID NO: 10685 - DNA, 3000 bp, Unknown
  misc_feature (1)..( 3000): cDNA_ID_2716377_gDNA_ID_2213668_Annot_ID_132735 3000 nt of promoter + ATG
ttcagtggcttgagagtaaaactcaagagtttgagccaacatatctatataccatggaaaaggtaaacgttattctctctcaagaatgtaaagctcactagtggaaaatgctggagcatcttatcaaagaaagatgtgaaatgaggaattcttcggttgaacttctggttcggtctcacaattgtgttgttctttttccatatagggttacttcttgctgcctgatgaagcaaaatcacggcataacattcgcactgcaaatgtcagcatatcggcacggcatccctgctttggcaacaggtaatattcacgttattggccctcaatttggaaacagtgattttaattgctagagctgtatccttatgataagcttctaaaattggattactttttcaggtggcagcaacttcttataaacagagttgttggatatgatactattataatgaatagcttacagaactctgctggtcaaggtaggcagtaggtctttgtcttgttcataatgtccatgcaagttttgctatttgtgggtctcatcctttgaagcctgtaattcctcaactatgggtttgtcttttcttttgtattttgtgcggaaactgtttctttctgaaatgttaggctaccactaaaaagaggttgtctatttagcttattgtaactttaaactaagttatcctcggggaattctagtcgaatttcagtgtgcagcaatatattggttcatgcaagactttgcaaaatgtaaaataaccaatgtcgttgttggtagctgttacatgatatttccatctgtcgttgtcgctgctcatgtccctttgattgtttcttactttctatatgctattgtgaaagcgtcagtttgcactccatatgactgccaacttcctccattacaggttatctatacaactaccagacaagagaattttacaatctcagttactcccaagaacttcctgacggttctgcgcatttcggaggtttgtcattttctgtcacggaaacagcatatgttgaaaactttcccttgaatctcgcaagtctatcgattatgagcgttacgttggattggaagatcttaccttggctgctttattagctcttgcaacttttatctgtagtttggtgtaagcatttactttaagagtaatattttaatgccggtgtatgcagattacttggtgacgaaatgtggtgtcctaatgatgtcactttttgtgtttttcacaaccacaatgtctgtatcattcacattgcgagagacacaaactcgcatgttgaagtttacaggttagaatttcttctattccaatagcttatggtttccaatctttgcttctcaacaatcatctttgtttcgatatcactttgttgcagtgcagcttcaacaccatgcccagcatcggttaccaacatttcagttgatctttgtacacgtgatcgaatcgcttgtctttgtaccggtatgcatacataaccctggttcttttttattccaagatttcagaggattctcttaagcgacatgatataactatttgaaattgcagattatgattgggattttgttcttcctgtttgagttttacgacgatcagctattggcttttatggttctagttcttgtctggctttgcgaattattcaccctgataaggttttggtctcctcttttgcctcagtcacctgtatttccactatgaagctcttttgctcgtgataatctcactgccaagttaaagttttttttgtagctgttcaatggaataataacaaactcttatcctccatatattgcagtgtcaggacaccaatatcgatgaagttcttcccgcgtttcttcttgctgtacttcttggtgttccatatttatttcttctcatatgcatatggtaagagatgtggttttacgttatatttgtctcattaactactgaaactgcagacgcgttcacttactgcataactctccacaggtttttcttatctcgccctaatgacaaccgctgcattcatgcaacacttaattttatacttctggaaccgttttgaggtacgcgtttgattccaacaactcgaagattggccaaatccagagaagctaagcttcaattcaaagtttttatcacaaaattacaggtaccagctcttcagaggttccttcaaagccgacagtcacaccttcagcaacacccagactttcacatcacttcctcaacaatcctagcatcaactcttcacatcacaaggctgaacagaacaacaagaaaccgaactccgtctggtcctaaccacacaaccccaaaccaaaacacggaaacaagatcttttacagcggatggaggaggtgtcgggaatccggcacaatatcaagagcagcaagaagagaatgaagcaaacaccgttcctgcagagcctaacccacaacaagcaggcgcaatgagctcgttcagctcgatgcttctatggattttaggcggggcttcgtcagaaggacttaactcgtttctttcgatgtttagagatgtgagagatgaagatgaagcacaagtgtttgcagatactagtccacctcaaaacccgcatcatgatcctctttcagttgattaaagttttttttttctttgtttgctgtatattttgtatttttggcctctggtttttgttccttgtttgcttgtatagtcactggccaaaaacagactagcttttgaaatattaaggtgatcaaaaattggtaaagaagggagaaaaaaaaatgattctgaaaagcttttgagaaaatgtggtaaagtcataattttcgcaaaatactttttatcatttctatgtttttatatgttcctaaaatattaataaaaaaaaagaacaacaaatgtgatcagtagagtaagtagtaattacccaatcagagatacgagttatatatatgaggaggataaataaacttgtcaattttatatgaaccttctccagagttgtaaggacatg

SEQ ID NO: 10686 - DNA, 3000 bp, Unknown
  misc_feature (1)..( 3000): cDNA_ID_3037671_gDNA_ID_2213668_Annot_ID_182189 3000 nt of promoter + ATG
aaaggtcaacacaactaggaaacctttatagaatccttaaagggaaagtagaagggcgtgatcctaacgcaaaaaccggcagcggaagcggaagaaaagctggagccggaagcgctccagctggtggaaagcaaggaatggctgatgctcttgctgagatcacaaagaaatctgcatattttttgcaaatacaagccgatattgcaaagtacatgacgtcaataaatgagctgaagattgagatcactaagttccagactaaagacatgactgagcttcttagcttccaccgtcgcgtcgaatcagttcttgaaaacctaacagacgagtcacaggtctgcaacatttaaacatctttttaccatcactttcatatctaatatcctctgtttttgtgattcttgattgtgaaagtgttctaaaatttttaggttcttgcccgatgcgaagggtttccgcagaagaaactcgaagcaatgagaatggctgttgcattgtacacgaaactacacggtatgatcaccgagctacagaacatgaaaatagaacctcctttgaaccagcttcttgataaagtagaacgttacttcaccaaggtaactacaatactttatttaatatcttcactaagatcctaatttcaactacattttgtaacttaaatatccaaaactcaatgattaatcaaacagatcaaaggagacattgacactttggatcgaaccaaagatgaagaatcaaagaagttccagagccacaacatccactttgatttcaatatacttattcagatcaaagaaacaatggttgatatctcatcaaattgcatggaacttgcattgaaggtaactaactgctaatactattaaaacaactttccttttaactctttttgttgtacgaaatcttatcgtatcaacaatggattcacaggaaaagagagacgaaaagctcgtgtcccccgatgcaaagccgagtttgaagaagacagtaggatctgctaaaatgctttggcgggcatttcagtttgcattcaaagtctacacatttgcaggaggacacgacgatcgtgctgattctctaaccagagagttggctcatgagatccaaactgattctgatccgaacccatgatgattacatcattcagatcatcttcacaagttcccaactactactcctttttgctattttcaacagcgtaaaatattttcctaaaatgttcgatatcgaacaataaaagagtttatgtatatgtataagctttaacctattgtttttgacttttgaatgtgtataatttttgagtctccctcaaaaaaataggatttagaagtttcatgggagctcggagatacagaatcttttgagtgaaaaggctttaagaaccttttaagtcaagcaagaccttttgtgttgccacaatatgtaatattgttttgctgttatatattaaagtttttctttcttttaacttttatttgtaaactaaaatgtcttcatttagcaccttcaatgccacatcgaaatacacagatactattgtgtcactaaataatttcacatttttaataatcttcattcacatgtacatatataattatattctgccaaaatttaatttcataaaccaaattttatatttgtttacaaccaaagaaacgtgaatagagcaagaaccaaagaaacggcgatattgtggtcaaacaaccactctatctgataacaaaaacacgtccaacatgaattaataaatagtctcttatcatatcaattttcagttcctatataattaagtttcactttcttccttaatagctcttcaaaacactttttgtccaaactctctcttaaaaaatgaaggtctctcctcgtttgaactcagcccttctcctattgttcatgatccttgccacaggttcttaattcataccatcatgatacatctaaataaaaactcatgtcaacatgtaatcatctacataatatatttgcaagtctacataatatgatacatatggtatccgtcattgtattttggttaacatatttgatgtatgattatgcagaagcttgtggataagcccatattaattacatgttcgaataatctataacgtttaattaatgtcttgtagtgatgggtctggtcacggtagaggcacggacgtgtgaaacaagtagcaacttgttcaacggaccatgtctgagctcaagcaattgcgctaatgtttgccacaatgaaggtttttcagatggtgactgccgtggattccgtcgtcgctgtttgtgcaccagaccttgttgatagatgatctatttatatataatgaatatatattatcaaaaacttaataatcttttctatgttttctatctctttgatcattttctgacttttatcctagatatcgtttgcccttgaaacaacaataaggagatctaaaatctttaagcccttttggcttgagctttcgattatctaccaaggttaaacaatagtgccttttagttaccattttcaaatcttatgactttttatgtatccaattagattggacttacgcatccaatataaataaaacatgattatgtataatatcgcatttttctttgaataaccaatggtccatgagattttatcccgatattattgttagctaaaaaagtttatagtgaatttttcttaccactagagcacaaaaaagttgatttaccaactaaataaaattatctcttataatttcatttagcaataatcaaaataatattcgaaaagacaaaagagcatgtaaaaagcgtgcgaatggaaaacaaaaaattaataacacgtgtcctcttcgttcacaagtttcctctttccttagcacagtatgttttttgacttcttcgcgtcggcgatattatccagaaacagtagtgtcgaagaagaagaagaagaagaaggagagattctgagtttagggttttgtttgtgttgcttcgaattgagcagctatg

SEQ ID NO: 10687 - DNA, 3000 bp, Unknown
  misc_feature (1)..( 3000): cDNA_ID_2716365_gDNA_ID_2213668_Annot_ID_182185 3000 nt of promoter + ATG
attcttcaagatccactttttcggataatgatttttctgagaagaggaacaagagacccagaaacggtggtggagggtttggttcgaattcgactttgatggaggctcaagagttcggcgagttaattgagaatgaggacgaagttaacttcgctcttgatgggttgaagaaaggacataaagttaggatcagaagagctgctttgtcctctctactctcgatttgtgaatctcagtatcagcgacgctctttgagagctttagggtatgtttatttacttaagattttcagtatcttcctttctagactttctagggtttgtttgaagtcgagttcttttaaaagtttctgaattttgttatttcaggatctcacagtccataattgatgcgattttgggtctttgccttgatgacataccaagcaatcttgctgcagctacccttttctttgtgctaactactgatgtaagtaacttatttgcattgtgaaatctgcttgtgatgctcttttctcttgctccattggcatttttctcttgtttactagttttatgttcatgattctagggtcaagatgatcactttatggagtcacccaactccatcaagtttttggttaagctgttgagacctgtggtttctgccagtactaaagtaaagccgcggaatataggatctaggctcttatcaataatcaaggatgttgatgcagcacgtgatgcagccagtatgcatgatttaagctcctgtgatataattgacagagctcaggaaattcttgttaattgcaaggagttgagattgattgatagctataaaatcgagaggatgaggcctgagctaagtacgaaatgggtagctttgttggtgatggagaaggcgtgcttgtccaaaatctcttttgatggtactttaacttcctgtctgttttgctggaacaatgactagctaactatttaagacgcatctggtatattatattgagttatagaattggaaagttatgttatctgcttcagtgaatcagtttaacaaatgtgtcagcggtaatagaatcctacgaccagattataattgatttataaatttctaattattgatattatcattccccatccagatacctctggtactgtgaaaaaatctggaggaatgttcaaggagaaactgagagaacttggaggacttgatgctgtctttgatgttgttatggattgccacactgtaatggaggtgtgaacctgtatgttatagggatcttgctatatatgtctttatttggctaggacgtcaataacttgtgtaaagtgtcgtagattggtagctttataattgtttgctatcttcaggttcatgttttatttcaatctaatttattgctgaaaatcgttgcaagtcaaggttcttttcttgtccttgggcaagagaattctcttgtttgtgtaacacagtttaatgttattgtgactgcgtttgttgtggacaagttggatgtctgtcttagtggtggcaaagactctgtacttaagttgtcaatagttactggacctttgcaactgtatttaataagagtctctattgcatattttgtttgcagagctgggtgactcatgacacactctctgtcgaggatataaaagatgacttgaataagcagagtctgatgttacttctgaaatgtctaaaaatcatggagaatgctacattcctcagcacagaaaaccaggtaacttttatttattttggattcccagcctcatgatagcttgtattgaatagctctgcagtttgcacctaaaaaataactgtacataatatatctttcagattcatttgctcagacttaataaaagcatgggttctcatgaatcccgactgtctttcacagagctcatgataagtgtcatcaaaatactttcaggtacccattcctatatttggattttaccaccatgacttgcttcgtatgttatcatctcttatgctgatggctggttggaatgattacaccaggtcttcagttacgtgctcacaggaacgaaaagcatcctcaccctcagccacatctagcttctgctgttaagaagggctttgtgacaattattagttcagatacttgctctaccactggctttagctccataaaaagtttgagcgtatccaagagaaatcagtctgcattcctggtaggttgctcaacgacaccaaagccggggtctcaatcaagtgtaatgtcgacaattgatcactgcacgctgacgactacagctggttccaacactgggtcgtttgcaggcagattagcctcattgggtagtggcatttccagaagtaaaacaaggactagccaaactagagaatccagttgtaaaaaagttgaaaactttgcatccttcgaggatagtcaagatcctttttcatttgatttagaagattcaggaccttccagatgggcagtaggaaagcaaaagaaatctaaaggtcaaaagaggaagggaagctacagagataagaaagatgaacgctcgcttcagctcttctcgagccaggaggaatcaaaccatggtttaaattctcaggaggaatcaagtgatagagatcaccatgtaacagagcaaccttctttaacatatgacattgataaaggatgtctctgtcttttatctgattgccttttaacagccgtgaaggtaatgtacagtctttttaacaattacttttctgttatgtaacaaatttctgcagctggaatgaaaatatgtttggaccagaatggaatgtcaccttttatgctaatctgtttagatatgtgaggatatcatgtgatcttttgctacgttctgattctgttgaacatattttcaggtattaatgaacctaacaaatggtaattctgttggttgtcgggaagttgctgcctgcggaggactggagagcatggctgaattagttgttggacactttccttccttcaccagatctccgctttacagtcag

SEQ ID NO: 10688 - DNA, 3000 bp, Unknown
  misc_feature (1)..( 3000): cDNA_ID_3037686_gDNA_ID_2213668_Annot_ID_182181 3000 nt of promoter + ATG
atcatgccacttcaatgcaagctatgaagctttattgcaaagtgaaagatatgttagaaatgcttgattgtccattaccaattagtttcaaggatctcttacgccctgaatcatcccgaaccgagtttttcatcagcgcacttttgaactatggtctatacaagtatgtccttcatgctcttagttcttctctgtagtatctatttcgatgcaccaagaagttaaaatagagagttcttatttgtcccacttgatcttctttaatctttttttcgtaccagagactcgaaaatggatcttataagaccaaaggcagaagagttgggtctccttgatgagcagcgaaagcagtgtgaggcaaaggttgctcaggtaatgcaagaaaaatatgtatcccatagataagtcatttatctttttctaaaagctgtacatgcagttgaatgcagagattggagaatttgatgaagccgttgagagggacttaccttttgtccaagagctagaagcgaacattgaacaactgaataaaaaaatattggaactaaataatcagcagatgtcactgcgagctaccttccagaaaatgagagagaagagtacacagatggataacgaggtacgtaaccgcaggatatggtgtcgagctccttcctcaaactaaattgggttatttgtaatttattatgaagttggtgaagaaacaaattttgtttgtcaattaggtgatttgcatatgcttgaacttgagaggcgttttctgctcctgacatgtgtatttctctctacagatttccaaagcagagtttgatcttgtggaaactgtccaagaaaatgcaaacctccgctcacaaattgttcaatcaccggacaaattgcaggtatatttttattccaactagtactagtcctaagataaacttttggtatacactagtataaacgtttgttgtggagacagggagctttagaagagaagaaactagtacttggggaaacaaagaaagctgaacaatcagcaatggtaactttccaggaaaaggctgccattcttgaggtttttgaaaaggtatctaatgaaaactctagattgttactaaatcctgtcgcttagcaagtagctaaatgcatttacgacatttgcaacttaatggtcactgcggatactgctctcaaaccagtttttagagaaggatatttcaagtcattattcttctaagtttggtgtgtttattgctctatcacttttgttcatacttcatgaaattctgtccagaagctttaggaagaacttcttttattttgttgtatagtggatgagaatgatcccaagatggaaaatattagattgagaccttattctgtgttgttacttcaaaattttcttatgttttgtcttgcaacagttttatgctttatttttgagtcgaataagttttgctttaatattgaggtaataaagtttattcaactatggttgccttttgcaggccttgaagaaaattttaaagtcatcttcgcaactgcagttaataaacgaacaggtgaccaagcaaaaaaactcctttcctctttcattgcttatagattgtgaaccatgtattgtatctctagcatgtggcaacacacagatccttccaattattggaatgagatctaatgtgtctttagatttatctttcatttttatgtatatttgatgatgttacaggtaaccaatgcgaaaacggttgagaaagaattcaaagctcttaaagataagctgagtgaggatggggtagcatacaaatcacttgaggcgaaagtggttgagcgggaaagaataggcaagtgttggtttatttcttccttcttcagatattgtttctgaattttgttttgggacggagactgtaatcatctcttctgtcaacagtggaacagttgaacgaatcattgaaacaactagagaaagaaaaagcagtcatgtttgatgattggacgaaacagttgaatgaattaaaagtggaggttgaatccagaagacgtgaacttgaaaccaggcaaacgaatgttgaatcagtagtagctatggtattgcttcctttctatcgaacatctaacaacgtgaatctgttgtgcacgatgctttatcatctccgtaagttttatttgtttatatatcaacaggttgatgacaatactgcgaagactaaccaggtgagacagtcaggagaagctaaagttaaaaaactagccgctaaatatgaagagatcgtgaagcaggtttatttcgtttccattatttttatctgctaatatattgaaccatggaaacaaaagctttgtggtgcatcaagttaaagaggtttccaaagttaaaaagctactagggttcttccagattctctgtaagacatattagtgagccttgcttttgatatttgcagtttcatgaatacacggtgtcgtttgatgcgtttctaccaagcctctaaaggacaaggaaggtctgattcatctaaattaaggtagacgagagattgtaatgagcacattttctctgcaaatggttaagaatttgactactaaattcctcttgtgattgtattaaagttggaaaatgttatgaatttctcttcatggaaatggcatgtattgaagtagtttataaaagaatgttaacagaaaaaaaatgaagagaaaatgagagctttatggttgtgttgaaggaatcgaactcttgtcctggaagcaaaagaatcctatcgctttcccaattgcgccactctcactagggatttttgaagaaaaataaaaacaatttaacagcaaacaaagtgtaaaatttgcttcgcggtgcttttcttttcaatcatcttcactcttcaatttctgtggattcgacaatctcccagaacgagaagaaatctacgatcctcgcaacggagcaattcaaattcgatgactacgtagtgttaacgaagaagacgaaaaagtgcatcggagatccgaaatatg

SEQ ID NO: 10689 - DNA, 3000 bp, Unknown; identical to SEQ ID NO: 10684
  misc_feature (1)..( 3000): cDNA_ID_2716381_gDNA_ID_2213668_Annot_ID_182174 3000 nt of promoter + ATG

SEQ ID NO: 10690 - DNA, 3000 bp, Unknown
  misc_feature (1)..( 3000): cDNA_ID_3037708_gDNA_ID_2213668_Annot_ID_182173 3000 nt of promoter + ATG
ttaagtgaggataactactaccacgtatagattatttggatcttacaaagacttaagtctttagattattcgtttttagttatatttattttctaccaaatggatcaaatactctttggctctattaagataagaaatattaatttaggatccaatttaggattatgatacttgtttctctaaagcttttacatatctaaattttttattagtgataactattattattatgataacatcaaaacgtataatcttcatttgctgacgaaaaaaaatcattatcttgaattacaatctttttgatgttgttacatttattgttgattagctggtgagtgattattttctcaatgtcgttgtaatcaacaataaactagcaactagattttaacccgcggtataccgcgggacgatttagttttaaaagtaatatatattaaaacttgtaaattttatttttacaaaatatttatattttacagtttataattgttattaagtaacgctataccacgaattcatgagacaattggtaaaaaactgaagttttgacccctattaaaacagcatattaataatattttaaaattttataaatattgattcaaatacatccaccatataactcaattccaaaataaaacacgttctgtaatttctttacccgtcccatgattttttttaaaagtagtaatttttaaaattttagaattattttttatatataaaagttttgcaaattgtatcattctctaatacatttatattttatagtttaattttatatatagtaacattatacataccacataacatttttggttttatataattttttctaaattaggatgatttgatatgtttaatattagtggtcttaaaaaatcataaattaaagattaaacccatattgaaacggtggattaattatattttatttttttattaatgttgattcaaaaacctgtccctccaaatccgtcttgccaaaaagtcatttattttattaatattagttttattaatgatatgactctaaattataatctaaacattttagctaataacataggagtgcaccatatttatttaataggggaatgtaccatatgacccgaatgcatttttacccaaatccaccaaaaaagtcttgtaaaaatactatagagataagaaacgatagtcggttttgataataagattagcaaatatattagttagcttaaattagttaaagaatacaaattaaaaaggtatattacactttattcaaatatagtatcaaaacttatataacacagagatttggtaattttttaattgttgaatacttttttttgtgctaattttatgtgattaagatttaattgatttcatatataaaatattaaattgacttatttgtttataatttggtaacagatagatatttgaatattcagtatattttgcttcagtttagaaaatctttgatgacccgtctttagatccaataagtcctataatctagagattaatctgcagtataccgcaggtaggcttatattttagttaaactaaaaacttttattgtaaagatgatttaaaaatatatgatattattttatttgattttaaatgtatagtaaatatgagttgtatatgttttgttgatattatctatattgtttagtgtttaagattatagattatacacttgtagtttgattgttaatttaagagtttcacatgtagtatatcatcttgtattaatatcgatctaaacccgtcaattctaggattttccagcttgtattaaaaattgaatcacatctgatatgttattaactattgtagtatataagattataaattttcaatataatatgtatgaaattgaatataaatatttcaaatttatgtcccgttactcagtagaaagttttcttaaatctatttttcacccgttacaatattatttcatgtattgaacagtttatattcgtttttaaaaattcaaattatggcatatgcgaaaaaactctaattatttttttataatgatgatattatttttccgtaaaaatagaatcatataaagatgagaagtgaacaataataattaataaaaaattaatatgataatttagataccaaatatagtttgttgattttaattggttactttttttagaaattaataatgtatttcgtttttctaattaaattaaattaattaaaatttagatatcaaatcttatatgttgattttaattggctattatttttggaaattgataatatatttcgttttttaattaatttaattaattaaattagtatttgactttttaatccttaaagagataaattaatttactttttaaaattttatttctaatggcatacctatataattacttacaaaaattaaggttacatttaaaatgtattttccaaataatatagtaggattagaagtggtcacaggtccgtttgtaattgcttgatttttcttaattaccaaaaaagaactaatttatcataaataacttaggcgggcctgtggaggcacatgcttgggctgacagagtttcggatgattaagccgggtcgagtaagacccgttttaatgttcccaagatccacacggcccaagagaagagtgtaccaaatattacccaaatctcggtccggactgaatcaggaaccggtttagagaaaaccagacagagtaatgacatctggaaactctggattcttcgcttccaatgtcaagttgactgatgtcacaagaaaaacaaatcaaagttgaccagaaaaagaaaaagcaactaattaattacataattaagagagaaaaaaaagagagagtgttttagtaaaagaaaattaatattcctgaaaatatgaatttgccaatttgtaacgttttctgaaaatttcctctgccaaagtccaaaggagagtttttctttattactagggcattctctgcagatttcttctccttaagccatg

SEQ ID NO: 10691 - DNA, 3000 bp, Unknown; identical to SEQ ID NO: 10681
  misc_feature (1)..( 3000): cDNA_ID_3438598_gDNA_ID_2213668_Annot_ID_182167 3000 nt of promoter + ATG

SEQ ID NO: 10692 - DNA, 3000 bp, Unknown; identical to SEQ ID NO: 10680
  misc_feature (1)..( 3000): cDNA_ID_4265991_gDNA_ID_2213668_Annot_ID_182163 3000 nt of promoter + ATG

SEQ ID NO: 10693 - DNA, 3000 bp, Unknown
  misc_feature (1)..( 3000): cDNA_ID_2716373_gDNA_ID_2213668_Annot_ID_132736 3000 nt of promoter + ATG
atgtgttgatgcttttggttgcagctttcatatagatcatgcagcatctctaccttattttctggagaaggtttgtttctcttttcaaaatgattttgttttttgggatgtgttaaaacatagctgagaactaattcaggttattgatgttttgatcagacgacattcaatgggcgggttttcatgacacatgcaacaaaggccatctacaagctgttgcttacagattatgtaaaagtgagcaaagtgtctgtggaagatatgttgttcgatgaacaagacatcaacaagtctatggacaaaattgaggttagtactgcattatattctatgactatgtttatactttgactgctccactaggtttgggataagttcaaaagaaattaaatctgcttcaaaactgtgattgttgagttaaggtttatatttgatttcctctataggtaattgacttccatcaaacagttgaagtgaatggcataaagttctggtgttacacggcaggccatgttttgggtgcagccatgtttatggtggatatagctggtgtccgaatcctctatacaggcgactattcccgtgaggaagaccgacatctgagagcagctgagcttcctcaattctcccctgacatatgcatcattgaatccacttctggtgtccagcttcatcaatctcgtcatattcgtgagaaacgcttcactgatgtaatccattcaacggttgctcagggtggacgtgtgctgatcccggcttttgcactgggccgtgctcaggaacttctcttgattcttgatgaatactgggcgaaccacccagatctacacaatatcccaatctactatgcatcaccactcgccaaaaagtgtatggcggtttaccaaacctacatattatctatgaacgacagaatccgcaaccagtttgcaaattctaatccgtttgtgttcaagcacatttctccattaaacagcatcgatgattttaatgatgtcggtccatctgtggtaatggctactcctggaggtcttcaaagcggtctctcaaggcaactctttgacagctggtgttcagataagaagaatgcttgtatcataccaggttatatggtggaaggtacactggccaagacgataattaatgaaccaaaggaggtgactcttatgaatggtcttactgctccgctcaacatgcaagtgcactatatatcgttctctgctcatgcagattacgcgcagacgagcacgttcttgaaagagctcatgcctcctaacatcatccttgttcacggtgaagctaacgagatgatgaggctcaaacagaagctcttaacagagtttcctgatggaaacacaaagatcatgaccccgaagaactgtgagtcagtggaaatgtattttaattctgagaaattggcgaaaaccattgggagattggcggaaaagacacctgatgttggcgatacagtaagcgggattctggtgaagaaagggttcacttatcagataatggcacctgacgaactccatgttttctcacagctatcaacagcaactgtaactcagcgaattacaatcccgtttgtaggagcttttggtgtgataaaacatcgcctggagaagattttcgagagcgtggaattttcaacagatgaggaatcggggcttccagcactgaaagttcatgaaagagtaacggtgaaacaagagtcagagaagcacatctcacttcagtggtcatcagatccaataagtgacatggtttcagactccattgtagctctgattctcaacatcagccgagaagtccccaagatcgttatggaagaagaagatgctgtgaaatccgaggaagagaacgggaagaaagttgagaaagtgatatacgcacttcttgtttcgcttttcggggatgtgaaactaggagaaaacgggaaactggtgattagggtcgatggcaatgtcgctcagctggataaagagagtggagaggtagagagtgagcattcaggtcttaaggaaagagtgagagtagcttttgagcggattcagagcgctgtgaaaccaatccctctctcagcttcttagtagctttttaaagtcatcgttgaggtatcttaaatcatcatagagttttatccatctgatgatgtttctgttcccatgtttagtaatagtgaatgatcaagtctaatggatgttatttaagaaggtgtttattgagaaactttgctactaccctactgtgataatgatcaagtcttatggatgttatcaactatgagtttttaacttttttaggttttttcataaatcattttgctgattcgtgcttttcccatatgcatttttctatcattatgctgatctaggatatggaagcaaaagctttgtggtgcatcaagttaagaggtttctaaagttaaaaaagtactaggcttcttccagattctttgtaagacatattagtgagccttgcttttgatatttgcagtttcatgaatacacggtgtcgtttgatgcgtttctaccaagcctctaaagtacaaggcaggtctgattgagctaaagtaaggtagaagagagattgtaatgagcacattttctattatttttccacgtacaaagtatacattattcacatcagtgaatgtctcttgacctctatgttttggcaagatgtctagtgcatcaagatattaagaccaaatctctacaatattaaaatgcttaatttttttttttgtagattaaagtttcttttttaattttatttataaaagcttctacgttctaccgtatccaaatatgcatcaatatctgcagagactgcagtttcatataggcgggaaaagcaaatgcaaaaaacaaatcgaacctgacccaactaaaatcaaaggctctcttttttttttttcatttctttccaaattgtcattttcagtttcttcgaatccagacacaacaaatccgaacctgaccaaaactgaaaactatg

SEQ ID NO: 10694 - DNA, 3000 bp, Unknown
  misc_feature (1)..( 3000): cDNA_ID_2716365_gDNA_ID_2213668_Annot_ID_132738 3000 nt of promoter + ATG
agggattggtttcacagcgctctgaatccgctcaaaagctactctcactctttccttaagacctgaatgctcactctctacctctccactctctttatccagctgagcgacattgccatcgaccctaatcaccagtttcccgttttctcctagtttcacatccccgaaaagcgaaacaagaagtgcgtatatcactttctcaactttcttcccgttctcttcctcggatttcacagcatcttcttcttccataacgatcttggggacttctcggctgatgttgagaatcagagctacaatggagtctgaaaccatgtcacttattggatctgatgaccactgaagtgagatgtgcttctctgactcttgtttcaccgttactctttcatgaactttcagtgctggaagccccgattcctcatctgttgaaaattccacgctctcgaaaatcttctccaggcgatgttttatcacaccaaaagctcctacaaacgggattgtaattcgctgagttacagttgctgttgatagctgtgagaaaacatggagttcgtcaggtgccattatctgataagtgaaccctttcttcaccagaatcccgcttactgtatcgccaacatcaggtgtcttttccgccaatctcccaatggttttcgccaatttctcagaattaaaatacatttccactgactcacagttcttcggggtcatgatctttgtgtttccatcaggaaactctgttaagagcttctgtttgagcctcatcatctcgttagcttcaccgtgaacaaggatgatgttaggaggcatgagctctttcaagaacgtgctcgtctgcgcgtaatctgcatgagcagagaacgatatatagtgcacttgcatgttgagcggagcagtaagaccattcataagagtcacctcctttggttcattaattatcgtcttggccagtgtaccttccaccatataacctggtatgatacaagcattcttcttatctgaacaccagctgtcaaagagttgccttgagagaccgctttgaagacctccaggagtagccattaccacagatggaccgacatcattaaaatcatcgatgctgtttaatggagaaatgtgcttgaacacaaacggattagaatttgcaaactggttgcggattctgtcgttcatagataatatgtaggtttggtaaaccgccatacactttttggcgagtggtgatgcatagtagattgggatattgtgtagatctgggtggttcgcccagtattcatcaagaatcaagagaagttcctgagcacggcccagtgcaaaagccgggatcagcacacgtccaccctgagcaaccgttgaatggattacatcagtgaagcgtttctcacgaatatgacgagattgatgaagctggacaccagaagtggattcaatgatgcatatgtcaggggagaattgaggaagctcagctgctctcagatgtcggtcttcctcacgggaatagtcgcctgtatagaggattcggacaccagctatatccaccataaacatggctgcacccaaaacatggcctgccgtgtaacaccagaactttatgccattcacttcaactgtttgatggaagtcaattacctatagaggaaatcaaatataaaccttaactcaacaatcacagttttgaagcagatttaatttcttttgaacttatcccaaacctagtggagcagtcaaagtataaacatagtcatagaatataatgcagtactaacctcaattttgtccatagacttgttgatgtcttgttcatcgaacaacatatcttccacagacactttgctcacttttacataatctgtaagcaacagcttgtagatggcctttgttgcatgtgtcatgaaaacccgcccattgaatgtcgtctgatcaaaacatcaataacctgaattagttctcagctatgttttaacacatcccaaaaaacaaaatcattttgaaaagagaaacaaaccttctccagaaaataaggtagagatgctgcatgatctatatgaaagctgcaaccaaaagcatcaacacattatatgttatcttaacccaataaacctcttacacaaaacacaaactctttcaagtagacaaacagagacagaacaaactctagcctcctacaagcttgaactaattaatccaagaaggtctctctactacacatcatccttctgtttttgtataaacaaacttaaacttcgaagattttgctcaaattatcattctattcaaatcaagactatcattttctcttcaaagtttcaatttttcttaatgggtattagccaaaagaggaagaagaaggaaacatactgagtaatcaagaggacatcaatggaagaaggatcaatctcatcgaagtaaggcaacgcagccatgcccgagtacgcaggatgaatcccacaatcaaactgcacaacacaaccaaaatcaactataagacatgccccaacaacaaaatcaaaacacatttgcttgattagaacaaaacggagaagctgaccagaatatttttgcctcggaaggacatgtaaacacaggaacgacccacttcacttccggctcctaacggagtaacgataagttgatctccatctcgcgaaattggttgctctcttcttttcagagaagtagaagaagaagccatgtttcgtctttctcgattttcctccaagagaagaagaaactcaaagaactgagtacagcaatttcagttagtgtatatcttcaaaccctaaaagcctttaaaaaaaaaaaaacgaccacagtgggagtcgaacccacgaccttctgatccgaagtcagacgcgctaatccactgcgctatgcggtcaatacatagcaattgaaaatattatatttatatagaaagtcatattatataccgaaaatacccttgtcttattttgtcactcaaatctgcgaacgaagagaaaattcgaagctttctcggcg

SEQ ID NO: 10695 - DNA, 3000 bp, Unknown
  misc_feature (1)..( 3000): cDNA_ID_2716346_gDNA_ID_2213668_Annot_ID_132743 3000 nt of promoter + ATG
ttgtgatctgcggatgatctgtctgagggcatttgtgatattatctgaaatcttgaaagtggatagacttttgttgactctctatagtgttacttagaataaatccattttttgttggtgtgattgtagatgagaccagaaactcgcgagatcattgagatgcagctgctcccggctatgaagttggttaaggaaaggctcgagagggaagtagagaaacaaagcatggatgagtttatgttctgcttcgaaaactgctacactgagaaggaaactgagatgcacgtgacccgcaagttcccttctttaaaacaatcggatgtgggaattggctttcagacgtttataggcttgatcgataaagagtcctcaagagaggcgtatctcaaggatgctgaagattgtgctaatgtaagaaggatagaggcacgtcaaggtgaggccagtacatctcacaaatgtgaacctaactgcaacaaacattaaattaatactatgatcaaaggatacgttttctagatctatatacaacaaataagagtgggtattgtgttccttatacaacaaaaaccacgtttatgttttccctttgtttataggagttgtactccctttaagttccctttgtttaggaactggtctttgtgattccaaaataaaaaatagtattatgaaaaacaataaataaattttatctatttgatgcatattgttgaatttgcaattttattgagcctgttttctggaaatgtatggaattcttgttttgaatgttatgtaaatgttatggttgatcattttattcggaaattaattgattacaacatcaagagacccacttgaggtgcctgtgttttcttttcgtcaagttcttatggaaccattcctgtgtgttttgtttatgtaaaagtcctaaaactaaattgaatcctaatctcagcgaataacacaaaagaccaagatatgatttctcacctcattacatgacacctatgttgtgaagccaattttctcagaaacaattccttgctagaaaagcaaaacaaatcttaccattgtccattggtactgaaataaataagcagtaacctggaccattggaacaacaaagagtgcttgaaaatcacaaccatgcatgcatatcggatttaaaagcctgttcaaccggttttctcttcggatttgggttagtttctccgttttcttaaacttagtattagtggttttttttgggcctattacaaagattaagtgtactccatctcttagccggaagttgattttatctcgtgttgtaaaagtctaatccacaccgcgtttaactatatttgaattgttcacctaatgaaacttatgccatttatattttgatgcatgaattttatatatgccatttatatagaaattggatgcatgaatcatatagataatatcccgtatctacttgtaaagtttgactagcattaagcaaaaaagcttataatatattaccatgtaataccatattaaaaagattattaaaaaccacaactggactgttttttcacaaaacatatgtcatgaattgatgcaaccaacatagactatgtcttagcacatttaacaaaaagaatcgtatactattgggtcgaacaaaagtaaaactataaaaaaaacatagtagaactattacagcatttatttttctttctttattgcatcatttaatcatcagtagaaccataattcattaatttaacaaaaaatatttccgtcgaaacaatatatattctacaagatttgaatgtgaatagtgtcacacaatgacaacattaagattccttttgaatttttcttgttaagaaactttgtaatttcctgtatatataaataaaatttattttccaaaaatatgaaatttttgaggtagtcattagttgtgtttaaaccaactttaccacttatatagtagttatatatattttaacataaaaacaaactaattcaaagaaatgtttacaattgtgcatgtaagattatgtatatgagttattggtagattagtatcctttattgcacattcatactgtatataattcgtgaaaagaagagtttgatcatgtatttatatcacggattatggccagtgtataaaaagagtttgattattgacttattgtgtgactattcaagaaaattttatttacttaaaggcactggtctgtttttgtctgtaaacaagaatttcactgtctcaccacagctacgtacaaaatcttcgaaagaggtatgtgatattgtatacaatttaatttctctggttaaagtttattttgaatgttgttttctatttttctcaaaaaaatatctcaaaaatattactcatatggcatatatatttttagtatatatattttattactaacacccgcagattgtgcataagatggcatcatatattttctgtgtattaccaagaaagataatatgtttttttttctgttatgatttaatcgaaatagaaaaaggtttaatctttcaagtaaaaggtgtaacaataaaacaagatatgagagaaaaagaattatatcgttttaaactactttcccaaaaaattataattagtaattacacaggtgagaaaaaaataacagaaaaaagtttaactaaaaaaaggacagataggttttagtaaggggttagagaaatttgcccataaaaaagacagattcaacattagttttcctttggctctctctttcttgagaaagttccataagtcctgaatctcaaaaccctaataagatttgctctgcacgattctgaattctacgattgtgatgttattctttattaatttcttcagctgtaaggctttgaacaagtctgtaaatattcattttttattttgaatttttcaacagaaataccaaaaaaatagtttattttttgacattataaagccggagtcgccggcaattaatgacagccggaggctgttttggtattcaaacaacaatg

SEQ ID NO: 10696 - DNA, 3000 bp, Unknown
  misc_feature (1)..( 3000): cDNA_ID_3037797_gDNA_ID_2213669_Annot_ID_132745 3000 nt of promoter + ATG
gctccatctgtcagaattcttacctttccaaaagaatagtacacttccttcaagagttctcagctggttgctaaaggcagagccaatggatactcgacttcccgttgtaattatgcaggaatgcttcacaatttacataaggaggcaggtagggtgatgtaatcttcaacattgctgcttgtgcctatggcatgcatactcttgttaccttctgaaagttgtgtatgttttaggtggactacattggcaaagtgattttgtcaaaactaatgaatgactggaaattgatgcacgaacttgctgtattgcgcgccatttacttgctaggttcaggtgcgttttatgtgctcaactgttttggcaatatggttgtatctgaaatcttaataaccccttaaaactttcaggggacctgctgcagcattttctgactgtcattttcgataggctgggcaagggagagtcatcaaatgatgattttgagttgaacataatacttcaggtaaccaggtttggtgtatttttaagagacactgctctcatctttatagttgttatcacttctaaaatgattccgcttgttaattgtttgcttatgtatccgtgttctgttgccgtatatgtgttcatacaccaaacttatttctaaagtgtaatggtcttctacaggaatcaattagaaattcagctgatgccatgctgttaagcagtcctgattcattggtggtatctatttccagagaagacagagacaaagatgataagggtgacataatacccctttcttcaactcgtaaaagccgcgttaacagctttggaatagattgtctcgagtctctcaaattcacatacaaggtctagagaaacaacttagtcttccatccaatccgtactggtatatctcataggccacatctatgtgtatttgaagagctgaactgttttcttttttaaggtgccatggccacttgagcttattgccaatagtgaggccattaagaagtataaccaggtaaccctttctcatccagctatttttgtggtaaacagtttgttgttcctctatgtggtaattatttaattgaaaacaggtgatgggatttttgttgaaggtcaagcgagcaaaatatgtgcttgataaagcacgaaggtggatgtggaaggtctttgatatctctcaaactcatttctttcttcttagactgtatcccgtgacttccaaatccagtttgaaagagcctaatcagtcttttgatctatacatataaatataaagggaatcataagaatgtggttcagtttgataaacttgatgactttggtgtttgtgtatgatagggtaaaggctctgcaacaaaaatccgcaagcaccactggttactagaacaaaagctcctcaactttgtggatgcttttcatcaatacgtaatggacagggtattgtccaatgctaaatgattggttataattacagtatcatttttcgttggagtaatataagtttgtgctagagttgtggcaaaatcgaaagctgatcacatggcttgagtaagatgaaaagcttgccatgcttaactgtattttgtaagcaggtatatcacactgcgtggcgtgaactgtgtgaagcgatggtaaaagcagggtctctggatgaggtcatatatgtacatgaaacctacttgttatcgattcagcggcaatgctttgtggttcaagaaaagctggtaatggaccatgaaggcattaagcgacctcttaaaatgcatagtatatatttgaagttgtaggcttctaaaaacctagtgtttggtggtttttgtatagtgggcaatcatcgcaagtcggatcaacatgattctcggtttagctctagaattctactcaatacaacagacactgagcagcggtggagcagtttcagccatcaaggctagatgcgaaatggaaatagaccgtatagagaaacaatttgaggactgtattgctttccttctcagagtaagtaaatcgaaaactgtgtacttgttgtattgtgaagctatatataattgattaatgcttaatgggggatggaacttgcaggtattatcttcgaagctgaatgtgggacacttccctcatttggctgatttggtgaccagaatcaattacaattatcactacatgtcagatactggaagcttgatgactacttctggagcagagaccaactcatccagaccttggactgccaaatctgatgtatgaatggaccgggaaattatcgcaatgttggattgtcgcaacactatcacacgtaattgttcaagcctcatgcttttcttgtgtctggtatctaatttcctgattatgtattttctgtttataaaagttcactgttttgaattagacattgtacaaaactgctatcaaggtttaaaaaaaaaaaaacattgttaacattcttaacaagaaatcatcaaagtttaaaatctaatcgtgaccctactatgcatagtacatatattaagcattaaccaatacgacaaaagaaaaaaaaaagcattaaccaaaaacaaaaagacgataattaaggttataggttatgagtttattacgaaaagcccatttatggatgcaattaagcaaaccttgttggaggacaaaatggtcaaaagaaagaaaacgtaaaaccctaaaacatttctttaacactcgacttgtctcataaaccctttgtgtttgtagtctctctactctctagatcccatcccatttcttgatcagcctcgcgcattgtgtgcttacacgtaatcctctagcttctttcctcggtattccttgtctaattcgaacttctctctttttttttctgggtccgatcgtttcagtgaaaggcgtaacctttccttcgaatctgatagcattgcaaaatgataatgttagtctgatttttgttgggtgtgtgtcttttgattgaaagagcaggtaatttccagagagattttcaacagaggaagc

SEQ ID NO: 10697 - DNA, 3000 bp, Unknown
  misc_feature (1)..( 3000): cDNA_ID_4268500_gDNA_ID_2213669_Annot_ID_132746 3000 nt of promoter + ATG
tgaacagtgtatatccactctttcccctgcaaatcgaaaccgtgtgacctcacaaacgttcctacaaggcgatcaggattcgacttccacactgaaaacgcaaactccaacgatctctggtcaatctcgacgtcatcatcacatatcaaaacagcacgagtgtctacagaggaacgagggaggaatctagcgttgaggctgctcgaagattgctgaattagagagatggaagcagaaccaggcgaatactgagtcagattctgatacaactggtcaagtagttgatcaggtgtgctagggttaccccataggactaagatggaggatacgatcgaggatgaagaataagaggccacgatggtttgcagaagaggaatccggtattctgagtaaccattgattagaacggtgatctgatccgatctgagtttttgaaattctctctggttcgttgcatcacatggatctggatcccctgagagcgtgcgacaaaacacgagatccgtaacaacgaaaaggaaccagatagagaacctcaccgatttgactcccatatcagcctaactatcctatcagttagttccgatttgatcgataaaacagagaagagcgatggatgtagcattcgaggatggatcgcaatttcgtttcctataagcgtgcgtgtgtctatgtcaacaaacaggcaaagagaaaattacctcggaagctgatggcattccggcatcagaatctccgtctagagatttggaattccgattgactagttggagttgaccatcatcttcggcggttagaggctaattaacggctcacatagtcacatgaagctaaagtgaatcataaatgcaagtgggtgggttttcactaataaagccctataagaattatgtaactaagcccaatatagtttgaaatacaagcaaagcccaatagagtttgaaaaacaaacgtagcccatacatctttcttggtatgttacggcttatggcgtaaaagaaaaacatttaactaacaaaacgggtgagataggtgagaggctactactatatacgtagtgtctagtttagttataaggccagcacagcacaacacacttataccgacaaaacatgtgtgtcatttaactcgatgacaaagcacagaaacaagttggtcgtttattttaagcaaagtcataggtacactgtctaattaataaactaatctttgagatttcaagcacaaaacaaatattcaatatcaacaagtcatgacagaatcctctgcctaggattccattgtagatagaaacggagacaaaaaacaaacgaatgaatattgagatctagttaataaccttttgccccaaggaaaaaaagatctaaaataaaaacatagataggtaaaagagggagtgagagatgcatgaaagtgagtaaatggtggggaatcgaagaggggcttgtacatcggggcagctttagatgcggcagcaggtaaggtcccatgtgagctgctcaaaccgtgaaagtgcagagagtggaattgggacccatgcacgtgatctttgctctttttcagttggtagtttgccttttatatatgcaatctctctctctctatatatatatatatatctataagtgtgttgtgtttcatgcatttggtttgcctctagggtcaacaaaactaaagcacctatatcatcaacccttcttcaatcaactagctaggcatgtgatttgattattagatcacactgatctttgtgacttgaatcaagtgacattttggtcggataacataaaattggtttctagttacaacaagatagtttggtgatacttattaagttgtttttgcaaataattaacatgtgaaaagcgataaaattaatggatggcccatattgttaatttaagatatagacagtgattggggaaaagatgaggaatgtagggactgctgtgtaaataaaaatggtcccgacaagaatcttcaagaaaaaacctcacgaaatccaagtttgaaagttaacggtcacaaaataattaaaaaaaagaaaaggaaagaaacagcctcgttcgtcccgctatccgttgtcactgttacagtacttctctataggggtataaccgtcatctcggttgtttctttctttatttttcttatactcagatacaaaaattgctgaaattacttttatagaggaaaaaatgcatgtcttattatagggtaaaaacaagcctgtcatgaacgtattatttctgtttataactttatagaaaatatttttactctttaaagaaacattatttccatgaatgtaagcaaaactactaattttaatagataatacagctaagtaatagtcgcatttcccttttttcttctaatataaagggtatatatatattaggccaattaagacttttctggtaaatggtaactgataggcccaagcagaatcgtgcaaaaaatattcgtaaaaaaagaatttaataaataaatattcgtaataatactacatatgattattataatttatgtactactactgtatgtgtttgaaagagagaaaagaaacgttgtagagaaaaaaaggagcagaagaaaacggaggtttttgtttaatttccggatcgtccaaaagtttctcttttttttctcttccttcattgtttcgctgttcctgcgattctgaaactcctcaagctttccattcagaatcgtagcaatggcttttcctctttgattttgtttttgatccgtctctctctctctctctcattgcgtttaaggggtcgctttttttcctcttcatcctcgccgccggcttatggccaactcgccaccaccttcgtcgcgaaatcctccgaagttgttggtggattgttggtcgtttccgtttcttctctctatggttcctactccctcataatttaaggatctgtatcggaataaccgaaacgatctccggtttcggatttgaatattttgggggaaattaaaagaatg

SEQ ID NO: 10698 - DNA, 3000 bp, Unknown
  misc_feature (1)..( 3000): cDNA_ID_2716442_gDNA_ID_2213669_Annot_ID_132748 3000 nt of promoter + ATG
ttcctccctcgttcctctgtagacactcgtgctgttttgatatgtgatgatgacgtcgagattgaccagagatcgttggagtttgcgttttcagtgtggaagtcgaatcctgatcgccttgtaggaacgtttgtgaggtcacacggtttcgatttgcaggggaaagagtggatatacactgttcatccagataaatactcgattgtgttgaccaagttcatgatgatgaaacaggattatctgtttgagtatagctgcaagggaggtgtggagatggaggagatgaggatgattgtggaccaaatgcgtaactgcgaggatatactgatgaattttgtagctgcagataggttaagggcagggccaatcatggttggagctgagagagttagggattggggagatgcgcgtaacgaagaagtagaagagagagtaagagacgtgggattgagcagtagaagagtggaacataggaagagaagagggaattgcattagggagtttcatagagttatggggaagatgccattgatgtatagttatggtaaagttgtcaactctgttggggaacaaggattgtgtcgtaaagccggcaaacttgtcttttgtgatcgagattgaccgttttttttttgtgtgtgtgtcaaaatatcgacactaataggatgtgtaagctcatcatcgtgtaatagaaattggcaactagcagcaagttaacaacatggaaaccaagttttgaaccaagcagtaaaaagtgtaaatttgagtttcgctaaaagaagaagctgggcttcgagaatattgtccgtttgtattgtaaatgggccttacaaactatacaggccgcattaacaaaatggaatttcaaattatgaaccaaactcaaattacgaaaatcgtaactaggattttgtttttttttaatataaacatagattgaaaagagatgtattagtctttttcgaaatggtaaatttgtagcgtgtgggcgttactcactatgtgatcatttttgtataaaaggaaacaggaagcttaataataagttcaaaaatggcgtggcaaaggcggagccgtcggaggatttttagtttacgagaaaaaaagaaaaagagagaaatatctgaaaaatacgggaaagatgcaggcagctgtcacagccgcaggtaaagagaaggtgtgtgacgtgtctcaataaaacaccgtttctctctataacacgattctgtcattatgtgtctgagcaaaagtgcctccttatttacatctctagaaccgtttactattggccacgtggaagatatcggtaccgttgcgttgttaaaaagggttactagtactcctcgtgaaatgatttggtcccacttcacaagtgttaatgtttctataagaaaaaaaagagaataaagaaagacagaatcgagaggagagagtatcggatcttcctaagccataaacaatgcagcaatacgctccatgcctttggatatttcttcggcaacttgtaaaactgacaatcggagccgtctctttcatcccacggctctcaattatcctctcgaccatatatatcatcgacaacgtgtatatatgtgtttaccaaattatgttttttattttatttttcaaaaaattgcactattaggtggacctacatatgggttcgattcgactccaataaacaagctaatgatgccgcccgatgaccattcaaatattgttggtagtggctttctcctaaatatttgcattttcttaaaagaccctctttgaaaaaatcataattgaaacacgacgtatcacctacatgcacctcttgaaaaatatttccattttattctcaacgaatgtatttattgatgtatattatttcacaacgaaagttcgcatatatgttttctaattggtccctagaatataattatgcgatattaaagttggatgcaagggaaaaaaagataattctgaaaaaaagataattctgaaaaggataattctgaaaaggacaaaatattcctctagaatgtataagagttggtcattttttttttttggggtgaaagtaaagagtttggtcatcttatttcgtttgacgtccttattttggaccgccgtcggaaataagcggtcaactctgaggaggatgcaaattcttttacgtttaaaaaaggggaaaaattgacatcaaaacaattgagtgtagatgactactttattattgaccaattacggaaattcataaattgaaatatatattttgttttgacattggccacattacacgaatattttttttaatgaaagtttatttttaataagttttttaaataataataataattatatatatattttttgcatttgtacccgaacattacaagttatgtaaaagtcgatgaaggcactattttaaactccctcagattttgaaaagccttgaaaactaatattttaattttaaaaacgacacgtgatttaatatagataaagtaatagccaatttagccaccaactcaaagaaaaaagttgtagccaccaactacaaaacctcacaacaacaaaaaaaaaaaaagaagaagaagaagtaataccaaaaggtcattacagtcatttgaagggtaccctcgagactatttctgtgttggctaccatgaaaaagctcacatgcctcaacagtcaacaacaccaccgtaaattgatctaccccgataccaatttgataaatgcgaaagattagcctttccttgcattaagcacaagttaaaacagtgagcgttaccacatttcatttacaagtgcaaaagaaaatttcaaaaaaatcctttccttttaccggatatatacacatcaccacatttgttaatattcaattggcgatactatattctttcattgcactaaccaaccagtctcctttatcatctctccatctcatcatcctcctccatttctctcccattttttcttctgtgtatctgcgggagagagtgaaatagagag

SEQ ID NO: 10699 - DNA, 3000 bp, Unknown
  misc_feature (1)..( 3000): cDNA_ID_2716438_gDNA_ID_2213669_Annot_ID_132750 3000 nt of promoter + ATG
atcttcagcaagagtgccaagtacagcttgttcgacccttgcaaagaaatggcctatatcccattggatgaggacaccaaggtttgctaacttttcctctcttttaaggaatctatatggcatgaaagttgtggtctttagccattgtgatgtggtgcaggttaaaggcaaagctgcgattgacgtggtctgcaacccattagggaaatcagggggagctttaatacagcagttcatgatcttatcctttggatcactagcgaattcaacgccgtatctaggaatgatcttgttggttattgtcactgcgtggttagctgcagctaagtcgctggagggacagttcaacagcttgcggtctgaagaagagcttgagaaggaaatggagagagcttcatcggtgaagatccctgtcgtgtctcaggacgaaagcggaaacggttcccttggagaatctcctagcagttcaccggagaaatctgctcccaccaacttataaaaagtttttttttgatatttggttttgttgggggggaaagaaagaaggatgatgaatcaaaaataagattttgagagcagtctctcaaacaatcgcccttttgcaccactcactctttatagtctgtagcttttttttccttacattcttttcagttcaatgtggtttcacgttctaagtttcttccttgtgtgtatcgttgaagtcaaaaagataatagatttagttcttctactctcaaactcatcagagtaagaatgagtgaagttgggtatcgttgagacaattgctttatttcttctgattaacatcaatcgaatcgaggagtctttgaaaagagttataaacaatacaaacactgagtgctgctgagtgagtctctctattgctacctgaaaaaaaggaaagcgtttgcgcgaaaaaaaaaaacagcaggtagttgtactgttgtaacaatattttcacatggtcccgggaaattcaataaattatttattttagatacaagatggttgatatttgcacgtcgttaggacattggactcgtccagtgtctgaaaagccgtcttttatccaacttccccggggattcccaatcctttttatctttcttatcaaatagaattgtcaaccaacagagagaaagagagctttgactttagatccaatcatggagacaactacaactcctctgctccccggtgatcgcagcagatgcgggtggctccgtcgccgtctccgcctcaaaaaccctctttcttctgaactctccggcgctgtcggtgatctcggcaccttcatccccatcgtccttacactaactctagtctccaatcttgatctctccaccactctcatcttcactggtttctacaacatcgccaccggtctcctctttgacatccctatgcccgtccagcccatgaaatccatcgccgctgtcgctgtctccgaatccccgcatctaactccttctcagattgccgccgctggtgcatccactgccgccacgctcctcctccttggcgccaccggagctatgtctttcctctacaacatcatccctctcccagttgtacgcggcgtccagctttctcaaggtcttcagttcgccttcaccgccatcaaatacgtcaggtttaattacgatactgccactctcaaaccctcttcttctcctcgtatttggcttggcctcgacggccttatcttggctctagctgctctgctcttcatcattttgtccaccggctctggcaacgacagagaagctgaagatggagatctcgccgagacttccagcaacgaaagccagtctcgccggaggagactgcgtcttctgtcttcgattccatctgcgctgatcgtgttcgcactcgggttagtgctctgtttcatacgtgatccatccattttcaaagaccttaaattcggtccctcgaagttccacattctgagaatcagttgggatgattggaaaatcgggtttctgagggcggcgattcctcagattccactctctgtactgaactcagtgatcgcagtttgtaaattatccaatgacttgtttgacaaggaactctctgcgactacagtctccatcagcgttggggtgatgaacttaatagggtgctggtttggcgctatgcccgtctgtcacggtgctggtgggttagctggtcagtatcggtttggggcaaggagtggattatccgttatttttctcggaatcgggaaactgattgtgggtctggtgtttggaaactcctttgtaaggattctgagtcagtttccgattggaattttaggggttctgttgctattcgcgggaatcgaactggcaatggcttccaaagacatgaactccaaagaagattccttcatcatgctggtctgcgccgctgtgtcgatgactggctcgagtgccgccttaggatttggttgtggagttgttctttacttgttactgaagctaagaacgttagactgttcttcagtaactctgttttcccggtcaagtgatgagtcgcaggtcgattccgaagccgctcctcgtgatgtctaagatggacttgccaaaatgacttgatggagaagtacttatgacgaaatggcgggcagctgcgagtgcatcttatgtcttcgattccatctgcgctcataggggttggtgccctgtttcattgagtgtattgagatgtgaaaccattaatcaatgttttcattgctcaactttgtgcttaagattataataatcaggtatgattaaggactaatattgacaaaccttttaactaaagaaaatcataaggctgacgcataaaagagccaaaactggatctctcccaagtattgtcctttctataaagaatcgaatcccgaatccactgtgaatgtacaattgactttgacaactactggtttacatgtttctataaatgcaatgctagagtgatctctatatacatcatcatcacctgaccttttggctatccagtcca

SEQ ID NO: 10700 - DNA, 3000 bp, Unknown
  misc_feature (1)..( 3000): cDNA_ID_2716430_gDNA_ID_2213669_Annot_ID_132752 3000 nt of promoter + ATG
aaaaatttcactgcgtgctatataaaatactatatatgttaccctttaactgatgaaaatgtaaagagacaaggcagcaccgtttatcatcagaccagtttcgagagtgttcctgcatcgttgggctccctcctcaattttgtctacgtgattatatatcatatcgtctacaaacaaaataaatacaattctatcatatgaatatgtgatcatcgatgatcgatcaatatatgttttcgaggtgacgtatatagtatatttccgtagagacggcgaagaacatgatatctctgcatgcctccaatcaaatctttacacttcatccttcttcgttacttgttcagttgttcctttctaatcccgacaacccttaatttgtatttctatattagatcgaaatatctcatttgtgataaataaaataaaaaaaatcaaagaaagctatagagaagctgcgtgcatgcatgggttggcgatgtttggcttgttatgtttggcttgttatgtggcattatctgtatgtatattaccctaaatcacatctacgacatttccctcgatcttcaaaatatgccagcaatcttcatgtttcctcatatctcttaacattggaaaatgtcttttgacctcttttgatgtattttaaattacttcgagctcatctatattacaaatcattcatggtgaattattgtccagccaatagaatagaaatctgaatataatgtgtaccacatcttttatgtaatttatacgatattctttttcctgagaatgatcaaataacaacatgcatgaattgctgccagaaaacgtcagattgatcagttatcactacaattatcaattaactagtaaatagtatcaaaatgtacgtagtgcccatctatagctagctaaggaggactccggatgtagagaaaagctaaaatgtgacttgctagagttgtattatattgaattttctaaactaatagtatcttttttacagataataatttccggaaaacctattagatgtatagatataacaataagcatcgataccaaccttttacttccaaaaaaaaataaaaaaaaaatgccaagatgagataattttgtcaatttcaattagtgggaaaataacaattgtcgtgttatttttgaaccaacgcatctcagtgaatgatttcccagttcttaagattttaggacatactttcccagtaacatctaatccgtttgggcataaacaagacaatttgtagttatgtacatttcttagtgatgtgtgttgaaaagatatgaatcaatgaggtccgacatattttgtcaatacgttagtggtgtttcaaaataaatttttagtatatatattaaaataagaccaaaggataggctttagtggtgtttcaggtatagttttaataatcaattcaaaataagtcgaaaggatatgtaagataggcgttatttcaacgtggatcattatcaaccatgtcaaaaacgcatttcaactcctagatgtgttgttagttatatatgttccaaatggaatcgacccaacagaaaaagagaaaaaaacgtaaaaggttatgcgattccagggacgtctcatatatatatatattccgatgaaatataaatataattatcgtggtctgtgacaataaatatggaaatagatgtggaaatcatgatcatgtgaagaagaagaagaacacgtgcagatgaactgcaaatgataataatgtgcatgtccatgagttatgtacttatgtgtattatctacgtgttttccatacatacatatataaatcttatattactttatggttttgtcgtaaaagttacgtagcatcaataattgtgattcgttgccataaacagacaactacttgtaacggtataaggcttggctctcatgataaaatgataaccctttttttcgtcggagacagacaaacgcataaatcactaattctaaaccgagatgattgtcgatttgtttgccatatgcataactagaatcttcagttaatattaatttttggtgttttcgatcgaataaaaaaaaataaacattgcaatatttcgaaatttgtcgtctttctttttataacactagcaagtgagaggctgagagccaagtggaacgttaaaagacaacattagatatatattatatattgctaaatctgtattatttctttttaacatacgcaacttttgattggaaatcgtaagtcgaaggaagggcctcgatttatgacgtacgcttcgtgccaaacaattcctctttagttgaggccggggaagacgagtttgttgttagtgagcgatgccatggcatcaatgaactcccaaaggccatatgttctgttaaaggctattttagtttttaattttgttctgattaactcaaccacatgttaaatcagatatcatgtttaacgatattagtttttaaacaaaatgattatcataaaacgaaatttatgatgaaacatatataatctttatcttgtttaagtatgtaattcttgtatgtttgtatacgccttgcaaatcaaaaaactagttgctgtttttggcattgtgtttacgaaatatttattaatattttaaattaattaaataaatgttcttatttctcaacaggaaacaatatgtattttctttctttataaaattacaatgaattatttgttttaagctgtctatttccaagaaacaaaacacaaaaatgataaatttataatagtcacataacctgtcttacaaaaaaaaaaagaaaagcgaaaagaaatgtgacaacagaaaatggttttgataaccaataagaatcgacaaaaaaaaaacttactccacatatactcttctcttcactcttcagtcttcactattcagtctcgagtatttcaccgatctataaatacactcctcttctccaccaaaagtatcatatcataccaaaaacataaagccaaaatataaacacataagccttttagcatg

SEQ ID NO: 10701 - DNA, 3000 bp, Unknown
  misc_feature (1)..( 3000): cDNA_ID_3037775_gDNA_ID_2213669_Annot_ID_182227 3000 nt of promoter + ATG
tagttctagtgtccgccatatgtataaagctgtaaacatctttaacgcatatatttggtttattaaaacaatagttttgtgattactatgacccattcatgtatttgcatataaatgtagtaacttggagttttggttaattagacaaaagatactccgatctaatattttttaaaataagctaattgaaacttcaacgtgggataaaacgggctgacaaaaaaaggttcaacatgaagaaaataactctaactgataaaacggcacggcgtctgaatgactataactctataaggtgacaaaacgacacggtgtcaacatccttaaaggggggaagaagagtcgtcgtgattcgtcgggtggctggctctttgataaatctaaacaataaacgacggaagcaatccgattcttcgtagataggaatagcccgaatagactggtactgggagtgttggacccacttcatcaatgttcgtgtcgatattttcaattctcatactcttctttggtcgcgttcaattattcaaatctcttaacaagtattttcttcacaagaaaattcgccaagcaaattggaaaaaaacgaagaacacacgaaataactagccaaaagagtttaattacttctttatatatgtgatcgttatttatttgcattttactcgtttttttttccaattatgtcgacacttgattaaattagaagcacaaagcctcgaagcaaaccggcaaagataataacatctgccagagctaagtaataaggtttacagttagatgatcgagagaatatgagctttggcaccgcagaaaacgctggccaattacataggaaaatgttcatttgaaaagatatatagctaaacagtatatatgtctcaaaagatagtttgactcgccgcatctttctattaggcactcgacgtcttcatcatatatgcattattattttgcatattaattaatggtagggatcaaattgttacgaagacatgcaatagatcatttggatattcatgcggtcgacatcaaataaaacagctctcgtacatacagacaggataagctcatgaagtttcctttggtatttatttttacgtccttttccatatccattatgatagttatccggtagctgatgtggacttcgtatcttctactgccagtaattgtatttctttttttataagtgcgcggaatatctattttcattcatcctcatcatcatatactaacatcaacttatctacctttttttttttaagggtttgctcgaggtttcatgtcattttttggaaataaattttgacaacatgatttaatgttgaatggtaatgaaataagaaaatcaagatgattcaatactcttcgatatatataaagtgagcgagagggaaagcacagagtatgataaatcaactgaatttagctaataaaacacatttttttatattgatagcgtcgaacagaccaacgacaacacaacggtcaaattaacatggcttaagtcaagcgaggacagaacgtgccaaagccattgaatatattgaatccttttataagcatatcttatttagtaaccacgtgagtcgtgacgatggcttattattagtacgtactacgtaactttgaagaaaagaagccctgaaatttcggaaatgggttcaaaagtccaaaaacagtttgcggttaaagaagggtacgttattttttttataacttttttttcattttttcatcaaagaaaggtacgttaaagacaaagtgaagacgtagtttaattttgacatgtttagactcattgatattcagaaacttagtcctggaattgtgttgtagcaaaaacaacaacacaacgagagaaagataagataaaagcatatatgatgggtttgtgttgcggatgttacgagaatatgagacatgacacatcatgacatcaatgatatggacaagcatacgatatatttcagaagaaataggatgtttcctccccttgcaagctttagcttctccagtgcattaagtctaattcatcgagctcattgtaggtatacgaaggatttgactgagctaacttaggaaaaaaagattgaaacgaggaatgatttagtaatggtaatttgaccttggttttgtacttcttttaattcataaaccccctccaccgtaaaaatgaaacattagaaatcctaaaagggcagacaagttgatgtccaaaaaaaaagaaaaaagggcagaagagtaaaaacgcgaatgaaagagtcaaagcaaaaaattggtaaaaaaaagcgtgaacggcaggattcgaacctgcgcgggcaaagcccacatgatttctagtcatgcccgataaccactccggcacgtccacctttgctagttgaatcatttgttaaattgaaaacccgtcattttgatctgattttgtactgtatgttgacaaattgaatagtctctgatgatttcgatcaaagagaagccacggggggagcgctagcacttaaaggttcctcgctttcttctcaagtttatagtcttctcctctgtgttggctcatttacatgggtagatttagttttcgagggttttatggcgaagttcgcgatgttctgttaattgcaatgtctttcttctttttttttttttttttttttttggtattcaattccaattttccagtgtgatttgatctgaactcgaattcaaattcagtgctactgagttatgttaaaaccattgtccattgatttttttatgttgaaattgaaaaaaggttataccattcgtttgtattaagatttgtctttcttagggaatgttttacattttttgcagatttgcaccgttttctctctggctttgtgttgtgctagatgcgatgcaatagcaatattttcctggagtttcaagtaactagtggcttaggttcataatagtgtttctttgtaggacgaaagctgtgttagtattctctccactgtaaaggacaagatg

SEQ ID NO: 10702 - DNA, 3000 bp, Unknown
  misc_feature (1)..( 3000): cDNA_ID_3037779_gDNA_ID_2213669_Annot_ID_182226 3000 nt of promoter + ATG
ttattgataatagatgtttccgccatgtaatcaataacaataagatatatacagagtgctagagaaaaatgttacaagaaagaaatccgcttttatattacgatctctaggataatttaatgtcaatctcaagtattcaattccatttttagttcttcgtttattgatattcctgcatgtaatcaataacagtaaggtctacgagtgctagagaaaaatgttacaagacctagcattcttacaaaaaaaaaaatccgcttttatattacgatctctaggatcatttaatgcacaaattcgaatgcataaaaatgaaacgtgtaatttttttaaaaaaaacatattaaaactttgagcatcccgtcttgtcgagtgtcgatgtcgtcatgcccggatcgtggtggtcggcactgatgcttaaaagtggtttgtaattattgaattaaaaaaaaaaaaagtaaaatcatttaaacaatagtagtacattacatacaaaatccacggccaaaaaaggtttgaaattacatatatagcatattgcaattcaaaaatgcaattgtatacatctctacagtatttaatgcatttgtgatcataatcttatatagcctttcgaagatccgatgcgtttacgttgtgggaagcagaatagagacctataatccaatagcatctccggttttcattaacctcatacgtttgcaagattccacaaacatcctacacaaattaaatatcatcaatcccaagaaaatttagtttccttcacagcagaataatacagtaattctagttttgatatgaatgtaagtaacaaaatagtacagaaattctagttttgaataaaaaaggaaaagtacgtaaaagcaacacaaagggtaattccgagaactcacatccacggcacatctccgactaacatcaagtcaccgtccttatcctcgtaagtagcaacaaactctcccttcctctccaactctgtcactctacctaccaccatccaaaaccccaagtgtaagtaaatttaccataatatccttcacttcgtcagtccatccaaacacatcaaaatctttattttttcctacttatctcgatcacttacatattgttattatcccctgaaacatgttttctagagcggtgaaaagctgtccatagcaatcgtacatcccaagatcaacctttctgagataggccgcaccatccaacgccactttcacgtatttccgcctcactgttttcctcgctgtcgctaccggcggccagcccaccaactggtcactaaaaccacaataaattaagaagatcaatcaaacatgcatatgacctatatgaacgataaatgaaattaatataatatatatatgccgtacttagtgaccatgcttgagatataattgttctcgtgtgcttccccgagttttaaatcaacggtctcgaggaatctacgtttgttcccgaacttttttggaccttccgatgcatttgtcggagtgccaggcaaagctagggtcagctcagttcctccaagatcaccggaatccggccaaaccctaacgtattcctccggtgacattaatatcttaatctatttatgaaagttagttaacaacaaaagtgcggaaagtgatgagacaatgtggcactaacttttggcttgagtgtgtgagactctcgaggtttccaactttgtatttatagtcgatctatacttgtcagctaaaaaactagtgaaccctacctataatgacacgttttcctgtaactggcggtttttatatctccacgaaagcaagtgaacagtttggtgattagcttctacttcgtgtggtgtgggctcatttatagttatagccacttagcatcttctaaactgtcattagtggatgtaattgcatgtgtacggatatcttttcagttttaatttctattagcctggtatcaaaagaagaagaagaagaagaaatcactgtcaactaaaaaagaagaaagaagaagaagaaatcagccctgatctttaagctcccacgtcacgactgatgggttcgattaaggagaaaaatatataatttgattatattatccactagcattcacaaaacgagaaaaatatatattctaaataccattatttactttctaaatagagttgaaaatatcattttaatcgcattcatgttacctttgcttataatcgttggaaaatataataaactttattcccatatatatttgtttgtgtttgtcaacttcagtccaataatttaacattagaccaaaaaaaaaaaacttcagtccaatatattcttcgggagagatcttcaatagtgttccttttgtctacactttgttgtcgctttactcctttaaattatcattccaactaactttttcttggtaaaaaagtttcaccattatatatgtacatcaactttcactgtcgtcggtcgaaaacaaatcatggtctaacaatatattcctaattatctatcatcgtacactacacactaattaggtacaatacttcttcattagtttaatctttcaccgaatatcagaagaaatcccaactaatatgcgtgtggatcttgtaaacaatgaaaagaatgttcccaccaaaaaaacaatgtgaacagaactaaatgttgaaacttctacttcaaaattgaaataaaatctaaaataaaatatataatgaacatcaatcattgtataaaagcgattaaaagtttcatgatttgggataaaaaaagttagagatagataactatcccttttttagtgaacaagtataaagtttttactgaaaagtttttcagtgtccggtattaatttcatattagtcatattatttacatgcaatatgaaatgagatgtcaaaaaagtttagacaaaggaaaagagcagaacattaattacagcagcgtagggtcacatgcgtaagtcacgtgactctgtttttcgttggggaacatagaatcataaatgattttttcg

SEQ ID NO: 10703 - DNA, 3000 bp, Unknown
  misc_feature (1)..( 3000): cDNA_ID_3037739_gDNA_ID_2213669_Annot_ID_182223 3000 nt of promoter + ATG
tacagttttcaagtttttgtcaacaagtaaattgtaattcacaaagacttgttctttcaacttgaatctgacttgaaactttggaacttgattcgacgaacttaaacaacaagtacgtgttgcaattatttgtctagtcatgaatgatcagataaacaatcctcgtttagaataaacaatttctccaaacatcttatatgcattggactctgcatagataaatatatatctctctgttttgtttaatcttcatgccattgatcttcgatttctcttgacttcaaattcacagatcgagagttaatgtggtgctaagtcccaaacgttagaaaagggttggatcgtgtcaaagggtttcaatcatggggaaggagaatgctgtttctggaaactctataccaatccatggtcgccctgtaactcgtgctcttgcctctgctctgcgtgcttcttctaagctgataacatcttctgaagtggctgctacaacacagaaccagggacgggttcttagagcaaagagtaaaagaacagccttggatgagaagaaagccaatgcacctaagaagcgagctgttcttaaggatatcactaatgttacctgcgagaattcttacacaagttgcttcagtgttgcggttgttaactacacaatgcagcattttagaattgctaagtttatatgacaagaagtatgtttttgctgacaattgttgcttcttctttttacttaggtggagaatatcaagcagataaagaagggacgacagagttcttcttcttccaaggtggcatcttcttcggctacttcacaagttacagatgcaaaggtagaagttgtgtcaaattcagcaggagcaagcttgtctgtttttacagatacaagcttaggcacaaacgaaacatcctatagcattatcgcaaagccaagctccagatcgcctccaagaccctttgggacaggtgaattttataaatggtcatttactgaagcttgagtgggcaatgtataacatttctgatgcatctttattcttgcaaatggtttacagttgagagaagttgtggtggagcaagtagcccgaaattcgttgacattgattcagatgacaaagatcctctactctgtagcctttatgcacctgacatctactacaacctgcgtgttgctgaggtatttatcccttggattttgatatcttacgatgatgcatttgaggcatttgaatccttacgacttgtctacttatcagcttaaacgaagaccatttcctgattttatggagaaaacacaaagagatgtgactgagacaatgcggggaattcttgttgattggcttgtagaggttagttctctacttccagtttgtttgttgcttacttatgaagtctttttgtgtagcttctcacaactcaaaatttcaggtctcagaggaatacacacttgtacctgacactctttacctcacagtgtatctcatagactggtttctccatggaaactatgtggaaagacagagacttcaattgcttggcatcacttgtatgctcattgcttcgtaagttcctcatccacctaaaatcaaataatgctctggtctgaacacaacatctaaaagagttcttgcaggaagtatgaggaaatccatgcgccacgcattgaggagttctgcttcatcacggataacacttatacaagagatcaggtcctggaaatggagagccaagtactcaagcattttagctttcaaatttacacccccacttcaaaaacattcctcaggtaatcttaccagacagtgcaaatgctttatcatgtgttgttgctttttagtctttggtgattcagagtattcattcatttttgcaggagatttcttcgagcagctcaagtttctttcccggtaatgtgcttttcttttatcagatcagatatatctattgctcataaaacatgtagcagaaagattgaaactttgttggtaatttgtctgcagaatcaaagtctggaaatggagtttctggcgaattacctaacggaattgacgttaatggactaccctttcttgaagttccttccttcgatcatcgctgcttcggctgtttttcttgccaagtggacattaaaccaatcaagccacccttgggtctgtaattgaccaactatcttcttcattaagaaacacagcgaatcttgaatctcactcttgtttactttattttatgaacagaatccaactcttgagcattacacaacgtacaaagcctccgatctcaaagcatctgtccacgccttgcaagatttacagcttaacaccaaaggatgttccttaaactctatacgcatgaagtatagacaggacaaggtattaaaaaattattaatcttagtttggttttcttaaaccgaatgaagaaatctggtctgtttcggtttaacagtttttttttttttttttggcaatttacagttcaaatccgtggcggtattcagttctggagagctaccggacaagctattcatctcctaaccgatatgacacacgaatctgtagtaacatttttctgatggtccacattcatctgtctgtcaaataaaacagtgtcttcccacggtctctcatcattaccaagtaaccggattcggtgttagttcggtttagttgtagacaggtttggttctttcaaaccggacttgttcttgtcggtaacacgagttaattgtagtggaatgtacatttttcccccggtttattcaaggcaatatctggtctgcttcgaatattttatctttttattacagttgacagagagacaaagcattaattacacattatccaacggagaaattgtgactcacatagtatgtggcaagaattgctttttcgttttacgaaaaaccaataataaaaaattatcaagttggtcttcttcttcctcgttgctgatgtgtcgctctgcttgagagagtcagagagtcaagagagaaaaggggtcgaga

SEQ ID NO: 10704 - DNA, 3000 bp, Unknown
  misc_feature (1)..( 3000): cDNA_ID_2716422_gDNA_ID_2213669_Annot_ID_182222 3000 nt of promoter + ATG
aaccgtaaaacgttattattattaggtccacgaagacctctcgttacgtccttctcacactataacagctttaacgcattagtccaatacatatacaatagaacatactgtatatatcctaaatttgaaatccatgagctttgattatgtaacttcccatgtggtaagtgagactattggttatagctcctcactgtagcttttgaattactcgtgcgttgtatataaataattatcccaaggatacttttgtttgtttgtgatgctttcttcgattatatcacttaacatcaaagtttcatatgaaagttttgacttaatcagtagactttactgccctttcacgtactaccgaacaaaatagactcaactttaactttaaaagatttgtcattttcatttcaaatctgatagtttttcgaacttcttctttttgtttttgttaaaactcgtaattgaattgcttcaaacgcgaaacaacagcaaaaataaataattaagtttgaaaacaaagataattctgaataagaaaatatatcaaacaaaaaaatattaaaaaaataaaataacttctgctatattttgataaaacggctataggtaagatgtgaaataatgtataacatacaagattaccaaggtcttaaacataacaagacctgaaatggcagattccaccacttaattatttgttcatgtcctaagtatcttttctttttctaagtggatcctgcggatctaagcatcaaaagtaattattatcatattttctttttgttttaaattaagttttttttaattctaaactgattatgtcaagtacaatgagatctaatacagttttcataactcctagtattatttaaaaagagtgttgtatataacgtttaatcgcagaaaaaactctccaagttttatttcacgtagatttggtcaaagtaaccgatgagaaaattagacataagttttgttttacacgaaataaagaaagtgttagtatcacataatgcatgttatctttttactcaatagtatacaaagaccacgggagcgtcgtaagtatgattttaaaacggagcaaatcctatagaaatagaaacgggttctttaagtttctacaaaatgtttaaaaatttgaaaggatagtgtagaatttatggatggattcttacttaacatgcatgtggagtccaaataagcattaaggaatattaaaagacacatagaaacgtaaatataaatatcagaagagtgattctggggtaaacgtgcatttggtcttttttttttttttttttttactactagttagtttttctattcaaaagttaaaaactttaccattaaaaaaataaatggtggaatctttcttcaaatcttcaaaatttgaacagagttttttgtaatttaatcatttttatttacctttggatgaatagccacgctgttactgtctttaaaaaatgcgctgttactatctatgtaaataaattatgacacatttcttggaaaacgtaactattcctcctctctatcgttcttttactttaatacaaaaagtaaatataaaaaaaacattcgaacagagagaagaaaaacaaaatctgcatcattaattacatacaacaggttaatggagaaatggaaatgacacagaacccaaactagcaatgggtgaaaataaggtaaatgattagttaccaaaatctaaagaaaaatctatgttcaatcacgtaccaaattgaaaagattaaccacaaattacttatcaaaaaaaatcccaagcaaactaaactgtagtgttagctctttctttatccccttgttttatggtcaaacagtcaatgagttgcgttataagcacataaacaaacacttctttctctaataaaaataaagtttctatttttatatacagaaaagaaaagaatataaaacttatatctttaaaccattctatatcccgctcactctcagagacagtccctttgcataaaagcgaattgactataacccatttactctctcgatctgcccaagctcccatcttttctgttcgtagagctcatttccccaaattaataaagaaaaaaaaaaagactttttttcttcttcttcttcttgaagaaatttctggagcgtagtaagtttctatcttagtctctctatctccatcttctctgttttattttgcttgtgaaatgtgatgatattatttttatgccgaccctctgttcttttttttgaggcggttctcctggagggtttcttgaaactttatcttggttttgaagcttttttggttcatgggtcactcggatttttcttggattaaagaaaatgtgactttgattacttttttttttaacgaacggatcgataggtttttttgggagatcttgcagctttaaatcatgggtcttttcgttatcctcagaagaaatttgatctagtcgttccttttcttgttcctatttcttatggataaacatttttatataaaaacccatgaaagaaatttagaaactttactaattttttcttcaaatttaattatctccaaattctgcgcaagtcgctcccgtctttgctaaaattgctaagactttttctttcgagcgttgagggttttctgcattacagttttcaagtttttgtcaacaagtaaattgtaattcacaaagacttgttctttcaacttgaatctgacttgaaactttggaacttgattcgacgaacttaaacaacaagtacgtgttgcaattatttgtctagtcatgaatgatcagataaacaatcctcgtttagaataaacaatttctccaaacatcttatatgcattggactctgcatagataaatatatatctctctgttttgtttaatcttcatgccattgatcttcgatttctcttgacttcaaattcacagatcgagagttaatgtggtgctaagtcccaaacgttagaaaagggttggatcgtgtcaaagggtttcaatc

SEQ ID NO: 10705 - DNA, 3000 bp, Unknown
  misc_feature (1)..( 3000): cDNA_ID_2716426_gDNA_ID_2213669_Annot_ID_182220 3000 nt of promoter + ATG
tagagtagtaatggatttttaaagctggttgataataatttttggatctaagtaacaaaggaaaggcgttactctttttttgttcttttcaaattggcgtaaagtaaagaaactactttttatttattttctcttaaatagattagattatgattacaccaaaaataaaaaaacatgaagtaaaaaacaagggtaggtgaagaagaagaagaggacaaagaacaggcgtgcttaagcaacgctcatctctgttttaggtttttgtcaacgatcccttttgcattaggttgagaattaattctgaatttcttgcatactagccagtgtgtatatataatcaaacaattcgatcctaattggaaaatttctccatcaggttcaggtctcgatcgaattgatttgaaatgggttcgtttgggatgctttcgaggagaacgttgggcactgatatgcccgtcatggctcaggtcaaacctcgtacttctccacttccattttcatttgatttgatttgattggtctcttgtctttttttctttaaagtgagaaattgttggggttttgcgtgcagattcggagtttgatggcggaattgacgaaccccatgtctctcgcccaggttttgccctctctagaaatgtgtgttttatttataatctaatctagtttagttcacaaaagacttgggctttcgtgagtggtcaccttctttggctatactttgtctggagttttgttttgtctgcaggctgattcttttgctcatgtgcttttcagggagtggtgcattggcagcctcctcaaaaggccttagagaaggtcaaggagcttgtctgggatcctatcattagttcttatggccccgatgaaggtcttcccgagttgagacaggctcttctcaaaaaggtaatcgcaccgtactgaaccattcttctagctagctctggcaacctttcttgtatccaataaagtgaccacttttgctgctcttgaatccaattccgtgactgagcttgttttatttttgattccttgtcttgttctgaagctgcgtgaagaaaacaagctaaccaattcacaagtgatggttactgcaggtgccaatcaggtataacctgtctttgtttactcttttgattgctcttccttctgttttcttctactctcatactctgtttctgtttttgcatctaatgtaggcgtttgtgaaccttgttattacattatgtgatgctggtgattcggttgtcatgtttgagccatactacttcaactcctacatggcctttcagatgacaggagtcaccaacataattgttggtcctggccagtcagacactctctatcctgacgctggtacctccttgattctgtatcacgtttttcatgacttaacatagctttagttgtgaccagtgaatcatttttgttccagactggttagagaggacactgtctgagtctaaaccgactccgaaagttgtaactgttgtgaatcctggtaacccaagtggcacctatgtccctgaaccgctgcttaagaggattgctcaaatatgcaaagatgcagggtgctggctgattgtagataacacatacgagtgagtttctcatttccttaattcctatgatgtccaaattgaatgtagtaataagcggggatttgaaaatcgcaggtatttcatgtatgacggtttaaaacattgttgcgttgagggagaccacattgttaatgtcttctctttctctaaaacctatggcatgatgggttggaggcttggatatgtgagtgctcgattcaattctattccaaactaaacactgggattgtcttataaaaaggtttgatggacctgcagatagcttactcagagagattagatgggtttgcaacagagcttgtgaaaattcaggacaacatcccaatctgtgctgccataatctcgcagcgactggctgtatacgcattagaggaaggttctgggtggataacggaacgggtaaagagtctagtgaagaacagggatattgtgaaagaggcgcttgagccgctggggaaggagaacgttaagggaggagaaggagcgatatacctgtgggcaaaactgccagagggacacagagatgatttcaaggtggtgcggtggctggctcaccgccatggtgtggtggtgatcccggggtgtgcaagtggtagccccgggtatctccgggtttcctttggagggttgcaggaggttgaaatgagagctgcagcggcgaggctgaggaaaggaatagaggagctgcttcaccatggaatggtggagtgagacgttgtttaaagaagggtcaaaagatggttactttgcgtttggttgaagctatatagttgttttaaaaagaaataaaagagtgtttgtttattcaataatcaatatagctgattcttctttacaaagtcattgtatttgggatgttgttaccaatggttgaatccttaacccctttggtgtatgtatatactctttacttattcaaatgaataatccagcaatgaatgcaaaagcaaaaactggatcagctttattcgttatgagtctttctctaaattcaaaaatttaaattcgagtcttatgattgacgttatgacttgtgagaaattgataatctggccttttatttgaaattttaatttctgaacccagaggataaataaagttaaaatcgatgatgattttaggctttattggtttgaaagtgggccgtagatgggcccgaatctaaaatatttgaatcgaacccgaataaagaaagagaggttggatcataactaccatcgacgtggcttccatcttcttctactttgtcttccatcttcgccgacgagtcacatctccgaaatccggagccggagagggagaaagaaggagaatttgggttctccgagatcgaagctcttgcctcggaacccttgattttgttttggaataggctatttttttagtaaaagaggaaatg

SEQ ID NO: 10706 - DNA, 3000 bp, Unknown; identical to SEQ ID NO: 10700
  misc_feature (1)..( 3000): cDNA_ID_2716430_gDNA_ID_2213669_Annot_ID_182219 3000 nt of promoter + ATG

SEQ ID NO: 10707 - DNA, 3000 bp, Unknown; identical to SEQ ID NO: 10698
  misc_feature (1)..( 3000): cDNA_ID_2716442_gDNA_ID_2213669_Annot_ID_182214 3000 nt of promoter + ATG

SEQ ID NO: 10708 - DNA, 3000 bp, Unknown; identical to SEQ ID NO: 10697
  misc_feature (1)..( 3000): cDNA_ID_4268500_gDNA_ID_2213669_Annot_ID_182212 3000 nt of promoter + ATG

SEQ ID NO: 10709 - DNA, 3000 bp, Unknown
  misc_feature (1)..( 3000): cDNA_ID_3037762_gDNA_ID_2213669_Annot_ID_182242 3000 nt of promoter + ATG
ctgaaatggcggcggctctgcagacgaatatccggacggtcaaggttccggctacgttcagagctgtaagtaaacagtcattggcaccctttagagtaagatgtgctgttgcttcccctggtaaaaaacgatacaccatcactctccttcccggagacggcatcggtccggaggttgtctccattgccaaaaatgtgcttcagcaagctggatctttggaaggttctctctctctctcttgttccctttcttatttaatttagttgctgtttcatttcaattggggactactgttttctgcttggaattgaaagatgtgagcattagaaattggcgagattttgaatgggatttacaatcgtgggttgggctcaaaggccacggagattgcctaatacattgcgtctgtgctctgtatcaggagtggaatttaacttccgtgagatgcccattggaggagctgctttggatttggtcggagtgcccttgccggaggagactatctcagctgcaaaagaatcagatgcagtgcttcttggagccattggagggtctgtcttctctcttttcccactaatcttgttggctcttaattattgttttgggaaatacagtttctcatttagtcattttctcatgttggtataataataacttaaggtacaaatgggataacaatgaaaaacatctgaggcctgagaaggggttacttcagattcgtgcagctctcaaagtctttgcaaatctgagacctgctacagtcctcccacaggtgaccatcctcagagatttcttggttgcctgaactttgtttcttgtgtgaaactctaattttgttgtttttatacagttagtggatgcttccaccttaaagagagaggtagcagaaggtgttgatctaatggttgtaagggagcttacaggaggtcagttttattacttattaaaaattgatcgtaattcttgtctttctcgtgtgacaatatcttataaaatgtcatgtctcatggtaacaggtatttactttggagagccaaggggcataaagaccaatgaaaatggcgaggaagttgggtttaatactgaggtttatgctgctcacgaggtactctattgaaaatctcagatgcagatttccgtggactgattgttaagtactagggtcaaatctaataaagcattttgtatgttcgtcagattgatagaattgctcgtgttgccttcgagactgctcggaaacggcgtggcaagctgtgttctgttgacaaagctaatgttttggaagtgcggttgataattatgttttctttgacttgttttcctctctcttgtttcctgtggaacgaacataacactgaatttttttatatgcaggcctcaatcttatggaggaaacgagtaacagcattagcctctgaatatcctgatgttgagctgtcacatatgtatgttgacaatgccgcgatgcagcttgttcgtgacccaaaacaggtacgtgtactttgtatttgccaaactagtcagctttgatgtgcgacaggtgtaaatccttgcaattatttgattgtttgataaatgcagtttgacaccatcgtcacaaacaacatttttggtgatatattatccgatgaagcttcaatgatcacaggaagcataggaatgctgccatctgctagtctcagtgattcggtatgatataaaataatatgatcttttagtatgcaagcagtatgatctagtctgaacataaacccgccatgtgtaatacagggacctggactctttgaacctatacatggttctgcacctgatattgctggacaggttctaactctatccttcaaacaaacacggtttttgttccctgatatcaaaactagtttaatgccaaaatcaaagagcacaacttgttgattctttgaattttcaggataaggcaaacccattggcaaccattctaagcgctgcaatgcttctgaaatacggacttggagaagaaaaggcagccaagagaattgaagacgcagtgttggttgctctgaacaacggattcagaactggagacatatactccgcgggaacagtatgtttcttgaaccactcttataacatgtttccttttccttaaaaacgtcccgagttagtgtttgagaaacgtttaaacaagcaggcaacaacaaacagtagtaatatttttttgtctttttgtatggggtatgatcagaaactggtgggctgcaaggagatgggagaggaggttctgaagtcagtggactcccaagttccagcttctgtttaatatttgtagaaactttgaagagttcatttccaacaacaaatgttgtaccttgtactcaaagagtctcggttttattagcgatttttataatgtgagattattagagggacttatttgatcgaactgaaacgttgatgtttttttctgagaaataaatatccttgtggagataatgacgtgtcagagtatcactcaaaaagccaaaaattagagagacaaaaaagattcaatctcccccgtagtccttatccggcgccgagtgtggtcaaacgtcgcaagagttttcgctctttccggtgagatctttttcctctgatttctgtttcatggcaagcctacttttagagctgagtttaatcgatgaatcaaggatgtgaatttttgttatttcttgattattcattattatgttcaagaaatctaaatctctgcttgggaactaattcacaatttagacatctctgatgagtttttcctctgttttttatttctatcttatcaattttgtttctggaaattttcatggctttttgaatgttcattgggattgcgtatcttggtggtggtaagtaaaaagtcaaacgccttcgtttttctgcataatctctgagttccatcaaagctctgttttgtgttttcaaggtggacttttcacttgacatgttaggctttgatccttttttgttcacacagatagacaa

SEQ ID NO: 10710 - DNA, 3000 bp, Unknown
  misc_feature (1)..( 3000): cDNA_ID_2716236_gDNA_ID_2213669_Annot_ID_182241 3000 nt of promoter + ATG
gttacgtcatgtctgcataatctttacaaaagtaagctaagattaaaagtcgtattctttagttgaatttttttcaaattacaataataacgccatattctccaatggttttaagaatgtgatccatgatggatcatccatcgtttctgtagggtgttttattgagcttaacgatcttacaaaatagccacaaaatgcctgtggttgtcacagagtggaacaacaacaaaaaaaaattaagttagagagtgaattacaaatggtacgtatatgtagtagaacacatataggaggcgacaaaccatctttcaaaaccaaatcttcggaatttggcttaagacacacaactcaaccagatttctcaatgaacctcagtgttttctcctcggttttgagttgaaacaaagccactttatggcaaagatgatataccttggggagatttctccatccaaaaggacgcttctctattgcttcatgtctgttttgaacacataaccaaagagtttcttcatatctagttatctattctctacagacaagcgtttcgtccaaggacttttctaccaactcaggccttctccttggagatagccctctttcgatcatttcctcctcatattccctagccatatccaacattcctttctgaatcaacgcatcaatcacagcattatacgccgctgaatcaggagtatccccagactctttcattgtcttccacacatataataccggctgaagaaatccccatctctcaaacttcctcattagcatcacataagtatccatctttggcctcactccactccttatcatcctaccaaacagacttaggatctcactcggtttctccaaacgggaaaagagacacatgtaagtaatcgaatcgggttgacaacctctcttaggcatctcatcaagcatccgatacgcgtctctcatcctcccgtcttcacatagaagcttaatgattgtgttatgagtcgcaacattaggttcacaacctctttccctcatctcccgaaataccctgataccgaattcaacaccttgcgacgctccaatggctcgaatcacagtgttataagcaaccacatcgagtttcatccttctactcttcatttccttatacaacttcacagctttccacggtttcccgctcttgcacatgatatccatgtaaatggaatacgaaaaaagatccttagtaacaccttcagtatccatcttcttccaatactccttgcatttaccccaccatcccaatttcgaccacccacgaagaatcagattatgaatcttagtattactcacactaaaaccattaccaatgacattcttcccaaaacaaagctcttcagcttcaaccacatgtttatgctcgcaaagcgcatcgaccagattataaaatgatgtttcatctctcaaattgaaatcatccaatttatcatacgcatcaatagcctcctgaacaagatgagccgtcacataacgcttaaagactatacgaaacgtgacgtgattcggcacagattccgtgtttccgatcatgcggttaatcaaagcccaagaaatttcaaactcgaaatacttacccagaatatcgatcacccgattgaatgtctcggtggtatgtctgaatccggattctctctcgacccagttgaaaaactccaacgccttttgccaatcgttgctgtaacatgtgagagcttcgcatactgttttctgatcgtaactggactgatcttcttcttcctgagatcgaaacttcgcatcatcgacatttgaaataggttttactgacagaagccgaacggagtaaggggaagcaatccgaactcgattgagtcgccgcaacaagagcattctcttgtttcccctctccgctccctgtacacacgaaattagggttcatcatctaacgggcgaattttgacccgaatacccattttaaaatctgacccgaataccatttatgggcccaaagcccgctggacttgtgttaatatttggaacatttgggccgatctatcttctacgaatctttcttaggcccatcataattgagccatccagaggtgaaaataaataatcgaacggttaatattggtttgattataaacacaaaagttctttccaggtctccttgtagtctttgttgtagtaaatggcgggagtcatccacgtcagcagtacccagattccggttgcgtttatgtccgcaaccaaacagagctttaggagagcttctgtgatcagatgtgccgccaacactccaaagaaacggtacaccatcgcggttcttcccggcgatggcgtcggtaacgaagtgatcccagtcgctgttgacgttctttgtttagctgggtctcttgaaggttccttctttctcatcctgttgcctaatttaatttgattttcccaactgaaatcgtgtttttggatatcagggatagattttagcttcgaggagttgcctataggaggtgttgctttagatcttgtcggagttccactgcctaaggaaacattgatcagggcaaagcaatcagacgctcttcttctcggagctgttggatggtatggtattattaccataactttcgttcatctcaagtttggattcatctaaagtttggatttttgaattgaaggccgaaatgggataacaatcccaagcatttgaagccgataacggccttgttgcagcttcgtgcggctcttcaagtatttgatgagccctccttcttctgtgaggtgctgctaataaatggatatatatatatatatatatatatatatatatatgttgtatgtggtaatgtaaggtgtccatttacaaaattaaaaactttggggtcaattctgaaaataaaacaatgtgcaaaaaaggacccataaatgcaaagaagtaaagtctgagtgtactagtagtatccatttgacttgcggtttcaaaatccgaaaaagaccaatcaatcctttctccctgaa

SEQ ID NO: 10711 - DNA, 3000 bp, Unknown
  misc_feature (1)..( 3000): cDNA_ID_2716224_gDNA_ID_2213669_Annot_ID_182237 3000 nt of promoter + ATG
actaatttgtgacgcgatgtcgtttatcttcaggattgggtctgcaatgctgtacacggggcaaaacgagttctacggtagcgtggagaggacgtttatgtacattgtgaaacaagcaactggagttttgactaagctaacgagcttatgggactcgattcaatctgctaaagacattcagctcgatggacacaacctgtttcctcccgagtttagaggcaacatcgatcatttcaacaacatgatcaagatgtctaacatcacttaccccgaccgtgtcgctaaccagacaatccgttatctcaccggagcactaaaccctgtgtaagtaataagtattcgcttgatatgtttcttgcctcacaagctaaatatatatagaagctctgtttgagtatttgactcaaatgcgttttcctcaggagatatgtgttaaatgtgatcgctggtgtaatgctcgcagtcgcattcctcggcctttgtaagtcacaaatcaaaacatatctattttgatctgaagatacagaataatctcattatttttgtttctgtttttcttcttctttcgaaacagtgttttcgttctgtggattgcgagttcttgtctacctgtgagttacacttagactacgttgttatattatcatatcatatccaaatcaaatgtttataatcagtgtttcaattatatcagattggtaattcttggttggattctcgtcacagccactatcctcctcagcgccgttttccttgtattccacaagtaaatgatatttcgtcgtcacttgatctaattcaagattcaatttgtttttatcaaactaatgatgttacttaataaacagtgtggttgcggacacgtgtatggctatggaccaatgggtgcatgacccagcggcagactcagcattgagtcaacttcttccgtgtttagatcctaaaaccattggagagacattggatataacgaagacgatgactgcgacggccgttgacatgaccaatgcgtacacggtcaatgtcagtaaccatgatcagttcccacctaatgcccctttctaccacaaccagtctggtccgctcgttcctcttctctgtaacccactcgaccaaaatcacaaaccgcggccttgtgctcccgacgaagtcctcttagccaatgcttctcaggtacatacattttctcataagtgatacatatgtcaaatgttaatgttaattcaatttgtatatgtttttgtaattaggtttataaaggctatatttgccaagtgaacgcagaaggaatctgcacaacgcaggggaggttaacacaaggttcgtacgaccagatgatgggtgcgatcaacgtggcgttcacgttggaccattatggtcccttcttagctagtattgcggactgtacattcgttagagacaccttcagagacataaccaccaagaactgccctggacttagcattacaagtcagtggatctacgcaggactcgcgtcgctctctggtgcagtcatgttctcactcatcttctggttgattttcgtcagggaaagacgtcaccgatctcaaaccaaaaagtctatgatccagatgaatagattttaattagtggagccagcccattatggactcggcccatattatcacccctttttttttttttttggaaacgttaatgatatatggttttaaaaataaagtcgtacgtgcaaaggaattcgtcaatttttttttatttgttgttttttttgtgcaaacgctcttttattgttttactcggtttattaacttttagaaagtggatagtctgtaaatcaacaacttatttagactattaacttcactagatagctataatagtattgatgtttttttcctggtctaaaaatataaattataaacttttcttttagataatattctacttgtataattatttactaatttcattctatgagaataagaggtgagaaaaaatgttgaacattctaagatacatgacatgagtaggtttttcaataaagcaaagccattgaatttgtcaacgaacgtcgccgttggacccccaaactaaatgtacttagtaattgcgacgactagttggggctagctaggcaccatacctaattgctatttgtgaaattctgacgtgtcggattgctatttgtgcctcgaggccggtgcagaaccaggtgtcctgccgtttcaacttgcaaattattgttttttttccgtcctcagtaggtaagatttttgagtattttagttaaggtccatatgtagcagtcaaaacaaaacaaacaaaaagttaggccccctctttaatttatttttatgcaacgataatcctgtaattgtcggtttttgactctataatgttttttaaatatgccatgggaacgttaagatctatgccaataccaaagtgatgtatcgggcggtccacgcgggacgaagtcacagtcaaatgacctcacgtgtttcaagcacaaaaatcttaacaagacaacaatttcctctcttacatatttgtaccataaaataaattttcaaattaagccaaaaaaataacggaaagtgtttgattggttagtgcttcttataactgtcgaatttcagacaaaaaataaaatagaataggaacaaaaataaaaaacgtaggatttttgtcattagttgtgaataatactaagaatctaactgagacccacttgcaattcttcaagaatttaatatgattagtttcaaaagtaatgctaaacctcttgcgaatcacgctttttatcctcttgagtttttttttaaaaaatagtatgaaactactataacgtatgctttaaatatgttaaaaaatatgacgtcattttgaagatgtttaatgctttaaatagaaacacaccaaacaataaagtgagagtgagtgagtctgattcatctcctctgtttaagcaaagcacttttctaaaatcccacaggagaagagagatcggaagagatg

SEQ ID NO: 10712 - DNA, 3000 bp, Unknown
  misc_feature (1)..( 3000): cDNA_ID_3037769_gDNA_ID_2213669_Annot_ID_182235 3000 nt of promoter + ATG
tatttggatataagttcatttgccgatttagcttgcttttttattcaaatactgattaacatggaatgcaagaaaaaggaaaaaaaaaccttcttcttgccatggcgagtgagaggactactaaaaagaatacagtaattccaaactgataaatatgagtttttacgtgtggaaaaaaaaaatttgagtattaccttagctctgcaagatatattaagaatacagcaaataaagaagaaatcaaataagcatattagatttgttttcacaaactgaaaaatcctcaaatacataaaaagaaaaacacataaaaatccaaactaataaatatgattaatgattcactgattttcgcctgaactaaattatggtcgtaagttttttgtaaaaaattgttaaaaaaacaaaaactgtcttatcgagacttataacaaatgatgaaaatctgaagaaataatatatatttttcaaataattatgtggtttgacatgtcaacgtctttattatcaatcagaagacagtaaggaacattaacaatgaaaagggaagttataaattaagatgtcaatatcagacaactactcgtcaatccattatgatacgtttcattatgagtcactaggtacatgtgcatgatgtaattatcacttattaaacagattataattttcaactaaaaattcgatttggtttctaaataatatttacaaacaatacaaatcatcaatgacaaaaaaattgtttgctacaacgtcaaactattttaaatgagtagattctcgatagatcctctacaatctacatactttactttgaaataactctccactctccagatcagaacacaaattgtaatagattaatagctcaaaaatagatgagtacttctctttagaaatataaaaatcagactaacacgttgaaaattatatagtactatgttttattttgtaaaccggtcattaaaagttgtggagaagtgaatggtggtcagtgttcactgcatcttcaatattttttatacattctccggccaaaaaacagtgcacgttggtcccatctggctggtctgttaaaaagtctaacgggataattaaattcttacgggagatattactaaatcattcaacgatgctatcaaatcactttcaataaaaaaaacaaagtcaaatataaaatatgttttcaattaatagagccacataccgattttttttttccaaagaaggcattgatttttctaataattgtatttattttaaatattggaatctacaaaacattattttaggtcagttggtcaatgcaattggttagaaaatctgtaaccaatgaaaggaaaatagtgtcaaattatactagtgagtatgttcataagttactaaagtccactaagtattaataaagcgcactatgtgaaactactacaattattattggctatttttgtttgtactacttgttttgtttaatcatggttagttttttaaattttaaaaccaaactttaagttgattaataaataaataaaaacgtagatgagaagggtgttggctaatggctattggttactttccacttatgtatgtcctctcttcttctcttaaaaagcttaattgctttgctattttgatactagtacagtctattcttcaatttatcagcttcttctcttctctcatatcgcggtaattaaaggcgatatactgattgctttctggggagaagttgtcggttgtcttttgccattataattataatgtgaatttttgtaagccataattatttgcactatttatttatttagcccaaataagcacgtatgtatatatagatagactaatttccacgtatccaagacattgccgctaactattttttgttgggaaaatttgatttttgttatatgacgacgacagcgacaccatcaaatttgtttatttatttcggttctcttgttatcccaacgccgcttggattgatatttgtctactatcaaacttcattatacttttgagcgaattaaccaaaagatttgtaatgacacctttttatttcaaaacgtacggataatattttgtcatagaccaaactatttttttcataaaaattagtctatgtactacatatcaaacttgttggtaattcgttggggttggtttctagtcgtcttcccatctcgttgggactaaaacaacattcttttagccactttcactattatataatggaacgaaatgacaagcccgttaaagacccaatagcccaatattgaatcaaaccgcagatcccctttcttcctccaaaattcaggtcacaaacccaaacttctcacccgtatctaaaaagttctcgtggtgtatagtcctaaactagtacacgacagaatcaaacctgtttgaagtatttagcacggatccaaacacgagagacatcccaaggaatctgattctccaatgtttgtctagacataagatgcgttgatggtaaagaagaaacgatacgcacatcagattcacagggttttacttctttttttggtaagattggatttttctctcacccccatttcttattccatgcttcttagatcgttaattgaatctgcatcccgcagtgatcattctttaatttacgaatttgtttttgttgtcttgttgtcgatttttgtcaattttattgtgtaatttaccaagtgtaaattgtgattgaatcgattgggagggcattgcgaggtaaatccatattgtgattttttgtttagtgtctaactagctgtatcgtactccgcataaatcacaggatttttttggtgagaatttggtaacaagaggaaattgttccattgatgacgaagctcctagtgttccattgagaatttttggtttccgattggattattaaagaatagaagaaaaatgttgaaatctggggtttgattttggtatttcaggagacacaagatctaggatttcctttatttagagacgagggattct

SEQ ID NO: 10713 - DNA, 3000 bp, Unknown
  misc_feature (1)..( 3000): cDNA_ID_2716206_gDNA_ID_2213669_Annot_ID_182232 3000 nt of promoter + ATG
tcatgaagtgataataaatttaaaatctattttttattatattcacatggataggctattttcttgtgggacgagtaaagatggggaatcgttcatagttgagtggaatgaaagcgaaggagctgtgaagagaacttatcaaggattccacaagcgttcccttggtgttgtccagtttgatactactaaaaaccgttatctcgctgcgggtgacgacttctccattaagttctgggatatggacaccatacagcttttgactgccattgatgctgatggaggtctccaggtatgcaaacaaatacctcgattctccctgggaaccgaatgttttcatttgcagccatcatggctctctatgttttgtaggcaagtccacggatcagatttaacaaggaaggctctctcttggctgtttccgcaaatgacaatatgattaaggttatggcaaactcagatggtctaaggctattgcacacagtcgagaacttatcttctgaatcctccaaggtactgaattttgtgctcactggatcttcaacaagcaaattactaacccccaatttgaaatttcttcaacactttatttttcatgtacatttgcagcctgcaatcaacagcattccgatggtagagagacctgcctctgtcgtttccatccctggaatggtacgaaaatcgatactttttccgtcagtttctctatctcttggtctgggtccaatcatcgttgttgatcacttacctttccaacagaatggagattcgcggaatatggtggatgtgaagccagtgattaccgaagaatcaaatgataagtctaaggtatggaagcttactgaagtcggcgaaccctctcagtgccgttcattgagactccctgagaatatgagagtcaccaaggtactaacacatagactgacataactgtacttatatggcttgattctaatgactcaaaacttgagcagatatcgagattgattttcacaaattcgggaaatgcaattttggcattggcatcaaatgctattcatctgctatggaagtggcagcgaaatgaccgtaatgcaactgggaaggtacttatggtctaaaatcttcctttaagatcgccaaaagagttgaaatcatgatgaaattcaatttgagattttgtgtaggcaacggcttctttacctcctcagcagtggcaaccagcgagcgggatcttaatgacaaacgatgtggctgaaactaatccagaagaagccgtaccctgttttgctttatcgaaaaatgattcctacgtgatgtcagcatcgggaggaaagatctctttgtttaatatgatgacgtttaaggtaaaatcccagctacagacagcactatgtctaatgtatgcaaacaatgcttcatctgttacatttaattgtgttgttggctaagcgcagacaatggctactttcatgccgcctcctcctgccgcaacgtttcttgcttttcaccctcaagataacaatatcattgcgatcgggatggatgacagtacaatacagatttacaatgttcgtgttgatgaggttaagagcaagcttaaaggacattctaagagaataaccggcctcgctttctccaatgtattaaacgttctggtttcgtctggagcagacgctcaggtgctgattcatctcatgttttgtaataaagaatccaaatccttagaagtcttagtgtgaatcttttggtttttgtatgcagctttgcgtatggaacacggatggatgggagaagcagaaaagcaaggttctgcaaattccacagggaagatccacgtcttctttgtcagacacgcgtgttcagtttcatcaagatcaagtacacttccttgtggtccatgaaactcagctcgctatatacgaaacaaccaagcttgaatgcatgaaacaggttttagtctttatatatgttcattctctctccttgcatctgagtaacccttatagaagaaagaaatgtctttattttgattccagtggcctgtgcgtgaatcagcagctccaataacacatgccacattctcatgtgatagccaattgatatacacaagtttcatggacgctacaatatgcgtcttcagctctgcaaaccttcgattgcgttgcagagtcaatccctctgcatatttgccagcttctctcaggtgagttaatgaaatgaatataaactagtgcaatgttggatcatgaatcttgagtcttcatgttgatgttttgtgcagcaactcgaatgtccatccactggtgatagcggctcatccgcaagaatccaacatgtttgcagtgggtctgtcagacggaggggtccatatattcgagccgcttgagtcagaaggtaaatggggagtagctccaccgcctgaaaatggctcagccagcgctgtcacggctacaccttccgttggagcttctgcctctgaccagcctcagagatgatctgcttcagtttcttactctgttttttttgtgggggttttagatcttttccgatttattattgttttgtttgtgtggggggaagaaagcattctaacaaggtaaatgaattaatagcttacaagttcttcttaattggttaattcgatgttgcttgcctctgatattttggtcttgagaaatatcagttttgcaaaaggacgaatttgcaattttgcactccgaatctaagcacgaactaaggattgaatgccacgtgcagcttcgagataggtttggatattcgttttgagatacgaaggaagaattactaaggcctatgcggcccacggcccacagacttatatatctacaatgataaatatcttcaaaaatagtaattttgagaaaatattgagaagagacagagaaaaaaaatcgagtgaaaattatctggtgtgtgtatctagaagaagctacagagtgggacgaggtttaaactcgccaatcgccattgacctctcgcttgctttctttaactaaaatg

SEQ ID NO: 10714 - DNA, 3000 bp, Unknown
  misc_feature (1)..( 3000): cDNA_ID_4266572_gDNA_ID_2213669_Annot_ID_182230 3000 nt of promoter + ATG
taaaacaatttaatattttatatacaaaatcaactaaatcttaatcacataaaattagcacaaaaaaaagtattcaacaattaaaaaattatcaaatctctatataagttttgatactatattcgaataaagtgtaatattccttttcaatttgtattctttaactaatttaagcgaactaatatatttgctaatcttatacctatcaaaaccgactatcgtttcttatctttatagtatatttgcaagatcttttttggtggatttggataaaagtgcatatcgtcctactatattatttgggaagtacattttaaatgtaaccttaatttttgtaattaattacatgacaatgccattagaaaaatttaatcaaaaacaaaatcttttaatgacatcattaagattaccaaaatcatttaacgacaatattcatctcttaattatagggtttattggatttaaagacgggtcatcaaagatttcctaaactgaagcaaaatatattgaatattaaaatatctatctgttaccaaattataaacaaataagttcgtaaaacaatttaatattttatatacgaaatcaattaaatcttaatcacataaaaattagcacaaaaaaatgtggtacattcgggtctatagtagttttgcaagacttttttggtggatttgggtaaaagtgcattcgggtcatgtagtacattcccctattaaataaatatggtgcactcctatgttattagctaaaatatttagattataatttagagtcatatcataaataaaattaatattaataaaataaatggctttttggcaagacggatttggagggacgtgtttttgaatcaacattaataaaaagtaaaatataattaatccactgtttcaatacgggttaaattattaatttattattttttaataacaattaatatatataaatacttaataataattataaactgtaaaaatataaatattttataaaaataaaatttacaagttttaatatatattacttttaaaaaataaatcatcccgcggtataccgcgggttaaaatctagtttcatttaaacttgttaagatttaaaagtatttgattatttattttgaaatatatgaaaagaaaataaaatataattccttacagtccagacatggaaacaaataaactttgataatctcttcaaattataaattataaatagaaacgttttcatcataactcattcagaaaataaaaaataaaaaataaagaaaagataggggtgaaggaattagcatgattttgattatgatgatacattaagttaattacccaattagatttgaaagtataattttcttgaagcttcaaaatgggtgagtaatataataaaattatgaagcctcgggaaaatgtaaatgaaattaagtagatatgggccagaccaacgatattaactgaataataattgtggactaaatattggactccgtaaaagcccaaaacaaaatataaaacgaacccacacgacacgagttattatcagaaacattactgttacaatgcaaacgcgcaccagtagagcgtatagcgcgtgtgtcgaaaatgcctagtctatatacccaccaaaaacgctgtttttagcctaaatactttattttaaaagaaatcagcgcgtgggagaacccatgaacatttgggtttgtttatccattgttttgatatttatttatttcggttaattccaaaacaaaggattgcttcttcttggtatttttgactaacaaatacttttttttggcgacacacttatgtatagcaaaactaaaaagtatgaattcaaacaaacaaacaccggtataatatgtttacactaaactaaactaggagaagatgtttaatttatgaatgaaaccaaaattggaattattcactaaatgacgatttcgtaaactcagcttaacatttattgacgataacatcataaagagctcaaaatgatattgtactacataaaagaaaattctcttccatactagctataaaagatatttcaaatgaaacaatagtattattggttacaagtaaatcatagtgtacctcttaacaagtcaaataacttaaaaagatcaaaatatgcacaatcattttattaacaatccatatatataactgggaaaattaaagtggcgtaaatttgatcaatttatgtagctagccggtgattataattgaatatacgatgatgttccgagacaagttagttgatcaaaatattaattcatacatatccatccaacatatgttgctattacaatttacatatgataatcttagggcaggcctcataatatatacattaattggtaaaatctggtcaccaaatttacgagcagtagtaatcaatattagtagtagataacccagtttttgtttttttggtctgaagtagataaccccatttctatccataatatctttgtatttaagatacgttttcacgagggccagccgtaaaattgaattaaaatcccatttgtttataagtttatagtaaaatatagtagcttcagacaagtagtactaggaaaataaatcaacttaatagaagaaccagatctgtgaacggagaaagggacatatgagtttgtcaaagtcaacgatagaaacggttacaagaatatccaatgaaagagagccacgtgggagatgcagctgaatttaagtaagaatgatctcataatcttgaccatccaccaataaaaagcttaattaatacatcatcatccaatccggtggagtaaatgcgtagatggatagagaacggtgaagtttccaacaaaatctctgactctgattcagctttctatattcaatcgttcccattatctcattttgtagtttagttttatcctcaacaaccatcttcttcgttatattccttgagataacaacaaagcatcgttcttcacctttaccaaaaagataaaaaaaaagaaaaatg

SEQ ID NO: 10715 - DNA, 2070 bp, Unknown
  misc_feature (1)..( 2070): cDNA_ID_3037797_gDNA_ID_2213669_Annot_ID_182211 3000 nt of promoter + ATG
ggtacgaccaagaccatgtcatcttgtttctgaccggattgaatgaactccacaaagccgataatgttccagtttggtacggcggttcgttccttaaccacggatcctttcatttgggagggtttaggacccaactcgaagttgccgtttggtaataaacctgaaacaaaaaatattaagaaatgttaatttataatctcggatttgagttgaaatgagctttaactagagttactaccatcgcggactggggccgataagacgacattcgaagagatgaagaggagagctaagaggagtgctgcttcttggtacatcatgacttccttgggtgatagatgaagatcagatggtgagtactatccaaagggtgaagaaaggctgggtttttatgagtttgagaatagaagacgagcactggttttgaagaaaacaacgggaatgccactggaagcatcctgggttctattgtcaggtgccacgcagacacagacagctagctcaggaaacatttgacttcatgattagcatttccatttcttcaatgtattgtttaaggggctgccttaacaaccattatattaaactatatattcaaacgtaatttgcgtttgcctatctaaattattcacataaattttcaaagtattaaaatattttttggctttttcagaaaaacatttttgaagatcagtacatccatgcgtaaacgccaaaaaagttctttttgaaaaaaggtttacgggtaagtattccttaaaaagtgattaatctggaaaaaacatacacactaattaatataaatatatagggtacgtaacaactaatgcaaacaaacaacggaaaactaaaatatgtagagaaaaaaacatatatatcatcaccactcaactataatgccatggttttggaaaatgaaagaaatataatgtatatttgagatgtctctaagattagtcatttaacgccatgcaactcatcccaactctaatcaataaaaaataattatgattttcgtatagaatgcgacaaccaaaagttaatgacgggggaaaatatgtgctgttttggaataaatcaactcaacttaaaaatgaagtcaaaaatggtattgattgatgttagatattgatcacattgggatgaacacgtgcaggggtaggttgttttctggtgcagggcacgactgccgactttaccgcattagaagtttcgatcaatattcctaatgtccttattaacatgtcaaccattatcataatccaaactcttcccaacatctttgattaaattatgtatacattagttttaagtttcaatttgttaggcaaagtagagagggacattatggtgaaaaaaaagacaagggacattaagaaactttagttatacgtcaacatatatataaaagacaatggttgggagagagatcacgtgcgacaaggctggaaagattgatttgccgtaatttcaaagcgaaggatttaaaaaaagatgagtcagaaaaaaaagatgaggatatagttcgggggtttgaacccgacgtgaatcgaacacgcaaccttctgatctggagtcagacgcgctaccattgcgccacggatcctcaggtaattacatctatacgtttacttatttatactaacaattagtgaatgataaaaaattaaaaaccccttccgattctaatttcctggcggagcaaatttagggtttatcgtttgcatcggtctcgcgtctcgtttcccacagacacatctctcgaatcttttgaaggccttcattgcaatagattgctcgtaagggataggtaggcctttatgttctgccgcttaatttcttcgccggattctgtttgattcattttaaggtgagtgaccccatcgcttttagattacagacaagtatgtatttatggtttgaatgatgcttattgtcttgttgttagcttagattttacattcagccattaatttagtattaataagcttcggttctacttgttttaagcagttaaatgctttaatctctgaatctttgaaacttgctcctctcttaggaattaggatg

SEQ ID NO: 10716 - DNA, 3000 bp, Unknown; identical to SEQ ID NO: 10705
  misc_feature (1)..( 3000): cDNA_ID_2716426_gDNA_ID_2213669_Annot_ID_132753 3000 nt of promoter + ATG

SEQ ID NO: 10717 - DNA, 3000 bp, Unknown; identical to SEQ ID NO: 10704
  misc_feature (1)..( 3000): cDNA_ID_2716422_gDNA_ID_2213669_Annot_ID_132755 3000 nt of promoter + ATG

SEQ ID NO: 10718 - DNA, 3000 bp, Unknown
  misc_feature (1)..( 3000): cDNA_ID_4266553_gDNA_ID_2213669_Annot_ID_132756 3000 nt of promoter + ATG
aagaagcgagctgttcttaaggatatcactaatgttacctgcgagaattcttacacaagttgcttcagtgttgcggttgttaactacacaatgcagcattttagaattgctaagtttatatgacaagaagtatgtttttgctgacaattgttgcttcttctttttacttaggtggagaatatcaagcagataaagaagggacgacagagttcttcttcttccaaggtggcatcttcttcggctacttcacaagttacagatgcaaaggtagaagttgtgtcaaattcagcaggagcaagcttgtctgtttttacagatacaagcttaggcacaaacgaaacatcctatagcattatcgcaaagccaagctccagatcgcctccaagaccctttgggacaggtgaattttataaatggtcatttactgaagcttgagtgggcaatgtataacatttctgatgcatctttattcttgcaaatggtttacagttgagagaagttgtggtggagcaagtagcccgaaattcgttgacattgattcagatgacaaagatcctctactctgtagcctttatgcacctgacatctactacaacctgcgtgttgctgaggtatttatcccttggattttgatatcttacgatgatgcatttgaggcatttgaatccttacgacttgtctacttatcagcttaaacgaagaccatttcctgattttatggagaaaacacaaagagatgtgactgagacaatgcggggaattcttgttgattggcttgtagaggttagttctctacttccagtttgtttgttgcttacttatgaagtctttttgtgtagcttctcacaactcaaaatttcaggtctcagaggaatacacacttgtacctgacactctttacctcacagtgtatctcatagactggtttctccatggaaactatgtggaaagacagagacttcaattgcttggcatcacttgtatgctcattgcttcgtaagttcctcatccacctaaaatcaaataatgctctggtctgaacacaacatctaaaagagttcttgcaggaagtatgaggaaatccatgcgccacgcattgaggagttctgcttcatcacggataacacttatacaagagatcaggtcctggaaatggagagccaagtactcaagcattttagctttcaaatttacacccccacttcaaaaacattcctcaggtaatcttaccagacagtgcaaatgctttatcatgtgttgttgctttttagtctttggtgattcagagtattcattcatttttgcaggagatttcttcgagcagctcaagtttctttcccggtaatgtgcttttcttttatcagatcagatatatctattgctcataaaacatgtagcagaaagattgaaactttgttggtaatttgtctgcagaatcaaagtctggaaatggagtttctggcgaattacctaacggaattgacgttaatggactaccctttcttgaagttccttccttcgatcatcgctgcttcggctgtttttcttgccaagtggacattaaaccaatcaagccacccttgggtctgtaattgaccaactatcttcttcattaagaaacacagcgaatcttgaatctcactcttgtttactttattttatgaacagaatccaactcttgagcattacacaacgtacaaagcctccgatctcaaagcatctgtccacgccttgcaagatttacagcttaacaccaaaggatgttccttaaactctatacgcatgaagtatagacaggacaaggtattaaaaaattattaatcttagtttggttttcttaaaccgaatgaagaaatctggtctgtttcggtttaacagtttttttttttttttttggcaatttacagttcaaatccgtggcggtattcagttctggagagctaccggacaagctattcatctcctaaccgatatgacacacgaatctgtagtaacatttttctgatggtccacattcatctgtctgtcaaataaaacagtgtcttcccacggtctctcatcattaccaagtaaccggattcggtgttagttcggtttagttgtagacaggtttggttctttcaaaccggacttgttcttgtcggtaacacgagttaattgtagtggaatgtacatttttcccccggtttattcaaggcaatatctggtctgcttcgaatattttatctttttattacagttgacagagagacaaagcattaattacacattatccaacggagaaattgtgactcacatagtatgtggcaagaattgctttttcgttttacgaaaaaccaataataaaaaattatcaagttggtcttcttcttcctcgttgctgatgtgtcgctctgcttgagagagtcagagagtcaagagagaaaaggggtcgagaatggcggtcgcaatatctgggagtagtttgatatcgtcgactcttcagcattataataatcggatttatatccgagattatccgattccgtgtcactcttctaatccaatttgcaattcttttaatttcaaaagacgttcgttctctccttcttcccccaaatttaacgaccatgtcgttaacccttcctcttcttatttatcctccaagctttctccaattcgaacccattcctctttcgctggtaaacgcctccaaatataatctcttttcttttcctcgcttccttctaatttttgaggtttgcttttcttttcttttgatgattgtttggctatttcgtaaattttatgcaaaattgctttagaatttcctcatgagattgttttattactctcctcgacgttctctggttgttttgttctcttgttgttgttgttgttaagggtttgattgtttccattgtgttggtttggctctgcaacttcaggttttcagattgtgaccttctttttttaattacgtgtgtagcgtgtggctgctcctggattcaagacaattca

SEQ ID NO: 10719 - DNA, 3000 bp, Unknown
  misc_feature (1)..( 3000): cDNA_ID_3037779_gDNA_ID_2213669_Annot_ID_132758 3000 nt of promoter + ATG
ctacctataatgacacgttttcctgtaactggcggtttttatatctccacgaaagcaagtgaacagtttggtgattagcttctacttcgtgtggtgtgggctcatttatagttatagccacttagcatcttctaaactgtcattagtggatgtaattgcatgtgtacggatatcttttcagttttaatttctattagcctggtatcaaaagaagaagaagaagaagaaatcactgtcaactaaaaaagaagaaagaagaagaagaaatcagccctgatctttaagctcccacgtcacgactgatgggttcgattaaggagaaaaatatataatttgattatattatccactagcattcacaaaacgagaaaaatatatattctaaataccattatttactttctaaatagagttgaaaatatcattttaatcgcattcatgttacctttgcttataatcgttggaaaatataataaactttattcccatatatatttgtttgtgtttgtcaacttcagtccaataatttaacattagaccaaaaaaaaaaaacttcagtccaatatattcttcgggagagatcttcaatagtgttccttttgtctacactttgttgtcgctttactcctttaaattatcattccaactaactttttcttggtaaaaaagtttcaccattatatatgtacatcaactttcactgtcgtcggtcgaaaacaaatcatggtctaacaatatattcctaattatctatcatcgtacactacacactaattaggtacaatacttcttcattagtttaatctttcaccgaatatcagaagaaatcccaactaatatgcgtgtggatcttgtaaacaatgaaaagaatgttcccaccaaaaaaacaatgtgaacagaactaaatgttgaaacttctacttcaaaattgaaataaaatctaaaataaaatatataatgaacatcaatcattgtataaaagcgattaaaagtttcatgatttgggataaaaaaagttagagatagataactatcccttttttagtgaacaagtataaagtttttactgaaaagtttttcagtgtccggtattaatttcatattagtcatattatttacatgcaatatgaaatgagatgtcaaaaaagtttagacaaaggaaaagagcagaacattaattacagcagcgtagggtcacatgcgtaagtcacgtgactctgtttttcgttggggaacatagaatcataaatgattttttcgatggttcacgacactattcttagaccaataagggcaataagagttaaaccaggggctaataggtcctactggcgacacatagacgaatttaccggtttcgattacaaacccgtgaccggtaattccggtcagccattgttttctaagtttgttttctttcgttataatgcgcatggaatgaaacagtcgtataattcatttaactcgactcgtaacaaaatatgtgagataataataagaagtacataaatttggtagctagtatttaatgttaattgatactttttgtctcaaataatcgaaactgcttttaggctctagaaaactgatattgatgtcttggacatttacttgggtataataaattgcgataacataatagagcggtccgagacttagagaattacgaaaccagtaaattctatacagattgtttatccaattaagcccaaaccaatccaggtttcctacagtgggtcaagaatacatcatggcagatttgatacatcataatgccattatggtatcaagcccaaaataagcccagttattttttctttcttttgttgtcattccataaaaatctacataacggaatccagaatttgattaagatcttattccgttatgttccagataattagagtgtcatatctctataatgaacttcatattaaatttctttgtcttaacatgcattagaaaaaagggtttaaaactctattaagaactaaatatatcaataacatttacagtataattttaaaatttagaatgacaaaagaaacattatagaattttaagaaatgatttgggaatagacaaatcaataaacctcagactattatgagatttgtttttgtctggaaggaaattgcttaatcaggtaataaactcaacaaagcaccttctaaacaaggagtcatccacgaccgtccgatcagattagtacatagaaacccttaagatccaacggttaaagatttaagacagaaggacgaaatctgtaatcatgagtttagtaaaaaactaataaatcaatcagtcttctccctatttactgcaactctgcgaaagctgcaaaaataaaatcagccgattcctatttttttatttgtcttcctgtgaagaatgaaaaagaagaagagtacaacaagtactaagaagacgaagaaggtttcaacaatagcttattcgcagcttttccaattctggtaaaaaggcttcattaccattttatcgtctactcttcttcttcttcctgttttcgatcttctgtctttttcggtaatttccgaatttgtgtttcaagaccgtatcatcttatgctacgattgaatttgttggaattccagttttgggttcttcaccaagctcagaatttcaaactgtcagaattgtttgaaagagtcaaacttgaactgggattttttttgacttagggttcgtcagatgttggatttgttaatccttgcagagtcgtttaaggggtttacaaaatgctttatttataatcctaaaagctatctactttctgatttttttcccccagttcttggtttgaattctaaagctgtttcctgtgctataacaggtgagtgtttcgcactacattgctcttgctctactggagattgcggttgtgtgttacgagagctagagttgaatttgctttggtcaacacaatggggacttgtggttgctgacttttgtgattttcagttttctacttggatttag

SEQ ID NO: 10720 - DNA, 3000 bp, Unknown
  misc_feature (1)..( 3000): cDNA_ID_2032973_gDNA_ID_2213670_Annot_ID_132762 3000 nt of promoter + ATG
aaaatatggagtttggaatttataataataaaggaaataatcgattccatttggttggattacacagttaagtttttgtgtttcttttgttatatgtatatgagtaaatcaaaaagacaattgattgaagtgtaaacatatttcgttatgacccccccaaaaaaaaaaaaaacaaacaaacaaaacaattttcgatatagtttttggttctggattaggtttatttgatcataattacatgcatcatttctttgattactatgaagattttcttaccaattaaaatttcgaattcatatctcttgattattaaattaaatacgagtgtgaatatccgtttatcgatcactccaatcatgattatgattcttgtgctaatccagcaaattattaacaagagtattgagaaaaaaacgaaaataagaaaagggaaagagtagtgacccatggagtatgtgaataattatcaaagagaataagagatgacaaccaaaaggttgtggaataatggtccctgccagctttctctcacaatcaatatcgaccctatttggattttctggatattcgttaaaatttgcgataacgattgtgaaaaatattttatttgttagctgatctcaatattatgttccaggtatttgcataatcttctgtttaaagcatattttgtctttctttttgtttcgtttctcttaactatatattatcgcggatatatgataacaatgatatatcacaaaacaattgtctgggaccattttgaataaactttttctcaaacattacgggacactggactcgaaccttaaatacgattttacagcgtcactagttgagattactagcataaagcataaaggacccgttcaagctatttatacaaagttacaaactgaatatagcttgaaatcctttagaaaattttggaattaccggttgttatgtaaatatagatttagtggtaaacaaatatgttaatcaattagtggtcaacatatacataattccttacagaaaaaacaaacttaagagaagttaacatatccatatatgggtatgctatacctttcacgtatgctatactagagactaaagaatagttatgtgatgtcgataaatgaaattcacacgcgtggtaataattatgggaccgtatgttacgatcactgcaaatatcattcttggttggtcaacaataaaaacaaaaacaagaaaaaaagaaaacgatttttcttggattccattcaatgatctaaaatgcatagatcttttgggttacagtttcgaagtcctctacaagcgtgtaaccatctgcaactattaaattgctttctttaatgcatctttaacatatttattgttagttggaatttaataagagcgaacttgtaacattacaatatttatattagatactagtatgtgattattccaaatacatactttggatgtttaaacttaatcttgtttcttcctacgtataaatattaatcatcgaggtaaaaaaagttttgtcttattttcgcgatgcatgaaggataaacctaatgactttaattttttgaaaatgtaacccttttactcatagattaattaccgtatgtttttgttgccataatgacagcctctacaactgtgatagtcaattttttctgcaaatattaaattaggaattcaatgctactatcaatagaagaaacagctgagtattacattttaatttaaagacaaaatttttgaaaaatgttataatttctaacaatattattaaaatatgatgcctataatgtatttcctatgttcttaaaatatttttttttatatttagttataaatacattatgaaccaataatagttggtgaattcaaatatctccattaatattttttgaaatctacaaattattaatatttagtcaataacaatgcatagaaagttccaaaaaaaattttgttaacagaaacttccaaattttttttttttatggaacaagaaataacagatagaaaactattttgttgtggaatggaagtagtaatatacattaagcaaattttaaaaaattatataagcctatacgcgctcaaagtatgttatctagtaggtgtaattaataatgcatggtgcgattcagaattgggacaacaatgaaaacggaattaaaatattaactttaaaataaataaaaatttgagtaaatgtgttttctgactattgaggggcaaaaaaaagacaatgccaaaagtctacgggtttgactgtccagttcggtaataatctaataactctgtctttgaccgcacgctcgtgtaggggtccttctgacattttcactgttctacccctactcgtgagcccacccttttcccatatcctaagggtaattttggaaatcccaatttaaaccgattgagaccgtaccggacttcctgggattctgctggagcatttatcaaaaattattagcacgaatgggtttattaatttaaaaactcacaacttgatcagataaaatttcataaacacttttacgatggattcgtacgatctatctaatgacttttttttttctaccacggtggatgaaagttatagtactattagccagagacaattgattatagatatatccattaatccatgatatttatgatataaatagctgttaaactatttcagcatcgcagctttctgcaacttttgtttttaatttaagagtttaataaataaaagtattaaaaggagcataacgaggcaacaaaagtaatgaacacggagaaacaaaagccatgaagctcattggttaggtttaagcttaataagaagattttattaaattttaatgacgatgataacaattatattttctgacttctttaaaaccccctcttacaaacagaagctccctttttcagtagaagtccgattcccaatcttaaagacaaagccattagaaagagaaagtgagtgagagagagagagaaactagctccatg

SEQ ID NO: 10721 - DNA, 3000 bp, Unknown
  misc_feature (1)..( 3000): cDNA_ID_2724793_gDNA_ID_2213670_Annot_ID_132763 3000 nt of promoter + ATG
attaagtataaaacacacacacacacacaatgatacattctgacagcaaattctcctagttccttgccttagcgatagatgtggttacatgataacacacaaggcaacagttaaggctaaacaacttttgaaaaggtaggagaaaatcaaattgaaggatcaaaacagacaaattttggatatcaatgtaaaatgaaatctctagatattgttgacacaactgttttcttttggcaagaaaaacgagtatgatacaaatcgaccaaacacaactgttttcttgcagcctatgcacaaagcatcgctaacaaatgtattgatgactgcgccgtggccctctccgaaggaccctacagcgagaatatagccatcgcggataatccagattcggggatgagcggtcctgtcgcgactaagtattggattgacgatgggccatggtacatttatgacacgaagaagattgatatcatttttaagaattcatgtagacttcttcacaacgaaaatactaccatccatatttagatctctttatgtctatgtgatagattttgatagaggcgtgtagaataaggtattgaactgacttgattttattgattcacaaactatggtatttatatacaatgatctctatcaagagataaacataaatccctaaaatataggttagaaactctatcatcaaagatattgtactaatcctaatcggataacatatatccccaatactcccccgcacgacaaacgtggtacgcaaaacacaaactttgcaatcacaaagcggaacacgtatgtcgtggacaatatgtcgaggacggacaaatcatgtaaataaacatcttagggtataaacttcattcttggggtggaacttcatcatgtcttcggtcttggtaaaagggaatacatcccgtgtacgcaaattatgctgctccacaaacaatcatctttatcttggacggtctataactcgggactaaacatgacctaaaaacatgaatgttccacaaactctactaatggctaaaccataaccaaactcccccgtaacggtaaaactattaccaaactctcttactaagaacacaaaaactctgaaaatttcttaactcaagaataattccagtaacataaaaagaaaaagaaaaaccaaaaccaatcctactaaaaacatagaaaaccaacgacttaaagttttggaaaaataatacccatgtgattaagaaacaatcacgtaacctccatcccttaacatgccgacatcttcgtcgttttcatttccaccgtcggaggcaccgtcttctccttcagtgatcaccatcttcataatcttttcttgattacaaaatctataatgcggaagctttaattatgatccacaaagatcgactgctctgataccatgtagaataaggtattgaactgacttgattttattgattcacaaactatggtatttatatacaatgatctctatcaagagataaacataaatccctaaaatataggttagaaactctatcatcaaagatattgtactaatcctaatcggataacatatatccccaataaggcgcctaagttcaggtgcgacaaggctccaacaatttctactacgatggccaaacgcagttaccaaggggagtcatcagtcccattatatgaatacataaatctgaatgataaaattgcatacctatgaatctatgataattggcaacgtcttcttcttgtggaacacgcaatggtaccctccccgagtgttaacacacatgctaccttcgcaacaatatttgtgacgtccattattgttgagtattctacactcgtccatatctgtagatgaaaaaccacataattataataagcaagcattttccacaatacaagaaaacagaacgagtcagtttctcactttgcatccacctaaaagatcttatgggttacattgtaaccactggaacatgcacaaactgaatatccaatctcgtactcataatccgtcaggttatatatggcacttgcaacggtgatgtgagcacccgacagatgagagattcacagtttgaattgaccattgtaggtggactatcgtacgtttcatcgcataaatccatcgagtatcactaatttttgaggaagggtatatgtcaaactcgtctgttaaaattgccactttgcaccctcgcctattgttgtgtttctactatccccttgtatactaagagaccagttacatgcccgatcacataaggttctttctttctgcagcatctatagccattgcaacctttttttatccattctcgcttctggtgctgtagtgcacaaatggagacgcaaccaactattcttggctcattttttctcaaaaggctttgatgttgcaaccaacaacaattacgctgttagcgcacgagaccaatggtaaaaggtgtgcccgtcaagttcaatagatctccaacctcggttccatcatacttaacaaaatcattggatggagagccacatcctatggaagtgaatcagtgatggtcatttggaaatgcttaatttttcttattatggttactttaaaatatttaaaaatttagagcctgttattgtaaaaataaataaaattggaatctattttaattatgttttttgttaatggattttagaaaaatatgggagccaaagatcaacgaatgcctacaaaaccaataatttgacatgttaacaaaaaattgtaaaatccaaaaaaaaaggtaattgaagctgataaccctcttgttcagcgagtgggttaaagtgtgaccgagatatacgagcacggcatcgttttacgtatcgtgatctgttggatctcaactcggttttcttaataatcagaatccggttagagattgaatttgggttttgttagttttgcttcttctctctgcaaaaatcctccatccgcttcctcacgaaaaaccctagcacagctccgagatcccttttgtcgccatg

SEQ ID NO: 10722 - DNA, 3000 bp, Unknown
  misc_feature (1)..( 3000): cDNA_ID_2715784_gDNA_ID_2213670_Annot_ID_132764 3000 nt of promoter + ATG
ccactaatgtttttgtagatttgataattcatctttgacaaaaaaaaaaaaaaggccgataatggcgtttttggtaaatatgtcaaacaaaggggtccactattagttgcacacaacagagacgtgtcgaaattgtccagatccaaatcctccttacgtccttctacacaaccaaaacaaaacaattcaatcaacaccttccattacgccacgtcatcgatcctaaacactttaatccaacggtttatcaacacgttaaataattcacacaaaattctccaaaacaacccacccgtccccactttttaacccgacccgaaccgaatttccccaatcaattaagagcccaacaaagaacaaaacaatgttaggttttcgtcttcctcacgaggttttagtggcgactggtggtgaccgtacaaattaggtttttccggtagagaaatttttcaaaagagagagtttttgattctgggttcttcaaatcatctcttacccttcatcgatattcatcaatttcttctgttttaaccctctttttcccctttcttcgctctgttgtgataccttcttctcagcgagtttcgaagctgttctctgttttcagagagaaggtgtgttgtgagctttaaggtgggtttggttttgatggatgagatttgggaaagagctgtagaagcggctctagatggtcaaacagataggttagctacacgaacgctaacacttgatggtgctgtgaaatgcgttcagggacgtttaccaccacctagtgttctcgagaagtttcagaatcttcagcatctttctgtagctaacatcggtgtttcttctctggaacagtttcctagacttggtaatttacagaagctaatcttatctgataatcggatcactgttggtttagagtttcttgttgaagctgggcttgattcgttctgtgatttggatttatctaataaccggatccagtttgttgaggatctagctcctttggcggagttgaagcttgtgtctcttgatctgtatgagtgtcctgtgactaggcttaaggattatcgatctagggtttttgggttgattaaaactttgaagtatttagataagactgatgctgaagggaatgagaggcctgagtctgatgatgaagatgatgaggaagatgaagaggatgaagaagaagaagaggaaggtgatgaggaggatcctggaagtggggagattgatggagatgaaagagcagaggctcctcggatgagtaatggccatagtgaaagggtagatggtgttgttgatgttgatgaggatgaagagagtgatgctgaggatgatgagtcagagcaggctactggagtgaacgggacgagttatcgggctaatggattccgtcttgaagctgttaatggggaagaagtaagggaagatgatggggatgatagtgagtctggtgaggaggaagtaggggaagataatgatgtggttgaggttcatgagattgaagatagtgagaatgaggaagatggggttgatgatgaagaagatgatgaagaggatgaggaggaagaggaagttgataatgctgatcgtggtcttggtgggtcagggagcacaagcaggttgatgaacgcaggagagattgatgggcatgaacaaggagatgacgatgaagatggtgatggcgagactggggaagatgaccaaggggttgaggatgatggagagtttgcggatgaagatgatgatgttgaagaggaggtgacactttgtacttcaaacattatgttttgagatatgaatgttgtgcttgggtttcactaattttcttgtttttttcactggtttgtagttgcggcagataggtggtgatagacttactacttcattttgataaatttttgtgcctaagttcactgtcttgctgctattcagagatcgatattagaactttggtgattgatggaggacatataagaggggactttagtatcgtctctaattttgctaccggtttagaatactagtctggtcttgcattgttttgtttgctgcataaaatatcaggttagatttacgaagtaccctgtcgtgttaaccataaggtatcatgttagacaaccaaagccaaacttgactctctttttttttttttgtgatggaatgcttccatgcgtgaagttatgatttgtcaaattgttgctttgtgtttagtgctaacctagtatttgatgaatttgataggatgaagaatctggtgaagggtaccttgttcagccagtttctcaagtggaagatcatgatgctgtgggtaatgacatcgagccgatcaatgaggacaatgatccagatgaagaagaagaagtcgaagatgacctgccaattcctgaccagtccttggcttcatcatctcgcccaaagagaaaacgagatgacgatgatgacggtgaggatgatgacgatgatgatgaggaacgttgaacatacagatcagaatctctagtttgatgagttttagatggaaaagaagctcggctccttcttgattcaggcggctatatctgaatgttcaaatgtcagttatggtcaggctggtagattttcaaatgacggttactcagcttggatttaccgcccttttagaaaccccactttatggagggaaagaaaaacacaaaaaaacacaaaggaagagtttcgagaccttgtttctctgttagagggtcttgtaagaatgcttatgtggataaatcttttgagttatatcgtcttttgttttacatccattacacttacacatgtcgtatcattattggtcaggatggttttgctaggattgtcgtagtgtgtgtgatgcactaagatcaaacggtcgtcaaggctctccttaaaagcttatgccgagaggttttttgctattttgtgtggtaattaactggtgagagagttcaacatccaatctttctctctctctctctatcttttatctctcacactcttaaaatg

SEQ ID NO: 10723 - DNA, 3000 bp, Unknown; identical to SEQ ID NO: 3312
  misc_feature (1)..( 3000): cDNA_ID_1820368_gDNA_ID_2213670_Annot_ID_182278 3000 nt of promoter + ATG

SEQ ID NO: 10724 - DNA, 3000 bp, Unknown
  misc_feature (1)..( 3000): cDNA_ID_2704702_gDNA_ID_2213670_Annot_ID_182273 3000 nt of promoter + ATG
atcattgtaacttatgtatacatctacatttgtatattaaaagagaaaaataaataattaaaagaaacaagaaaaaaaagaggaatcaagaaagagttttacgtagtcaacattagaaatttatatctacatgtgttcgaaacttggcaattgataattgagattctaggtaaacgttgccagtagaatgattttaactctcttggcatatataaattattgcacttgtattgtttttaagaaacaatatagccgtttttgtcagtaagaaaccatataaaaatgttaagtctcatggctgcttaaaatgtttcgaaacttttaaagttattaatagtcaactgcaagcagtagatggttggaattggatctactagtccatgataaataaataaataaagtaattccggttttcaaattggtttggaatagaaagttaattaatcaatataaaatccccaaaccttgaaaatcaacctcgttgacccatctttatttcacccgtcgatggtaatttgtcgcgtatcggttatagacaacaattactaatattcttccaccatatgcaatgtcaacaaagttactatgaatgattgatttagcgttagttttttttaaatcgtcgtcgtattcatcggtttggcatagacactatatgattctcgaaccaatgaactcgttatgtaatgtatatttgtctcgattatgattatctaatttttgttcaaatcaacaaagtactagtctattgttagaagcgttagttacgttagttgatatcatagccatgttaagctagtatcatcctcgacaaaagtaatattatcatcgatgttcccgttacattagactcttaatacatgttaattatgaatatccatatattaatatgattgtatgcttcaagaaaataaaaagatcatgatttgataattgatactacacttaaagtaattatagttttttttatttttttttattttcacatttccaaacatatgtgatcgaatacgaatggcgatgtttaagatgctaaatcaacaagatccttacacaaaatcgaagcaatttttgaggagtatgtaaacagtgaccgacttgaataccttcagtgccacgtttttcctcacttggacaaacttgttcttcatttttatttgtttggaccaagataactcgttattcattacgagggctttccacggaagaaaatgcactacctacaaaagaaatggaataatataaacttgaatgggccctgcttgggatatcaagacttcggcccagcaatgtccgtgcatgcaaatattttgttaatcactttttaaagtagcatttggattatcgcttagtatatttgcattcccatctattactaatactacaatactaggagcaaaagttattagttctttaatttgattgctagatagtgctggaaactttatttcaggaaatggaatttctaggctggctaaatagtgttctggattcttgagggaccctgttacgcctaaaaataatgttgtttttttgaaggtcatcaaaataaacattttataagacagtaaaaaaagaaataagacaattatatttatgtagtcaaacgcttgtttttgctggatatataattacataaaagttgcatttatcctttaatcaattgccaaaaagcaagaaataatatcaatccaatcttataaacaactatattatgaaaaagatgataattattgtacgcaagatgttatacgacacacgtaatttgtagatacacaaaaaggtcaaggtcaacaaataacacgatcaattgcattaaatgtgtactagcatggttatcagaaatttttattgataccatggaatcgatagacgacaaaaccaaccgtaatttcaaaatttccgtaattgtttctcttctcttttcttgttttatcgacgattatggaaattttttttttttaacggagatgtttggtccgacaacgtgacggtaaatcctccactgtcttcgcttaaagacaaacgacaattaatctttttaactcctcgtttcacttgcaaagttatttcatcattttagtagtttactctcattctactaaatttgtatttttattgtaacataacggtcatatcagtatttggttagttgattatgtgacatgactatggataataagacttgatatgaattcccatatataagaaatcgtcgatgacataaaactactttatctactaacttcataaggcaaaaatgagtagataattagattattagaaagagagagacaatgagattgatattttttatatgggagtccaaaatcaagatagatatacttgaaaacactcgaaccccacaaggatcgacaaaatatttctttttaaatagctcaaaaaaattatttaaaaaaattcaaaatctttttaaaatatccaaaatgttgaaaagttgtaaatcgataaaagagaaaaataataataattgtgccaatagagagaaagagagagacagaagaagaaagaaaggttcctttgtctcggaacaaccaaagagccaccacccaaaaaaaaaaaggttcttagctttttttctttctttcacacgaaatctcacgagacgccttatttcttcttctctgtctctttccgacggcgtaactctccggtggaatctcagctctcttatcagtagaagaagttttggtctttaaatgtaatttttttggttttgctttaaatttcaatcgttgttatcagaaaaagtaggtagcaaaaaaagagattttttacgaaaagcagattgactggtagctgaaacaacggaggagaattatagaaacgagtaaaaaacaaaaccctaaaggttgaaacttggttgacgaaaaaaatgagctgatttttttttcttcatttatttcattcttaactctttttcacatatttaagaatcagtaagaaacaaaaaaaaacagagtgagactaaaaaaaaag

SEQ ID NO: 10725 - DNA, 3000 bp, Unknown
  misc_feature (1)..( 3000): cDNA_ID_2715781_gDNA_ID_2213670_Annot_ID_182272 3000 nt of promoter + ATG
aaccaaatactgatatgaccgttatgttacaataaaaatacaaatttagtagaatgagagtaaactactaaaatgatgaaataactttgcaagtgaaacgaggagttaaaaagattaattgtcgtttgtctttaagcgaagacagtggaggatttaccgtcacgttgtcggaccaaacatctccgttaaaaaaaaaaaatttccataatcgtcgataaaacaagaaaagagaagagaaacaattacggaaattttgaaattacggttggttttgtcgtctatcgattccatggtatcaataaaaatttctgataaccatgctagtacacatttaatgcaattgatcgtgttatttgttgaccttgacctttttgtgtatctacaaattacgtgtgtcgtataacatcttgcgtacaataattatcatctttttcataatatagttgtttataagattggattgatattatttcttgctttttggcaattgattaaaggataaatgcaacttttatgtaattatatatccagcaaaaacaagcgtttgactacataaatataattgtcttatttctttttttactgtcttataaaatgtttattttgatgaccttcaaaaaaacaacattatttttaggcgtaacagggtccctcaagaatccagaacactatttagccagcctagaaattccatttcctgaaataaagtttccagcactatctagcaatcaaattaaagaactaataacttttgctcctagtattgtagtattagtaatagatgggaatgcaaatatactaagcgataatccaaatgctactttaaaaagtgattaacaaaatatttgcatgcacggacattgctgggccgaagtcttgatatcccaagcagggcccattcaagtttatattattccatttcttttgtaggtagtgcattttcttccgtggaaagccctcgtaatgaataacgagttatcttggtccaaacaaataaaaatgaagaacaagtttgtccaagtgaggaaaaacgtggcactgaaggtattcaagtcggtcactgtttacatactcctcaaaaattgcttcgattttgtgtaaggatcttgttgatttagcatcttaaacatcgccattcgtattcgatcacatatgtttggaaatgtgaaaataaaaaaaaataaaaaaaactataattactttaagtgtagtatcaattatcaaatcatgatctttttattttcttgaagcatacaatcatattaatatatggatattcataattaacatgtattaagagtctaatgtaacgggaacatcgatgataatattacttttgtcgaggatgatactagcttaacatggctatgatatcaactaacgtaactaacgcttctaacaatagactagtactttgttgatttgaacaaaaattagataatcataatcgagacaaatatacattacataacgagttcattggttcgagaatcatatagtgtctatgccaaaccgatgaatacgacgacgatttaaaaaaaactaacgctaaatcaatcattcatagtaactttgttgacattgcatatggtggaagaatattagtaattgttgtctataaccgatacgcgacaaattaccatcgacgggtgaaataaagatgggtcaacgaggttgattttcaaggtttggggattttatattgattaattaactttctattccaaaccaatttgaaaaccggaattactttatttatttatttatcatggactagtagatccaattccaaccatctactgcttgcagttgactattaataactttaaaagtttcgaaacattttaagcagccatgagacttaacatttttatatggtttcttactgacaaaaacggctatattgtttcttaaaaacaatacaagtgcaataatttatatatgccaagagagttaaaatcattctactggcaacgtttacctagaatctcaattatcaattgccaagtttcgaacacatgtagatataaatttctaatgttgactacgtaaaactctttcttgattcctcttttttttcttgtttcttttaattatttatttttctcttttaatatacaaatgtagatgtatacataagttacaatgattctctatattcgatcgacaaaaactatttcgagtcaaatttcccaatagagctttaaatcacatattgactcaaatggtttaacacgttaaaatgatctagacttgtaacaaaaaaaaagagcttagtgaaccatgttgaattactttttaccaaacatacaatttgggagaattatatgtgtttcaatttctaatgatccactaatgtttttgtagatttgataattcatctttgacaaaaaaaaaaaaaaggccgataatggcgtttttggtaaatatgtcaaacaaaggggtccactattagttgcacacaacagagacgtgtcgaaattgtccagatccaaatcctccttacgtccttctacacaaccaaaacaaaacaattcaatcaacaccttccattacgccacgtcatcgatcctaaacactttaatccaacggtttatcaacacgttaaataattcacacaaaattctccaaaacaacccacccgtccccactttttaacccgacccgaaccgaatttccccaatcaattaagagcccaacaaagaacaaaacaatgttaggttttcgtcttcctcacgaggttttagtggcgactggtggtgaccgtacaaattaggtttttccggtagagaaatttttcaaaagagagagtttttgattctgggttcttcaaatcatctcttacccttcatcgatattcatcaatttcttctgttttaaccctctttttcccctttcttcgctctgttgtgataccttcttctcagcgagtttcgaagctgttctctgttttcagagagaaggtgtgttgtgagctttaaggtgggtttggttttgatg

SEQ ID NO: 10726 - DNA, 3000 bp, Unknown; identical to SEQ ID NO: 10721
  misc_feature (1)..( 3000): cDNA_ID_3037097_gDNA_ID_2213670_Annot_ID_182269 3000 nt of promoter + ATG

SEQ ID NO: 10727 - DNA, 3000 bp, Unknown; identical to SEQ ID NO: 10720
  misc_feature (1)..( 3000): cDNA_ID_2032973_gDNA_ID_2213670_Annot_ID_182267 3000 nt of promoter + ATG

SEQ ID NO: 10728 - DNA, 3000 bp, Unknown; identical to SEQ ID NO: 10725
  misc_feature (1)..( 3000): cDNA_ID_2715781_gDNA_ID_2213670_Annot_ID_132765 3000 nt of promoter + ATG

SEQ ID NO: 10729 - DNA, 3000 bp, Unknown; identical to SEQ ID NO: 10724
  misc_feature (1)..( 3000): cDNA_ID_2704702_gDNA_ID_2213670_Annot_ID_132766 3000 nt of promoter + ATG

SEQ ID NO: 10730 - DNA, 3000 bp, Unknown; identical to SEQ ID NO: 3312
  misc_feature (1)..( 3000): cDNA_ID_1820368_gDNA_ID_2213670_Annot_ID_132771 3000 nt of promoter + ATG

SEQ ID NO: 10731 - DNA, 3000 bp, Unknown
  misc_feature (1)..( 3000): cDNA_ID_2716544_gDNA_ID_2213671_Annot_ID_132776 3000 nt of promoter + ATG
gattccagatttcgagttagtgtcgttaatggtataatattgtatttccttatgtagtgtacccactaatccaaattctaaaatcgttataaattaggatgcaagtctcttctacctccataattacactatactagaatttaacccgcggtacactgcagagctattattttttaaaaaatgtaaaattattttttaaaagattaattgaagatatatcatattaatttgtattttaaaatatagatatctatctctgtattatttagtatatgattactattattttggtttcaaattttgaagtatagatatgaaaacatatatttttttaagtaacaatgtatggtagattttaaaattttgaatattttatccgcagtataccgcatgtcgattttttatagctattttttaaaattttaagttatatttgttttgttaatattgtatgtttttgtgtttaaggttgtatgattgtattttgattgttaattttatgatttcatctgtgatatacctttgtttattaatattgatcaaaacccgtcatcccatataaatctgtctatattatctcgttagctaaatgattagtgttataaaatccaagaaaataaattattattgttctaattccaataatttaggatctcacccgtggtataccgttccttgaatgatttaaaatttatattactaatatagattttaaatttatcatataaagtatatgatttcaagttttgtgcttttaatttaaataaaagaacggtttaaatgatgataaatatagtttttttttcttgtatgtgtatatggttttttatgtgaatatttaattattataaattagtatttttattgctatgcaaaatgttgatataaatatttgctataaatcggatttatgcatattttttgaagtaaaattcacgatttttttttttaaaaagatatatgaaaagattgtgtagagatttttagaaacaaattaggcaagatatagtttggttaatatctttttaattttttttaactaaataattaatgtcagtgacaagcattgtaaataaatcccaactccaaaatttatttcatgtaaataaatggctgtaaaaatgtatatgttgatctttagggaatatcacgtaattctcgccaaaacatttaatgagatttggagacaataattaataatatccgcacgaattattgattttagttattatgagtcttttctttgagacccaatgttcaattataagcccttacactataggcccataaggcccattagtgtttactagactattcagggtttagcgaaaaattcttcgtttcaagtctcgaactttgttggaatcggctaagtgataatttcgaagcttgatcggtaaatccaggagcttttggatcggaatctgttcgctgatgctttggtgaaaatgggtttcggtgcaattagatcgattttgcgtccattgtcgagaaccttagtttcgcgtgccgtcgttaactactcgtctgcgccgttcaatgcgacgattccggctgctaaacccgagttatgttccttcttcggtggatcgatgactcatttgaggttaccatggattccaatggctaaccattttcatagcttaagcttgactgatactcggctcccgaagagacgacccatgactcatcccaagaggaaaagatccaaattgaaacctccaggttcgctattttgtgtttgatggttgattttgagcttcatttttagtctggggttgtaaaaattgatgctttgtttgtgaaattagagatgaatgttgtgtgattcagaatggagttagtgtaatcttcttaggcgggtgttgtttatgctgttttcaaattagcatttggtgggtatagtattgatcttgtgtaatcttaagtggaaagtgattgttttgaatctcaattttgggtgttgttactgagaagttgatatagccagagataatctacggtgggattgtttagatgaattaaaagatttgaggataatgcagggccttatgcatacgttcaatatacacctggccagccaatttcttcaaacaatcctaatgagggaagtgtgaagagaagaaatgcgaagaagcgcatagggcagcgtcgtgcttttatactggtttgtctgatttctttctagcttgttttaagaactttgatagctttttgatctttgcatagctctacattgttagatgagaaatgttggaatgttgaatcaatagattgtacaaatgagaaataagtttgaaagctgagaaatcataagtaacctatgggatgataaaaggctgtatctctcttagcttctccgttctgtttccatttacaaaacaatctgcaatgttcttttttagtttactaataagatggagttctcgtgtatatatttttttcgcagtctgagaagaagaagaggcaagcgctggtgcaagaggcgaagaggaagaagagaattaagcaagtggaacgtaagatggctgctgtcgctagggaccgagcatgggctgaaagactgattgagcttcaacagctggaagaagagaagaagaaatcaatgtcttcttgagatcaaacatagaaataatcctaaatgacaatctcttttcttgtcttgagttagagaattactcttctttgttgtgtttggcatgttctcttgagagttaactcgctatgttgtctgaagaactgagagttacttgacgtttgtgttctttatatccagtcatgtgtttcttgtttcatgaatttggctgacattcttttacttacggcaacccatgaaactgaatcaggaccagttaccgccacgtgtaatctaactagaggcctgatttcatattccgccacgtcatgtgtgcatccatttctcaactcttgtgataaagtcttcaccttggtcgctgattttcctcctctctctcacaactatcaccaacaagaatcatg

SEQ ID NO: 10732 - DNA, 3000 bp, Unknown
  misc_feature (1)..( 3000): cDNA_ID_2716532_gDNA_ID_2213671_Annot_ID_132781 3000 nt of promoter + ATG
ttatagaccggaaccataacaaaggggaacaagttataacatgtcaagagtaatagaacaattaatccaacatcttaagagatatataagagtggaaagcttaagccaagtgtttggcaatggtagactgaagctcatctttcttggctccaacaactttgtccaaaatcttcccttccttcaaaaacatgaaggttggcatcgcctgtatcgcccaatcacttgccaccgactgttccaacaaaaccataaaagagattgtgatcgaagaaaacaatatctctcaagaagaagggaaaaatgttggtgaatgtaccttcaattcatcagtatcaaccttgaggaaaagcacgttaggaagtttcttagccaaatcagcaaagaatggagcgatgaaacgacatggtccacaccaagaagccgtgaaatcaaccaccaccttcaacaatataaccaatcatgaatcattttcattgaaaaaccatttacactaaaaacatatcatatcgtaagaattgtgaacattacatctatcttcagcgtaaacatttttctagggatcccttagtttcatagaattatcaacatgactcgtaatataagtcattatgatctcctaccaatcctaggatctaatctatggtaatgcagatccaagaattgtcataaaattcaaacatgaattcatacaaaaaagaatcatatcattacattgcttaagtatgagagatcaaagactctatttaaaaacgcaacccaaaacaaaccaaatcaagaataataacaaatccatatctcatcaaaaacaaaatgaaatcaagaaatttgggagaagaagattacaagagttttggattcattagccttctgaagctgctcgttccatgtctcaacggtgtggcaggcgatcacttgtccttcttccgaagccatcttctctctttttcttctctgttctgtttcttctcctcttgtgttttttttttttcaattacttagcatgcgcgtcacctaccaatcccaattttgcccgtcaatagtttttctcttctactttattcgacgcgtgattttgtttcccataattacacccaccaattgctactttccttctttacccaaatcataaatattcacacttttactcctcaaagttttacttgtaacaaattaaccacacacaaagcaaagttgtaaatatccatcgtaaaaagtaaaaaacattttgtagacatcatttgtacattatgattcaaatctacagctgaatcagtttcttgaaacaatacgttccaatgatgaaccacccggtaagcaaaaccactagaatcgagcaggaggcaatgaaagtccaaccaccgagtaagattcctatagtgtagactatgagtggaggcaacaaggactttactatagccgttttgttcacccaacgtcccttgaaaagcactagtgtcgcgagattcaccacgttccatccgcctgactttatagatagacggttcaggttgttggctacaaaggaatgacagttgcatgtgagtatgttatatgagtgatgttggtactcttgcgtgctttttctcagtgcatcatcccatgttggctctttctcatgactatcttcttcttgctcatatctcctctcaccattgaacataccagaactggaagaacgagatgactcctgattcaaatccaaggccaatatgaataaattgttactttgtatcaaggttgaaaatgaaagccggcatcttgcaaacgttaccatttctttgttgatttgaatatatcgagaaacagctccaaatgcaaaattatcaacacagacaaaattaggtcctgcaaagtcgaggatgacaccgtcttctctgcagataccgacgtggccgatgaagggaaccagccatgaaatgaagggaagaggtgtccaaacaatgcagcatggaaaccggtctcttttgggatcaattttcataggatccgataatccgatcatcatgcgatgttctgaatctgttgctgtctctcccatatccaaatccagttgagctcaattatttgattctctgtaagcaaaaaacaacacgtccagtgatccccatgtaagtaagattcaataaagcacttggatttgatatgtaaaagttgttcttaatactcgaatagctgatgcatatcatttacatcgaacccaaaacataaatgcatatcatcccatcatggaagtccgagttgggactgagccttccagaagcgataagcagctccttctagccctgtgctgctttggatttttgcatataccaagctactaccaattcattgattactggataaacttgaaacaagagtcgtctaattgatattcaatcaacacattgtgctaaaacactacgaccactacatagaaaagctaagtaaacaattctcgtagttctacgaatcgcgagtcttaaacactaaacgatgaatccatacgaacatggcgaacgagggatccagaaaacgccattaaagatacataatccaactagcaacgagtcaacatcaaagcatcttcatagacattgattccgaaactttttcataaagaatagatcaaagcatacataccagttcaagcgaccaggaagacgattaatcggatctaatacaatcttcaatcactgcctttttcctgggaaatttttgtttctctctcggccccaattttacgaacgatgacactaaagaacgtgtttggctccttgtttaaactaatcctctctcggatatcttcaccgtttcaaggatagtagtataaacgacataacgttcggtcaaagagaacaaaaacgtcaggatgttattctattaaacgtctgatatatctatacggcgtagttttgaagttgtcgactattcttcatcgttctctctgctctggtaaggagattgctgctacctactgatgcaaatctgccattgatacatctgcttgcggttagggcaaag

SEQ ID NO: 10733 - DNA, 3000 bp, Unknown
  misc_feature (1)..( 3000): cDNA_ID_2716528_gDNA_ID_2213671_Annot_ID_132782 3000 nt of promoter + ATG
cctctctttttctcctccacgtcaactctgattcccaccttcctctatttatttaattataaattagtcttccttatttcttcttaattagtattctcttatttttattactcctgaattctaaattatattctgaattcctgctatgtcattttcttttattttgggtcgaatatctatctctcattggcaatggttttgagatcattggcctattggcaatggtttagaattccttagaattattgtaacaatgatttcagaattgaaaaaagctgtttactaactccatgcattttgaatttatttgagggaagaaaagctttcgttggattttggagtattgattgacagaaagcgcctagagaattgagtgataagcaattttgttttatataaacacttgcccccaaaataaaaatattttttctttaataataaaaataataaataacgacttagaaaaaaagaagagaatgttatggacaaaaaaagagactgtggttagactgaaaaacgcgtgcagagaggccgcgacagtcttatcatcaattaaatttcttcttaattagggtatcctaacttgcattttactctcagttacgttctacacagtattacttaattattcatattatacacgtataggtttttaatgcatacgtgcaacgttgacatgtagaacagattttgaaaagagaaattgtttagtataagtgttgtttcgataacatcctaagtttcgtcatagtccaaatctactccagattcataggcttctcagttccatccatctcttattcaaattccatacaaattaaaagtttttttttgtgaaactccgttataaattttgtgtgttggttgctggttggttctgcctgaaactattattccgaaatgatgcttatacttatttgacatttatatatttttgtaatgtagcaaataaagaatagactactggagaaaaaaggtcttttttttttttttgtcaaaagagaaaaaaggtcattgtctcgattgtaatgtatccatcacaaccccttgaattaattgattccctctattaatctagtatactcgaatattttgtggttttttacttacctctaaaactatatcgatatataatgaacaacctaactattgttttcaaattgagagcaataataatcattcgattattaacttaaattattggatttgtaaattaaatcaagaaccggtacggaagcgtagggcggcgaggcaatgcttttaccctgtctcaaactattcattattcccattttgaatcttaatacttttgaaatgtctcatttaaccccttctacattagtcaactctctctactcttttggcaaaatccttttaaacgtccccatcttttactttatttttatttcatgtcctaacttttttatttatatgacacccatacatacttctctagatttcggatttatcgggacatattttttcgtgccgttattctcaggcaattcaaaggataatacctaaaaaaatactcagctaattataatgattagttaaattaggatccatgatgctcacggcacgggcatagaggtgtgtttgtctgtatataaattctgtaaacatttagtagtactattatacaaaaagataatgcagtaacatagggcacctcaacaaaatcgtacgtttgtctctctacaagagagagtatgtttacgtgcatttttatttatatataaaatattactgtgatatactactagtatatacagaaatgtgtatatcataatgtttttcgtttcctcggaaacatggacaaaagcatctgcttttcagctacaaactttaaacacttaatttaagccacaggtgcacccaaattaatattttttaaaagaagattatgggctaatggatgattaatgcctataatttgcaaatcctccttactttaaagtaattagttagattatttaatccacatgtttatctatttgatgaggatttttgaaaccttgaagtaccttacattttttcaggcatttttagtttgctgatgctcctaactcgtagacaataatatatttgcagcatttgtcacaattagtctcatagtcactcatatatacacaaaatgaaataaaaatgaatggacctatggacttttgacaaggttttgtagtcagttctagatcatgattaggaggtctaattaataggtcccgaaatatatatagaactatcttaggataatcaaaaatagtattctgataccgtaatgatattatttttactcctttttaaggaaaattagttattcacattccaccatttatacatataaaaatttcatatatgtaagaaaaaaagaagaaagaaaaaaagcgggtttcccggaatgaaaaggaccaagagagaaaaatccattttatgctaacgtggcagcataataaccgcccgattatatatcaacgataagagatgaattgttttcattttgtaacaacaaaacatgagagaaacaaaattatatttttgcaaaatctggaaaaacaaaacaaagaaacaaacaaatgaagaagagatgagaggagacagagaattaaattagaggagcagaagagagagagagagagatatagagattaataaggtcatggcggcgttgcagagcgcaagaaagatgatttaaatctctcttcttcttcttccttcttacatatctctgtgtgtttcttaaatactctctctctcgtaccgacaaacaagttttgctttttcatcagagtctcaaaaagctattccaacttcaatacactacaaacccagagaatgaattcaacctaaaaaccctagaaatcctctaagatctagagtgagaaagttagagtgtatagaactacaaaacataggatctttggttttgggttttgttccattttcttgattggttagtgggtgagtggtggttatgggtggtggttgttgtcttggtga

SEQ ID NO: 10734 - DNA, 3000 bp, Unknown
  misc_feature (1)..( 3000): cDNA_ID_2705073_gDNA_ID_2213671_Annot_ID_132783 3000 nt of promoter + ATG
tatccaactccgatcaatacattcatggccggtacacaattctttcccaacccaagatcatgaggaaaatctgacataaaagcaacataactcttttgaattcttagaatagaattagggtttataaacgttaattgtcggatcatattatataaaagagtatgcagaagtggggaagtgaatctgtttatgcttcccctacttttagacactcaaagttgttgcaagttttaggggtttttaaatggaaattcaattcaaataataccattgtctttttatatggttttgtgaggatatagtgttgtgtatcatttaaatgttaggagcacaatatagctcttgttgtctgaatctttgtttcattaatgtgtctgtttcttgtttgtgaaacacgtaaccttagaatccggggaaaatgtttttcatctttatataacaccttttgtgtcttctttcttctattcaatataaagaagaattcattacatttgtaccatacattatagtacaatttcatatttttcaacccattttattttttatttttttcaaccatggtttccgttacgacagaatatggtctgcccatcccatgcatttaatggtttctaaagtgtattatttgttagttactagtaattgatgtatgccataattgacatgtgatagaatcagagaagatgactagaagagcgacatgtatagatgtgacatgagggtgcgttctacaatgtacgttaatcccaattagttacttctcccgccgttgcccacaccattagttctttcattactagtttactataatgatttagttaatttctactatcaggtttttgatttttctattctttcacattgactagaagtcttgaacaatactactaatctttctctattttaaaataagtcttttcatgatcttgagggaatgtttctgttttaaaaagggtttttaatgatttaaatgtaacgtttgtcaagaaatgatctcattgtctctttaaaattacttaaatagaaatttaatataaaatataatttaaaagttaacatcctttgtaagaatacaataggatattaaacttttcttatatgcatgatcagtgtcaaaaccatgtctaatttcaaatggacgcgatattatttttatttgtataactaaatcaatcataacttgtaaggtaacatggtcgaagaaaattaatgatcataaggagtttacctttcatgtaagcttacgtatatataaggcatccttgcatgagatgtatttttacaccctacacgatgatatacacacacatatatattaatagatagagattttgcagattctcatagtggatatatcatatatgtgaaacctatatatattacatactaagaaatatataaatatggaatgcaatgccatcaatttcagacgagtatgtttggctacagaaagctatttactcctccttcctctctttttcatcaatcatttcggttttgctcatttaaatacaaacaacccttaaaccaaaaaaaaaaaactaaatacaaacaaccccatcttcgtcttctcttctttcatactctcacatttaattttggtttagctttcttaaagtatgtaatatatcatacaaaaatatgtaatatatgatgtgaaagaggatatataagaaacaataatacaatgggaaaaacaaaactggatcccttatacaattgagatatattgcgtgacaacattacataatcggtaaatttggtacattcaaatagtgctgcggtccaatcggccgactcgttccgacttttactctctgccgtatcccacagcttgtcatatcccacaaaatttattcatttctaatctttatatgatgtttcttactagatccaccagtatagtgtcgtatcccttttgttgtgtgttctcatatagtttctatgtaaatttgatgtctcttatttggataatttaatattctgagaagaaagccaaaagagataaaatcataaaaatgctggctaaaatttccaagactaaaaatctaaaatttgtcattgtccgacatttataaatccaaagcttcaggttccactcaaagaaaataattatactatttggatgtcttttggaccttttggtgcattgatgacaataagcaaataatactatacacattttgcaaatttgcaggatgaatgttacaactggatatatagtagaccaataaagagaagacatgtgtgatgtttataccaatgattgacatttgagttatgtgagttttaattagggaaagaactgaaccaaacgtaggagaaactgatcttcatactaatgctcacactacacattttattagtatctcaaaagtaaaaagcaactttaaaataaaacatatagttttgtgaaagatgcaaaaattgagaaggtactaaactattattacttatattagtgaatcaaaactttttcttaatccatttggagttgtttagttcaaatgaacggaacatatgtaatccaatacaaacacaaatataaaaaaatacaagagaacaaacagagaattccagtcaaacatgtttttataaataataccataacaaccaaaaaatacactcaaattgaaatcaacatacttaatcaatcaaaattcaaattaaacagtcttcgaatacattataccaaaaaagcacaagcttgccatgtttaatatatccttgactaggcgttacaagttaacattggattacatggcactaatttttcatggacaacaaaatatgaaacacagagaccataactaaatttagagacacgaaattgaaagtcccatatccgactctataggatctttgatccagtcttgtctcttcacaacctctctttctcttctttttcttctatttttacttccttcaactcccattttactccttcatttttcttcttcttctttctccataactagtactatacgcaagaccgtaaag

SEQ ID NO: 10735 - DNA, 3000 bp, Unknown
  misc_feature (1)..( 3000): cDNA_ID_2184864_gDNA_ID_2213671_Annot_ID_132784 3000 nt of promoter + ATG
tagtgttaaaactgcaacaagtaaaagatagaaattttatgcagaatataatggttccttttttctactatggcagtctttgaaaaacattgcgtggggtaaacgtactcgggtcatattggatgttggatgtggagtggcgagctttggcggtttcctctttgaaagagatgttatagcaatgtctcttgcaccaaaagatgaacacgaggctcaagtccagtttgctcttgaaagaaagattccagccatctcagcagttatgggctctaagcgactgccattcccgagcagagtgtttgatcttatccactgtgcacgttgtagagtcccatggcataatgagggtggtatgcttcttctggaacttaatcggatgcttaggcctggaggttattttgtctggtcagcaacaccagtctaccagaagcttgaagaagatgttcaaatctggaaaggtaatgactaaagtaaaatgcttgaacttaactagagttcctccttcttttgtttgtttcactgaacctgagatgttttgagtgatgtagaaatgtccgcgttgacaaaatccttgtgctgggaacttgtgacaatcaacaaggataaactcaatggtattggtgctgcaatctaccagaaacctgccaccaatgaatgttacgagaaaagaaagcacaacaagcctccactgtgcaaaaacaacgacgatgcaaatgcagcctggtatgattgtttccacaatttgcatagggaatgaataaccataaggttttaacagaacaaagaaagtcaaaacttgaatggaaatttcaggtatgtacccctacaagcatgtatgcataaagttcctaccaatgtggtcgagagaggaagcaagtggcccgtgaattggccccgtcggcttcaaacaccgccttactggttaaacagctctcaaatggggatatatgggaaaccagctcctcgagatttcactacagattatgaacactggaaacatgttgtaagcaaagtatacatgaatgaaataggaatcagctggtcaaatgtgaggaatgtaatggacatgcgagctgtctacggagggtgagcatcaacgaaaacaaatcaaactaaaatctcacttaccaaaactaaacctttttttactaactacgtaaaaatgcaggtttgcagcagctctgaaggacctacaggtgtgggtaatgaatgtagtaaacataaattcaccagatacactaccgataatctacgagagaggcctattcggaatatatcatgactggtgtgaatcatttagcacataccctcgaagctatgatctcttacatgcagatcatcttttctcaaagttgagaacaaggtataagcgtaactcataatatccacaccttttggtaacgtttcatcaacaataagtctcttgttttgttttgttttgaaaggtgcaatcttgttccagtaatggcagaagtggatagaatagtaagaccaggaggtaaactaatagttcgtgacgaatcaaatgtgataagagaagttgagaacatgttgaagtcactgcactgggatgttcacttaactttctccaaacaccaagaaggaatcttaagtgcacaaaaaggattctggagaccagaaacttctcaatgaaagacgctctgagaatctgcatttgaaagtagcagaagcatcattataatacaacacactactcatatctataatccccaaaagaatttgtcagtataagaaatagctttagtcttcttaaactatatagactaattagaacatttttgttttccttacttcatattgctttttttaacatggttatgatattctcttgtaaggctatgaatcatttcactgggaaaagtaaggcacaccaataaatgaaattttgttccaacaagtagaaacatagcagtaatgaagaagagattatgatgctttagcgataccacaagccaaattcaccataagctattgacaggtagcgaaaagtcaaattacaaaaggaataaagtagacatgaaatgaaaccaacaatcttaagcccacatatgaattcaaaagagaggttaagaaagaagagaatctgacatcatgggcagagtaggagctgaagaagatgggtttctgcaaatttgaagcttttaatcgcatatcgctgagtaatcatcacaaacagttttgaattgaagaagacgggaggagaaaagccattgttaatgagatacccaaatcgtaaaatttcagaaagcccagcccaacatagcccaatacagcccaaatatgtatgtgattgggtaacgaaaacgagaccgttcttttttcagtcatctctcgtttcacagtagcgcgtatgtacgctttgaatttacaaaaagtagacatttttatgaatttttgccggttgagtaaaaaggtaaaaaaaaatagttcccaccaaagcaaaatatttcaatttttatcttttttttttggttcttgggaaaataagagattgagaaagaataaagaagagaaactcacaacttttttagttttaggagaagagggctttggtctggagtcactatcatattcaatgctttaccaaactcacctcttcttctaaattctcaccactcttcttcttcttctcattcaccgacatatctcctctcttcactctctgtctcttctcatctcaggtaattccaattttagttttttttgaaggttacttactcgtcacattgtttgaaaaagattgaatttttatctgtggcttagtcaaatcatggttcgtttcaccaagttgtggttctgggttttcgtgatttttcttttgggtttttctgtttgaatttggaaaaataaaggaacgttttttttttcggggggagttttttttttaaagataatttttggagagtttttgataattctgaggaagccaaaagaaaagaagaaaacctaatttgtgttggtggggtttgataggaaata

SEQ ID NO: 10736 - DNA, 3000 bp, Unknown; identical to SEQ ID NO: 10731
  misc_feature (1)..( 3000): cDNA_ID_1014850_gDNA_ID_2213671_Annot_ID_182288 3000 nt of promoter + ATG

SEQ ID NO: 10737 - DNA, 3000 bp, Unknown
  misc_feature (1)..( 3000): cDNA_ID_2705069_gDNA_ID_2213671_Annot_ID_132785 3000 nt of
atttttattttactcttattccaaagctacaagagacttctttttttttaaaatgtcagtgaaactttttattaaataaatcggtttttggatctagagtttatgatttgggaaatttttaactatgttttttaattggcttactcaacaaaaattcaagattaaattaaatatcaacataaaattaaaaaattaaattattaattttagaattcatgctttaaaccaataaaaaaccaataaaaatgatgaactaattatttaacgacatttttcttattgttaaatctatatcggtacttccgatatattccgctactcatggatactgggttcagtttcggttacggaatttttggtagggatttttaggacctattcgattatttctaaaaactggttcgggttcggtttggatatttttcggatcggaccaattcgactaatcggttccggtttctttcccggggcaaggtagagctagagatttcgaagaagaaacgaaagggagagagagagatagacaagttccgcgatgaacgaaggctcgagcgaagaagtaacgaggacggtaatggaagagaaaccagaacagaaacaaagaggatctctggagaaaggaagatcgtgcaaaggctatttatattactcttccactctcaaatccaagtctaagaaccctcgctgcgtcggaatccctcgtactctccgtcaaggtattcgtcttttttgagtcatcgaaagctccaatttcccctttgattgatgattttaatggccgcttcttctatattagggttttaaaatccaccgtgtagctctctgttattgtaattgaatcttatcttatcgcaaaattggccacgaaatcaattttagattaacgaaaatggttgataggtagattccaattcagaagttatctcaaaattgaaaccataggctctgtataactgaagagaaatgtgtgtgtttgcttttttttttggtaactcaattgttcttctctttgctgcttcaatggtttatgcatatgctaaagacgttttataactttgtagttcctgattatgttgttggacaatctgaagctgaagcttctaaagaaggaaggaccttagctgatttttactatggatgtttgggttattccgtctacatgactgataaagactcatctgccattaagcaacatacaaagactcaacttcccgtttgtgtcggtcttgaggtttgtcgctcgtaacacttttctcgaaaatccattacattgctttgaaagttacatattacgcccatggactttcatcttaagcttactatcaattgaatcggtttggtgaggcagtctggtcaatctttttagtttgctttatgcataatttagaagacgttatcaacttctgcaaaaactggaatatatctagaagaacttgataaacttcactggcattaaagaaagaatatggtcgacttggtgctgtctgcaatctctattttctccattgaactttgttatgttcattgcagatattagcagatagaagagcagcttctggcaatacttcatctgttccagcccgtgtccaaaatagaaaaggtacaccgaagctgctctcattcaccagtttacaacaatgaaacgagtcttacctcttatgtgctcatcatttttttttcctattctctagattctcgggaggtgcctgtgcctcagcaccagaacaataaaccagcctctgccactgccactgccacaaacacagaaaacggcttcttaaccaggtaagcaaagagcttttgctttcgctggagatagctttaagatttgacttgttgtagcttaatgggtaatggcattggtatttcacttgactgcctaattgattgtacgtgaatacaaaccttaaagtttgatccttgtacaactcttggatctgcagtagtttagtcaaactaatcagtcttatctaccataaagcgtgcattgttgtatgtgagtcatgaaatgagcattgtttataacacacaatattaaattccgtgggaatgtatcaggttcacaagaaacgcaaacctggttgcagcaggggtgatgaagaacatgaagagagttggtaactatgtgaaagaaactgtggatgattccttggacccatatcgcaagcgaccaaaataaagaaactttttacattagatgtggagacaacaaacccaaaaaaaatgaccgacagacgacaggatatgaaatcttatttgacacttttttggattctcttgaatcatcaaaataataaaatcaacaaaaaaaatggctgtatgatttgtttaagcaggccatgtcccaaagtaatatgtacaccttcctcagttctggtttactgataatattcatatcccaatgaggttcacttttattacatatgaaatatcaaaacatttctaagactttgttcttcatggtgaagactaaacataaaatatgaactctgctttacaacatttactcatagattctctgttctttacacaaatgctaacatatcaaacttgtagatatttgtgtttctcttactgaaacagagcttaattatattaattataaaaatctgaaactcatggtcaagtttgggaatttagagataattagcacatggagtagagtaattaaaatgaattgggaaacgtgcccatttagggaaagacaaagacgcacgctttctctatcatcgtcgtccgtctgtttcatttgatggtgcggagacgtctaagcgatttccatggatgacaccaccttcataagaacaatcctcaccaaacccatcttcaaatttttcttcttttgaccaccattgcatgcttacccgattgggaaactctttgttatccttattgatcttcttccaacggcgatttcccgatccaaattttgggttgattgaattcaaagtttccgtttttacaaaccaatttcgggaaagttttcatcttttttttatg

SEQ ID NO: 10738 - DNA, 3000 bp, Unknown
  misc_feature (1)..( 3000): cDNA_ID_2716520_gDNA_ID_2213671_Annot_ID_132788 3000 nt of promoter + ATG
aaacccatgatctggaaagctaataacaacatccagtttcaaaggatcctgcatgaggcaacggaatcatagaaaactcaacaaacaatgaagataagttggataaaagaagtatctaatacaatccgtgacctagtacaaacctcgtcgtagtatttaacatgaacaacatcatatatgttaggctgctgctctatttgagcaaatgcttcacaaatcggcattcctgaaacaacacaacaacttgattagtcggttctgatcggaagatgaaacagtctgctaaagaactaaaaaactaacacagcatttgctattactaaagatgatccaacagttatctaaaccacgcaatctcgagaaacttcatcgcgatgttttcaaagaattcccaaaacaacacgcaatctccgatcgcaaatcgatttgcaatcttccaaatccgatagacgcagcgtagatgatactccttctcgaattctagaaactaacgaaaagtagcagaaattatgatatttgagagaatcgcaattaccgatagagaaaggtccgatgccgacgccgggacggagatcgaacacggtggcgcccatggcggtgccttccaaacgtcgtctaggtctctgcatcacaagtttatcgccgatcttcgagtaatctttcatttgttggatcaatttcctgaatagaagagaataatacacaattctgtttttgctttctgatttctgaagttctgaattaagtcgggtccactttagttcctctttttacaaacttttgctgcacgggtcgggtttgggttgttgtttgacctatccatatatgatggtacttccccaccaatcagaatttaacacctactccctctaataaatttacgaaaaattaagctatataggcagaaataatttcaattaagctaatgagtaatgaccaattgaccatgtaaaaatgtacaaatatgaaaaatatgctctagctgcctaccattacaattttgttctctggttactaaaaatgtacaccttttcaaaaaaataattagagatatatacttaatgttttgttaaataattcataaattatgtgatgttgttctgcagacacttaattaatacggttttgtggttaacatcattagttgagaagattgtgtgttagaaatctttaatttgtaaggtgacaaatatttaagcactctaaccaaataaatttgagatctgaaatcattccctcacgttggattgtactcttttttccttgttagctcgtttctttttttacttcttagcatcatcataaatcaaagatattgactcgattgaatagtaccttcaaggtaaaagaaaataaattgaattttgactacaataatctcagtagctatgtcatctacaaaattttgaaaacttcaaagaaaatataaatctacaaaatgtagttttaacagaaaatgtgttttttccaaagtttgtaagactccgaatatcaccgatgtatacttttattagaaatagtaaaaggataatatattactataaacaaaaagatcaaagttcaaaactttataacaaaagtgaagtctaacatgcacgtgaacaatgcccaacaaaggtacaaagcctacctacaataccatgtgagtgtcgcgaatgaagttattcaagcatagatgaccaaatcatgaaatttctatgagattacactcctttgggttacaattttatgtttttattttagtaaatagatgttttaaggtacttgtttcttcaaccttgggatactaattgtgtgaaatgcgtaaaatgatgtgaaaacttagaacatattgagtcaaaaaaaaattctattatcctccacacttgatttcttggttggattcttttttttttttttttttttgtttgtttgttgtttgttaatatgtaagaatattcatagtaactaccaagttgaaaaaaacaaaaaaatcatagtaactacccaaattgtagaaggttatttgcaaataactttctattttattatttatttttattttttttgctaagcaactttacaaatatagggtttttaggtggactgttaacaaaatttacattgttttcgcatcacagttttcttattaaaacatacaagaatatgatttctttgttgtgtgttggtatttaagaatattcatagtgaatacaaataacttttctatttttagtttttgtgaagtaactttacgtaggtagaagttttacgtggaatgtaaccaaatttacattttttcttgtcatgtttttcttacaaaacattcaagaatatgccaaggaatttttaatactatataatattttttggccaaggaattttacgtaggtaagatttttaaatgatgttgataaattttacgttattgtatatgaacattgtatattacataatatcatattttcttaaataataaaataaaatgctccatatattttgctaaattggacaccacaaatagatgtctacctatgtttttttaagaaaataactatctacctaataagctggaattccatatctacttaactcaaatgttatttttggataaatatttgaaggtttaaccaagctaggaaatctaacataagattttagaaatgaatttgaaatctagaaattatagtatttttggaatctgtagaaattggtactagtatttttgaaataataaaaattctataagcagaaagaagtgacaacatttttgttatacatttggtcataacaaagtaagaactaaagaagtggaaaagaatagaagaagaaaaaaaaagtccatatgattttttcttcccactagtcttcgttttctaaacacatcacccatacttctctccatcatcatcatcattcatcatcgccaaaatccccaaagaacctcagattagggtttctatttcactagttgatctgcaagtactgctcacaattttttcaaattcttcactaatcatg

SEQ ID NO: 10739 - DNA, 3000 bp, Unknown
  misc_feature (1)..( 3000): cDNA_ID_2716508_gDNA_ID_2213671_Annot_ID_132791 3000 nt of promoter + ATG
ctttgttttcgagagattccaaactcctcccaatgcagtccttgtcaaaacagcagtcacgtttgcagttcttggcgttctaaccgttctgttcccgacagaagaaggaccgaccttgcaggttttgttatcactaatagctaccttttacttcatccaccaaaggctccagaagaagctctggactttcctttacgggtaataagctgatcttaattgtaaaaccgttgctacctacttgattagaatccacacctgatcaggttgatattttgaaacagagcgggagctttcatcttctcgtggctggttgggactttcttgatggtatctgtgatcccaccgttcatcaaaggaccaagaggttttgaagtcatgtcttcgctcctaagctatgttttgctttgggtcgcttcgagttacctccggtagcgtgctagcttttttcttttccccgtcttttgggccagaaattcaagtgttatctcggatatatgaaaacacacgaacagagaaaaaatgcatcattttcatgtgacagagagagagagagagagagagatatgatttgtggtcttggagttgttatttcacggagacctcattaactttcaaagctcagtttccaagttgtggctacaaacaaagaatagtaagagttgattacggaaattagtcggatactagtctgatttcataggaattaggaaacatggcctcatagcacatcatgtgctgtctcatacataataactatggctgcatgattttgtccatggcctcattatatgtgcatggccctcttatttatttctgtgtctaatttatgtatatctccaccgaaataataaacattttagatcaaaaccatttgtcagcctcacgattaatttttttctttcttatcaacataattctttttttttggcaatgtacggccttccaaactagtgaacgttgtaaaattgggctatcattagaagttcaataatttgaaacgctaaaaaggttggctaacgcaaattttggtcgtttcaaatataaatataaggtttatttattaattaatccatctagatgattaactagattggtaacgacgactaatctttagacgatattttcattgaaccactttatgtatgttagtaagaaaaagcaaatgcacatgccttcatgtgctctgcttcacttatcaatagtgaactaaaaattcgttaaccataccttaaaaacgcgaaaaatgtaaataaatgcttgtataaaatagttgcttgcaaaatcatataatttattgtgtggtactgatgtgatgtaccattaattaagatcgaaataatgtgtgttcatcataggtgaccgtttaatgatgtgattaatcaactttagactgattttggattaaaacattattattagataatgtgcataattattttttggaataagaaagatatggcctagacaaagtcattattcttttttgaaaaaaatatgtggataataaaattgagacacatttatggcatatattattaatgaggagaaatctttgaaattttgcaatttggttattaaaaaaattggcttcatttggtaaccttttaattaagctgaaaccaaatgtagataaattacagaagctgatccatttttttttattttttttttaatattcttggacaattgtctgatttacgagcaacaagagagagtctctctacacaaaaaaaaaatcattagctgctctaaatgatgctttctttagcgcgctaatataattagctaattccttaattgtaccaatgaagacgaagaaaacaaaaagccattaacgatttaacagctccacaattccgactttttttgaaaacacctgaattattttttatcgctgtagcgaaagcgaaataggtcgcctgagaaatctctggtttctccgaatcgcctccttagcatcgttcctccgtcggaacaccgtcgcttctgccattgttctccatctcgcatttggtctcgtttctcagatttccatacctcattcgctgattcgcaggtgagaacaaattcgttgattgttcttgatccctttaccggattttatgattttgtggcattggttcgtcttaatgctttgcggttccggtttctagtagaactacgcacgatggttggattttggtagttttggttttgaattttgtgagattcgttgatttgaagttctagtgtgagtctgtgagccggtgaaaggaatttctgagctcctcgccgaaacttaggttcatgttccggcgaggcatgtcacactattgaaaggatttgaaatttgtttgggtgtaattgcgtcgtgttcgttattatattagtactttcttggatcttacggctaagtttgtgttggattttttgttctttgttgtttaccagagacatgtgtaagtagtcacaaactttgtttcctcactgtgcacatggagttaccaaagattcttggctccacattgaacattctgcagaaacggctgtgattattataatatcaaatctgttaaggtaactgatttcttttgtttaagtgttttcttgtggttttaggcaataaaatatgagcgtaggcttgaaacttatgcaacatgcaaggaagactttttgacagactgtttaggagggggaccattgcgaaaacacacaaaatcctctccataatattatatgaaacttgggtttctttatgtctcaaacaatgatgagaaaaaccatgttactgatttcgttgtcattttctgctgagatattttggatataaaacacgtggatagagacaatgttcttctgccaaagacatgaatatagacaagttgataagtagtctgatgatctttagtgattgatttgtcctcataattcctgttcgctctctctatatgtatgacattgctttgttcttgacctggtttcttttggggtaggatgcgggaagggaggtgacgggtgaag

SEQ ID NO: 10740 - DNA, 3000 bp, Unknown
  misc_feature (1)..( 3000): cDNA_ID_2705061_gDNA_ID_2213671_Annot_ID_132794 3000 nt of promoter + ATG
gagttgtagataatttatagctattttaactatactgtaaatccgaaaatttgtaaattgatcgtaaactgtttcgcactaaaatagataattacataaaacggattagctcatttgacacttttaacatgatgaattgatgatcctatcaatcggttgttttattaaattttgatgtcgagataacgagaaaaatggttatgtggcgtagacgtcttgagactattcaattgtgagatatgaagaaagagcattgacttgatcaaagggacgacaagtttgatccacgtgattagacctttttcttttcttttggaaacaaaaattgagtcacaacgattttgacagcccggtttcttatagtctgactggtgaccggtcgcgccgtcgtttgttcttacttccttggttggccaggcccactcatgtaataatttattattgaaaccattttaagctacgcaccagttttattatataaagctgtatgcatgtcacctcggattaacacgtagtgaaattatgacctcgtatgtgttttctttttcttttaaaaatcttacgaccatgacaatgttttttacgaacgattccacgactaacagaaatttacgatagatagttctagctaggtagaccacgtttacatataacaaaattatttttaacatacgaaatcacgagaaacgactttacatgcactatgctataaatttctgataacagtgtctccattattactattctttcacattttctagaattaatcgaacataattaatatatgatgtaaaaccacttaataatttactagccactaaaccaaatggcttcactaatatatgtcctattaatttgaaataaagtaattaatatataaccaaaatatttgtataacactaaaactacaaggaaacatctcaaattctaacaaatttccaaataaattaaaattctgttaactagtataatactataagaaaacatcgtattttctcaggcgatgtctgttggtaaaaccctcggaaaaggactttttcagacagatttatgagggattgttgtctcggtttgacgtggttgccatgtcaagcaactagtatatatgatacaaaaaatgaatatgatgacatcaagcttaattaattagattcaaaatagataaatagatctgatattgtttagtgtcagaccaatttaatccatcattatttttaacaaaataaataatattcctaattccaaagacatgattattcagtcatcacttgctcgatctgtatatatatctctccatcggagtcaaaataaacaaaaacatattgacaccatacccattcacctgtatataagagtacataaatatacataatggagataaaggaagcaagtaagactcaaagagaaagacgaggagcatcgtcactaaagcagatgctgatgaagagatgttcaagcttcgtgaagaagagcaacgaagaagacgtgcccaagaagggctatttcgctgtctacgtgggccacttcagagaccgccacgtcatcccaatcacatccctcaaccatccaaccttcaagatgatgctgcaaaaatcggaggaagagtttgggtttaggcaagagagcggcctcaccattccttgtgaccaaaacacctttctcactctcttagactcaatcacatcttactagctaggatcgtagttatatttttgaggcttcctcacatgatgataagaggaatatatgtacaacttttgtttttcatggcctttcttcaattgtgttccacgtttcttcacatgcatgtgtgtctgtctatctctacatataatatacactaactgatgatctaatatctaaaatcatcgatacagcatattaattagcatataattatgataatgttaatgagtcgtataatcatggcgccttcaatatcaaaatatcaatatttaacatcttaattatcgttaaccagtacttatgatacatgaaatgataatattaggagtcgtataatcatggcgccttcaatatctgaatgtcaaagtttaaatactatacttttagttttgaacttgtttttatatatgctgagaaaaacataatcacgatacaaactagtaggagatgagatcaaattctgatcatcttacagtgtagtaaacacaaagcaggtaaatgcgcaggtgtgacggataagcatgaaaatggacttcctccgccgccacataagtccaactacatgactatttgttttctatcaaagattttattctgtctggactcttttgtttttggtttttgtcatatgattaaacagctaactcattctttttaaacataaaaaataatgaacgcattattcatgcttatattgcaggcagcagcatgcaagttgatcatttattataatggctttgatagtccggtacttctataccggtgataaacacaaagcaaaagtatagccctctaaactgtacatacaatcgaaatatattttttgatttcttaaattggttgtatagaattggaataacaatgtagttcaacaattttgcatcggctgtcacttgtcagcaaaatatataatttgtaacgtaacgtataaagaggtccactttctaagatatatgagattttgacagcatacaatttacgtttctattaaagaatctgtctctttttattttagttgttatacatacccgtaattaaaatgcaaatataagtatagaataatctgaatttttgacacaataataaaaagtaaaacttttacataacattgggttaacataactgggccagtatttctaacataactgggcctgcagtctatttacaaagaaggttacatgaaggccccataagccgacgactatgaattaggtagggtttctgttctttgacaaaacattttagggtttttgtgcttataaataagggatgcaaccaagaagaagatgaatattacgtggcggtaaagaaatg

SEQ ID NO: 10741 - DNA, 3000 bp, Unknown
  misc_feature (1)..( 3000): cDNA_ID_3037840_gDNA_ID_2213671_Annot_ID_132799 3000 nt of promoter + ATG
tcattgcaagaaagttaatatatagttcatatatacacatatgttacgattgatatatgcatttgatatatatatatatatataaacaacctctacggacttgctgatgtaattatctccgagaagaattctctcgccgaaaagagtaacagcctctttaacagaacggaaaggagctccggtttcgatctcggcccgaaccatgatcaagagatgtttgttgctttagttatatgagttggtccatgtcatgacgaaccctcagctttttataaagaaagaacacatatgtttcatgaaagattgcaactgttggttgttgtcacttaaacggatggtgactagattactgactaagatgaaactaaccacgttatgatgattaaatcaatttcaacatatacattgcttagatttttttgctattttttaaacaaacttcattttcatataaataaaacatttataaattggtcttacaaaactaatagtataaatcataatcaagaagatctagttccatagttgatacattactatgtgatggttccaccatattatataatcatttattttaaaatgtaacacattgccgacggaaaattccactaaatgacaaaaatgatgagaagttgttaagtttttcgtggtgcttgttttttagtattgcaaaattagaatttaggaacaagatatagttgaaaatgtcttggcgtttacttcacactaaagaacaagtttgggtaaatatagaacaagtagaaaggttcgttggaacgtccttttgttttctcatgtgttctgttagttttaccaccaaattttattagacaacgacctctctcctatttaaatgggcctttttaggcctgaaaaacacagatcactatctcgtgaccaatattacaaagcaaagcccaataaagattcttattcttcttgagtagcaaacctaaaatgctttcctctcggagttggaatccctttcaaatgcaacacttctttagcctctacgatctcatcgtcttcactgttgtaaagaaatctgttatgtttccctgcaaattcagcttgattcgtctctacattcatcttcttcattccttcacacaacccatcaacctcctcttcttcttcttcttcttcttcttcttcctcataaagctgacttgtcggtgaagtcaaacagtaaagaacgagttatgctcatactcttgtcttctttctcttcagatatctgagaggttctcaagtttccagcaacaatcggagatgcgatcttaatcttgacatcatcatctgaaaagtttggaaattggggagtatttgctggagttggagcgagaagtctcattggagaagtgaccagatggataaaaggacgagtctttattgaatggataagctctgttccttcttcaaccttgtgtaaaagggttttgacttgtcctctcaaaagggcttcaccagatccaggcgtgatcttgattctgctgctttttctcttaaccatgaaccctgaaggaggtgtctgcatcgttagacccacgatcggtgagtcgttggttatgtcgattagtgcagacctgtcttcttcttttctttggtcgatgctcgaatcctctgttttgtctgagccaaaaagcaaagaaaaggattaggttcagaaagatcgagtctatctatgttacttataaataactaattactctgcagatgctttaaggctaaagaaactacaagaacctaaaaaagaagatgggaaagacaaacatacttgatgatgaaaagggaactttgaagtcagaatcagagtcgttgattgcagagatagcctgtgatctagtgacccttttggctgatgatggagtctccatttgaatttcgagttcttgtaaacaacaacgaaaactgaactgaaagagaatttgggaaaaaacaaagtgtgaatgaagctcgtttaggtcgcagtcttataacgttttataactaaactagccgttgtggctcctctcttgcaaagtggaagatgagccgttgccgttaccgttccgttagtaaacccacgaattatttttcttccaaaactagccgttggatccgttctctcatggaaaaagtagacgtctttgttctgtatgggcctttgactaactaaatggcccagcccgttcataacattaatcatttaaaaaatcacattgatggtataacactaattttttttttcacaggtgtataaccaactaatataaatatgcacattcacttaaaattaactaatatcataaagagtattatggcgtctgttttattgtttatccataactacatcaatcaaatccaagttgatatactagttagaacctaatactttacaaatccgatcattaatttatcttgtctgcttaagattttttttttgtgaataaggtttaattatctcatcaatacgatttagtaaaaagtctgtgcaaaaattaatgacgattgggatttttgtaacgcaagcccgtaccagaacatgtctccgccacgtgatttctccacagaccacaagcatttttaagacgtggctttctatcaaccgttaaaaacgtaaatcatattaaccatgtgtctactacctacggtgtaaacgaaactgtataacgtccctatcatataatagtaatgtgatacgttggaatgtagccaaaaagcataaaaaataaatagataattaagtttataatgttttcctacaaaatattattataccgtatgtattttttattttattttctgaagttaaaaacagatgtagttagttgagtaaattgtgttctagaaagagaagagagagcagtagtaccgtggtaggtagctagcgacctcttcgttcgtcagtcatcacaagctttgaaagattttcagctaccactctctcctttatatattcattacacatctcttctttctatatctctcttaatttagtcttttgtcttcgtaattaca

SEQ ID NO: 10742 - DNA, 3000 bp, Unknown
  misc_feature (1)..( 3000): cDNA_ID_2716486_gDNA_ID_2213671_Annot_ID_132801 3000 nt of promoter + ATG
ttaaaccggcgggagtacacttttatttatagtctatttttacgccacgtcatctctaccttgaaaaattgaaattcatcatttttcttcctccttaagattttttttttttcttttctaattaacgacaacacgacgaagatgaatccttctcacggtggcgacgacaagcaacgaccggcgatgtatccccaagttgatcaatccattcctgataatccttttgcttctacaaatccttacgtcgcttcttcaccttatctatatccttctctatcctctcataatctcggacctaatctcttcccagaccacggagatgcatccaacgaccaatcaccatctgctcctcctcaggcgacggaggaggttctcatccgtgttcccggcgctattctcaaccttatcgacaaatcctacagcgttgaactcgcgtgcggtgatttcaccatcgttcgaattatccaggggcaaaacattgtagcggttctagccaatgttggaaatgagattcaatggccgttgacgaagaacgaggttgcagctaaggttgatggatctcactatttcttttcgattcatccgccaaaggagaaaggtcaaggatctgggtctgattcagatgatgaacaagggcaaaagagtaaatcgaaatcggatgatgagattcttaattacggattgaccattgcttcgaaagggcaagagaatgtattacttgtgcttgatcaggttttacgagactacagttgtttcacagagcagagaatgtctgaaaaagccaaggagactggagaagaggtgctgggaaattcagtggtggcggacacttcgccggaggagcttaagggtgagagaaaggatgttgtggaaggtcaatgtgcggcgtattggacaacacttgcaccgaatgtcgaggattatactcacagtactgctaaaatgatagcttccgggtcaggtaagctgatcagagggatactgtggtgtggggatgtaactgtggagagactcaagaagggaaacgaggttatgaagaataggcttagtcgtgctgagaaggagaaagatgttagccctgagacactgaggagaatcaagaggtatggttatacttaggaattttgcatctttgaccttgaaaataactgcttaggaatctagtagggattctcttatctggttccttgtttcatgatcattagagaactgagtagtaagggatgattattgtttgcagaagaccaattctatgagcagtgatgaaatttcttgtttaaaaatgtttgaacattgtgcattctcatggtagtatatcttgaatgaaatcaatttttatgcctttgcttatctccctcatgtggtttctatctaaagggttaagagagtgacacaaatgacagagaaagttgccactggtgttctttctggtgttgtcaaagtctcgggattcatcactggttcaatggcaaactcaaaagctggaaagaagctttttggtctcttgcctggagagattgttctcgcatccctcgatggatttagtaagtagattacttgtttttggtttctcatatttcctatcccatgcttggagggtcataaaagcttcttgattcacgagttgccttgctttctttcatctcacttgaatacatgttttgacatgaccagcattacaattattgtttatccgactttccctctgatggccattcccataatttttccaatttttcgaatatgacatttagcagaagttccttgatatagtgtattagtgcttggatctgcttcttgcattgaacaagttagtctggtggactttggagcattattctttttgtgggtttttaatttcaaagttaccaaatgttttgtaatcgctggcttcccttatataccgaacccttttttgtttaaggcacatgggattagtacccttcttttcatgtttacttcttgttgcaggcaagatctgtgatgctgttgaagttgctgggaaaaacgtaatgtcgacttcatcaactgtcacaacagaattagtcaatcacaggtattgattagcaaaggcatatataaacaatcacatatctccgcatgagtgatcttcagcaagagtgatcaaagtttccttagatcttaaagaaacctcatggattctgtttcgaaattacaggtacggcacaaaagcagcagaggctactaacgaagggctagacgcagcgggacatgcatttggaacggcatgggttgctttcaagattcgaaaggcatttaaccccaaaaatgtcataaagccttcatcattggccaagtctgtttcggaactaaaggctaagaaaggctccaagtaaacactaaacagccttcaactgttctgtgttcatctaaacttgcatttagtttttcattttggaaaagtatatgaagattgattgatgtaactctatatttagttttctgtgtatattgtgattctatgtaaactatataaacagtttcttccaatcttctcccatttatgggtttgatttgtaacttcttaatgcatcgagaagcagtattagtactctttatctttcttttgtactgctatttcttaccgctaactctcatctctggtgacttatcctgccttcgtttaccttttttagtgtttgcttagaaacactaattgcacctatgttatgtattctaccagattaatttgacaaaaaacaatgttaggagttttaatgttttgaagaagtgggccagatgtttggagttttaggccaatgtagctcatcttgggcccagtacagaaataaatccagtgatgattctttctgattggctggaaggtgtgtgtacgtgaacctgtccgcaggtgattaaaacagagctgggcttttggcttgtcgcctaagtcgggaatcgtttactgtgaaataaaaacgagagagagtttttgaagaagaagaaagaacactcacaagatccagaaaaaggtaaaag

SEQ ID NO: 10743 - DNA, 3000 bp, Unknown
  misc_feature (1)..( 3000): cDNA_ID_2705049_gDNA_ID_2213671_Annot_ID_132803 3000 nt of promoter + ATG
caagtataagcttttgcaccacgattcctctaaatgtgaggaattatctctataggcattagtaacttttcttgatatgtcttttgaggattggaagtcttgttaagttgcagaatcttatcgctattgcgttctttgtttatatctgtctagatgatggattccgactcacctatctgggttatgactttcttgccattaaaacattggtcaaccggggtatatttaccggtgtcggtcgtcagattggtgttggtaaagagtcaggtatgttgttttcctatttatttttattttatcggtgtcgaagagatgcgtgttggtggctgatgtatcttatttatttgttctttgcatataatagacatatttgaggtcgctcaggaagatggaactattctagcaatgaagttacatagactagggagaacctcctttagggctgtcaaatctaagcgtgactacttgaggcatcgcagtagtttcagctggttgtatctctcccgacttgcagctctcaaggagtttgcttttatgaaggttattgccttcttccactaatgtaacactattcttgtgggtgtatcatctttttattttatttttggcctaatgtttgtttggcttctgggtgagcaggctttggaagaacatgactttccggttccaaaagctattgactgcaatagacattgtgttatcatgtcccttgtgcaaggttaccccatgtaaggacctaactacatatttacacaaagaaaagtggttatgatttatgatgtttgtcatcatctactgatatgttgtggtcggatattgattttaagctaagataatcattggatttttgagtttctaagaaagctaaaccatttgcttcactcactcactaagaaacagttacaccctttctgctgtgaatcacatcttttcacatttttcatttatgcagggttcaggtgaagcaattacagaaccctgagacaattttcgagaagatcattggtattgttgttcgtttggctgagcatggtctaattcattgtgacttcaatgaattcaacatcatggtgagatacttagatctatctagttgaattataccttctatttgtaagttactttgctgaaaatatcatgcatttatttgaagctgccttctcatataagttaattaatacttctgtaagcatgctagttttgtcctctgcctacttacaattttcattgacacatcctgtttatgtatgcatgtatgttatagattgatgatgaagagaaaataacgatgattgattttccacaaatggtatctgtttcacaccgaaatgcacaaatgtatgtgacctctcatctctgcaccatgcctcagtactttcttccaaatttctataaaatattcttggtttgttaatgaattttgtctctcaggtactttgaccgtgatatcgaatgcatcttcaagtttttcagaaaaaggtgatttaccaatttgattttctttttaatatatacatcatttgttcacaatacctagtagaaaataatctctcagtcgctgaatccatgtcatgaatgaccctgaaattctcatttttctttgaactctggtcctttcttacaggtttaatatgtctttccatgaagataaaggtgaatcagaggagacggaggtggatgagaacagcagaccatcttttttcgatattactaaagatgctaatgctctggataaagatctagaagctagtgggttcacaagaaaggagcagactgacctcgataaagtatgtgagcctatgaccttagttataacactgcttatcaatcttcaatcaaccgtttcttggtattgcgtatatattttgaatcttaggcagactaatttgcagcactggtctctgtgtggttttgtttcctcattctctctggtatatagaatgaacatatggtttctgtcttttatagtttattgaaggtggggtggagaagagtgaagattctgatgaggatgaggaatctgatgatgaagagcagacttgtgaatcaaacgaagaaggaaacctaaatgaaataaaatcattacagttgcaagacaaggtataaaactttccaattcatcatacaactgaaacatgtaccaagtaaagatgtcctctacttacagtatatgcttttggcatgatgtaggagcaaaaaagttcagatggtgttgaggcagaagttgagttggataataccgagaacggtgaaagcaatggagatgaagatgaagtcggaagtaatgaggttagtatcttgtgtgtgagtaactcggagagtgaagtaatgaaatcacttacaaaaatgagttttgctacttcctttgtacaggaggaggaagagaaagaggcagagctggagaaaaatttgggcaaggtaagacgcagagccatggcagcagccaggggacgtagaaagtcacagtcttcaagaaacacatacaaggacaaaggacgcggatcccaaaactccaagatccacagcaacatgagcggcttttgatactccaactgtgggcttgaatgggccgtataatgatgtaaacgggcccataatctttttctagtgactttttctcgaatcgttgagttttccaaattgaacaccaaccaatgtactgagacagagaaattaaattataacggatatgtttcttaataaatcaaatctcaaatgttattttgtccaaattttgtttgatgtagttttagcggggctaaactgaaaacacatgaaagtcaaaggagtagatgcgaaacgctcccccagtaattagcggaaatagaaaataatggaacgcaacggctagtgatctcaacggtcgaaaatttaaacttttttataataattgacagacctctctcttttgttaaaatcctaaccttgttctcacattaatcctccgccgagattccttttgtcttcttcttcttcatcttctccatttcaattacaaag

SEQ ID NO: 10744 - DNA, 3000 bp, Unknown; identical to SEQ ID NO: 10740
  misc_feature (1)..( 3000): cDNA_ID_2705061_gDNA_ID_2213671_Annot_ID_182307 3000 nt of promoter + ATG

SEQ ID NO: 10745 - DNA, 3000 bp, Unknown
  misc_feature (1)..( 3000): cDNA_ID_3037872_gDNA_ID_2213671_Annot_ID_182306 3000 nt of promoter + ATG
aaacatctccgaagatccggcttggtaatacttgacggtacggccactgtcgatggtgtgagatctgacggcttcaaggagacggagagcaccggttgcgactacatcggctgtgtaatcagggatctcgaaggagacagcgacgtgagattgagcagctaggttataaacttcgtcaggtttgatcacatcgatccaacgacggagagaggaagcgtcggtgagatcggcgtagtggagtttcatcagagctttgttgacattgtgtggatcgatgtagatatggttgattcgctgggtgttgaaattcgatgatcgacggatcagaccatgaacttcgtagccttttccgagaaggaactccgtcaggtatgatccgtcctggccggtgattccggtgatcagagctatcttcctcggttcaacgacggtggaatcagctttgggagcggtgatggattcggaatcggatctggatccgttgttctctgacgccattgttgggttttcggatctgggatttcagagacaaatgctaacgtcagctctgtgttgaaaatccgtgttgaattgggctgttagagttttagctgatttaaatagggtcagagaggttgaagacggaggggtattttagtcaatttcaggataagggtagtttggtaatctttgttggtctttaagttttttttaattgactattgattggatattttccttgtttatgtataacacgttaatgatttacttattttgtggtcaaactcatcaatggtgtactatagaattttcttagatcatttgcaaactttccacaaaaacaaacatattaagattttcaaatcattttatgaactgtccaaacaaaaatagtgaaaagtatttgaaagtttataagacaataattgcaaaaacaattagagtgaaaagtagtcaaacaaagcatttaatatacatttagtgtagtcaaaaattaattaaaaagttacaaatttgatacattaaaaatattagtaattttttgtagaagcaattactattttgtactcaactgaaaaaattgagagaattggattgaaaaaaaagacagaaatgaaactcaccatttactaaaaaaatgaagcaaatgataagagtataacttggctcaatgccgaaacatactaacatatatatttagtctcttgagttgtgttcgagtggtggacaatatgtaatctccacgatttgttttaggaatcttatgcttcaaatcacctttgttgttttccttttacaaatcttcaatcattttcatttatttttcttctttctgtcacaaataattgattggtttgtcaagatatgcttttatatattatttatctttgcctgttattctttcgacaaccaagcaaagtgatcatttgaccacaacaaaaaagcgttgagacttgagacaagtgaaaattataaaccatgcgttggaccatcttatgcatccggaacttaggtataccaacttagtcttaccaagaattatattcgatcagacactaattaaagaagttaattatttcatatgttcgacaagcatcaaaatgtggcccgtattactatccatcgaacgaatattctagcattagtggatttctccaagctaaactacaatctcaatctagaggatgcaacacggaaaccaaaactgaattgctcaacaaccatgattttcaacgttaattatggtgtttggtcacttgactcactttggctacaacttgtgttgaggttgataaacctttgttgtcatctcttataatattggactaatgaacttgaagacagaaagaaaactttagaccaccgtgataaagaggaaaaaacattcctagggtttttttatctatacaaaaaacccgatcaagtggctgatctttttactaaagcattgggtagttccagttttagagtatcttttctccaagttgggtgttttaaatttacacacaccaacttgaggggagtgttatcgagatagatgtgaatatgtcgagctagatagatatgaattttgtttagatgtgtttagtatctctaaagataaggtttagagaatattgatgtacacacataggtatatacatgtatataagggaaacgtatcccaagtaaataacacaactcaattaaaccaaagtctcttcttaagtttacaaaacttgacgaattgtggtgtaaaggcaaagaagattataaaggtcgttcgaagagatgggaatgtgatagttcttcaacttgttcaagtactaggaagagtctattcgggcaatggtgcaataggcaattgagaaaacaattgagggtgtgaaacaaagggttgcaatttggttatacatgctcaagcctcacggtgagcgcaatttgtttttggcaattatcttatttgttggctattctctgaaggaaagaacattaaaaaattgggcttacaaaggtttgaattcaacttagattgcaaagacttagtgatgggccttatggatgagattacttgggcgtccttgagaattgtggcccacgaagttcaagagatactgataggatacattcgacgtattccccatttcgttttacattttaagatgatgatgtgtgaaactagttaagaagggttcttcttagtcctaaaagagttattaaagtttttttaaaactctataaagtttcgggcttcttaataataaacacagaaatgataatggcacttaaaaaaaaaaatcataattctcttaagattttctgaccaattgtccaataatcattgtccaataatggtattatttgcttatttttttactacataatctaaagttaatcaatatcctttaatccaataataatgacaacaaaactgtgtcacttttctagtggggtataaaatatataataatatggctcttctcctaaagtactgcaaagagaagaagatctcgttgacgccccaaaaaataaccagaggta

SEQ ID NO: 10746 - DNA, 3000 bp, Unknown; identical to SEQ ID NO: 10739
  misc_feature (1)..( 3000): cDNA_ID_3037880_gDNA_ID_2213671_Annot_ID_182304 3000 nt of promoter + ATG

SEQ ID NO: 10747 - DNA, 3000 bp, Unknown; identical to SEQ ID NO: 10738
  misc_feature (1)..( 3000): cDNA_ID_3037892_gDNA_ID_2213671_Annot_ID_182301 3000 nt of promoter + ATG

SEQ ID NO: 10748 - DNA, 3000 bp, Unknown; identical to SEQ ID NO: 10737
  misc_feature (1)..( 3000): cDNA_ID_3037896_gDNA_ID_2213671_Annot_ID_182298 3000 nt of promoter + ATG

SEQ ID NO: 10749 - DNA, 3000 bp, Unknown; identical to SEQ ID NO: 10735
  misc_feature (1)..( 3000): cDNA_ID_2184864_gDNA_ID_2213671_Annot_ID_182297 3000 nt of promoter + ATG

SEQ ID NO: 10750 - DNA, 3000 bp, Unknown; identical to SEQ ID NO: 10734
  misc_feature (1)..( 3000): cDNA_ID_2705073_gDNA_ID_2213671_Annot_ID_182296 3000 nt of promoter + ATG

SEQ ID NO: 10751 - DNA, 3000 bp, Unknown; identical to SEQ ID NO: 10732
  misc_feature (1)..( 3000): cDNA_ID_3037903_gDNA_ID_2213671_Annot_ID_182294 3000 nt of promoter + ATG

SEQ ID NO: 10752 - DNA, 3000 bp, Unknown
  misc_feature (1)..( 3000): cDNA_ID_3019786_gDNA_ID_2213671_Annot_ID_182323 3000 nt of promoter + ATG
agattctcagagcaagtcaaaaccgttctaggtggccatggtttgcctgaaatgggcagcctagactactacaaggccttggttcatcgtgatcgaggtcgccagctaacctccaacaacaacaatcagacaactatttctttcgctcaaggcaactccaccgaagaaatcagtttgtatgataaaaatttggcacctcctctgtatttccatttagtaagtactatatagacctttgattatatgtttctttattcttaatgatcagtctacattatgcgaatgtgacgatagggacaccggctcaatggttcttggtggcattagacacaggcagtgatttgttttggttaccttgcaattgcaattccacttgtgtacggagtatggagactgaccaaggcgaggtaattttatacaatcttggaatgttatttgttatgacatcaaaacttgatcatcttttaagacacacatgtatacgtagagaataaaactcaacatctacaaccccagcaaatcaaaatcaagctcaaaggttacgtgcaatagcacactctgtgcattaagaaacagatgcatttctccggtcagcgattgtccttacagaatccgatatctctctccgggaagcaaaagtacaggtgtgttggtggaggatgtgatccacatgagcactgaagaaggagaagctagagatgctcggatcacattcgggtttgtaattctttctaaaattggcaatgcactgattaatatgtctttcatatagtattttaggtctcttcttacttcatatatgaaaagtacttaaatggtggcagatgtagtgagtcccaactagggttgttcaaagaagtggctgtaaatggtataatgggacttgcaatagccgacatagcggttccaaacatgttggttaaagccggtgtcgcgtcagactctttctcaatgtgttttggtcctaatgggaaaggaacaatcagtttcggagacaaaggtagctcagaccagcttgagactccattgagtggcaccatctcaccgtaaaccctccttacacctttttcttttatttgtcccaataagtatattcatatgtaacgaacatgcatgatctaaacacaggatgttttacgatgtgagcatcaccaaattcaaggtaggaaaagttacggtggatacagaattcaccgcgacatttgactctggaaccgcggttacatggctgatcgagccttactacactgctctaacaacaaacgtgcgctttacgtacttttgcatttagttcattccattacctaaaacctcgaggcatgtaacattacaaaccgacccgtctgtgtgttgtgttatgcagtttcatctctctgtaccagacagacgactttcgaaaagtgtggatagcccttttgagttttgctacattatcacatcaacgttcgtaggcttatctttagatatacatatgataaatgtttgtagttaaaaaattattgatgcatgtgtgtgtagctgtttgcagttcagatgaagataagcttccttcagttagctttgagatgaaaggaggagctgcttatgatgttttcagccccatacttgtcttcgacacttccgatgtatacacatatcttctcatatcatcattttatcatatttactatatctaaatatattaatctccattgcattaacagggtagttttcaagtctattgtttggctgtcttaaagcaagttaatgctgacttcagcatcatcggacgttcgtttttgttctttttttcccacaatcaacacaatttcttcttgtacattttaaccaattcctaaatcagatgaaaatttttctttatgttagaaaatttcatgaccaactacagaatcgtccacgatcgtgagagaaggatcttaggatggaaaaaatctaattgtacgtcctacttgaactaaactcttctccaaaaacaaaaattactcatgttaataactaatttcttgtggacattttcaggtaatgatactaacggtttcacaggacctaccgctttagcaaaaccgccatcgatggcaccaacgtcgtctccaagaaccatcaacctttccagtcgtttgaaccctctggctgcggcttcttcacttttcatcatttgcttcatttcttttgtatctttgtgatagtgactaatttaattacatctaatgtgcaaagagctaatcttattctcgtttctaccctctgagtttcacatattattctatccaccccatcattctttgtttctcatcttcttgccatgttcgtcccattcatccaagtgggacatttttaaatacaatatcttaccttatataggagcacgcatgggtcaaaaagtttgggtcgtctcccaaaatttaaaatatccaaaaataaatcgatggaatgacttaacctatataatattgtataagccaagactttaaacaaaatggagaaaaggaaactaattcaacttgtctatctttgatttataaagttataatgcataatgccctcctcgtctgttgatttctctgaaggaacttctatttttctaaattttttgtatacaagtcgaattttagtatgataataaaaagctcgtataaccttttaatataagattaggtatacatgtactattgatactctattgcggcatgattagaaggtcaactgtaagagaaaacatcaacaatgttgtctattatgagtaactagggaattatatgatatcaacaacaatagaaaaagatattgttcgttaaataaaataagacaaaaaagagaaaataacaggaatgaagtgcaaaatacgaagtgtagaggggcatttcaacaaaaataaaagagttgacgaagacacttataaaaaggaatggctaatttcaaaaagtctcccaccgcaaaagagaactctgtcttcgtcaacctttctccttcagggaaacaagacgaagatacaaaataatg

SEQ ID NO: 10753 - DNA, 3000 bp, Unknown
  misc_feature (1)..( 3000): cDNA_ID_3037848_gDNA_ID_2213671_Annot_ID_182321 3000 nt of promoter + ATG
agtgtaccacttaatctatacactcccaatgcatcgactacgagttcaagcattcgatgcagtgacaaacgttgttttggatcgggaaagtgttcttctcctgaaagtatttgtccttatcagattgccttatctagcaacacagtcacgacagggacattgttacaggatgtattgcatctagtcacagaggatgaggatttaaagcctgtcaatgctaatgtaacgcttgggtaagtaatgactcttttcctctgtctttcttctatgcacctttaagaataaagggttcattcctggagtaacctattgaatgaagtgagattccggacatgtaaaaagtttaggtcttttgcctctcttagaactcatgtacggttccatcaactgtcctctgtttagagaaatgaccaaggagatgctaaagaactgaatccgtgtttgtggtgcagttgcggtcagaaccagacaggtgcgttccagacagatattgctgtgaatggtgttctcgggcttagtatgaaagaatattctgttccgagccttctggcaaaagcgaatatcaccgcaaactccttttcaatgtgtttcgggcgtatcattagcgttgttggaagaatcagtttcggagacaaaggctacacagaccaggaggagactccattagtctctcttgaaacaaggtaagaagtcatttccagattagcggcgccaaagttttataatttgtgtatatctactacaccaattctgcttctatctcccattatgttttccttttcacatttttgacctaaaatgaaaactagtacggcatatggtgtgaatgtgacgggagtatcagtagggggtgttcctgttgatgttcccctgtttgcactattcgacactggctcatcatttacactcttactggagtcagcatatggtgtttttaccaaagctgtaagtgtttagattagactataccatgtattataatgctgcctgaccaaattcatgtaaaaaagcgagatatgtgtaaactattcttcctcggagaaactattgtgctgttaaaccattagatatatctgtaatttttgcagtgggcattgaaaattgaaatgaagatttctcagaagaaagccattcctccaagctttgtttgttacatcatatgacgtacatcttttacttttgcagtttgacgatcttatggaggacaagcgacgcccagttgatcctgattttccgtttgagttctgttacgacttaaggtcatgcttccactcttatcagtgtagttatatatgcttttgcctatattaatagcacattcttttaacgcacgccagaacacgtaaaaagtaagaaagatgggaaacattttatagagaagaacatctgaattctgatgctcgtcctcgtcatatgcagtccaaatgttacaacccctgtagagatgattttcgttggaggatccaaaatgactctcaggaatccgtttcttacagcaacgtctaaggcatgacatggtctttaatttttctttttcttttcctgtattaacgtatctatttacattttctttttgtttttggttttgaacactggtaacaggagggtactaagatgtactgcttgggtattctgaagagcataaatctcaatatcatcggacgtaagtatctcaacaaccaattctgatgcacaaatttatatatatatatatatatatatatatatatatatatatggatataatgagagtatgtgtggaatgcagagaacttgatgtcgggccaccgcattgtatttgatcgggagaggatgattttgggttggaagcagtctaattgtaagttcctaaatcaggaagtgactgtatatacttaggaaccaagcattagtaatgatgtggttttgtgtcaatgcaggttttgaagatgaaagcttagcatctgagtctcctccaccaccagagatcgaagctcctccaccaagtgtatccactccaccacctgctgcttctgctacaccgcccacaatcgatcctcgtaactccaccagaaactctggcacaggcggtgcagccaatctcagccctcttgcagctcaactcctatttctcctaccacttttggctttcctctgaatcacaaaagttcgttttgtgttggtttaaccatttttgtgttcatttaataataaacatcgtttgatgagcaaaacacaatgttcattggtttgagattgttgaatcttattttatctcccttgttacaatgtatgtttttgttatgtaaaatgtttcggatgtgtcaaaagtgattgaagcaaaggaggacatgtatccgtaaagcaatgattcaaattgtctatttgtgattcacttaattcataatgccctcatcgtatgttgacttttctaaaagagctaatctttttctcaacttgttgcatataattcgaatttgagtttagtattgagatactctaatgcggcataattaaatcagcaacaattatgagcgaatgattgatttgactaggaaattatttcaccaaaaaaaggaaaataaattgttcgttgaatataaatagtataaactataaaaggagttaagtacgaaataagaagcgtagaggggcttttatgcaaaaagaaagagatgactaacagacttataataacggctgatttaaaaagtcgtctccctccggataaaaaaactctgcctttgtcaacctttcagcttcagggaagaagacgaagacgcaaaataatggctactactccgattaaactagtattagcttaaatattattagggccaataatcaaatcagcttctctggaacaatgcgaacgagtcaatctgttgacttttccaattcttcaatttccttacatatacgttattcttcgaggattatgtctttatctgagaaattaaacgtctttttatcccggaggtgtttttgttttctcggaaaagctccgagattgaagtcatg

SEQ ID NO: 10754 - DNA, 3000 bp, Unknown
  misc_feature (1)..( 3000): cDNA_ID_3037856_gDNA_ID_2213671_Annot_ID_182319 3000 nt of promoter + ATG
tccttctcctccctgcactctcgggtacagcaaggccaaccacttctccagaaccttcatcttcctcttcttttggattctcttgcacttggtattgtgtttatcaatttaacagagtgtaataagaggcgtgtgtgttggatagacaaacaaaaaaagggggttggtcactgttgcgtgatttgcaaggcttttctcttttatggattacaatgtacgttaaacacacctctctctctttctttatgttcacacaccaacaccagatccttacttctcaccttctcttcttctcctctttctttttctttttttcccttaattcaagcagataacaatctaaaatcaattaaagactcgatctgattcggatatatagatgattccaacagaagaaatatcaagataagaaagactctctagataattcagcttatcttaaattctgcttttaaagatagtttttgcttgtaatgaattggtaaatgtctgtctcttataaattttcatttgaaacgccatctaaactaaaattaggtactcgtgaggtgccttatcccattcacaccacttttaaaaagtgtttttatcttctttttttcctaaaattgcaaaatggtcctgaaatttgttgttattatggaaacctctatttaattatgttttgacttgatccaacaaaactggaagtctccttctctcagagaaggtttctcttaaggtttttacactgagcgattcttctccttcgccgcaacaccttctcctgagctgtaatcattccttgagaccttgacatagctatgatcgttggttaatggcgatttctgaatccaaccctgactcaaatcttagcattcaagctggagatgaatggcaaaagcttcctctattcgccaattcgtcacatccagattcatcgtccccggaacgggtctgcttaagggtttcaaacttgtcgaagattccaactctattacacacctcttccaagtccacgcgaggctaatcacctccggtaacttctgggattcatcttgggctatcagattgttgaagtcttcttcgcgttttggtgattctagctacaccgtttcgatataccgcagcattggcaagctttactgcgcaaatcccgtctttaaggcttatttggtctcgtcttctccgaaacaagcgttggggttttacttcgatatactaagatttggttttgttcctgattcatacaccttcgtttcgttgattagttgtattgagaagacttgttgcgttgattctggtaaaatgtgtcatgggcaagccattaagcatggatgcgatcaagttttgcctgttcaaaattcgttaatgcatatgtatacttgttgtggtgctttggatcttgcaaagaagctgtttgttgaaattcctaagagagatattgtgtcctggaactctataatagctgggatggtgaggaatggtgatgttttggctgcacacaagttgttcgatgaaatgcctgacaaaaacattatttcttggaatatcatgattagtgcttatttgggtgcgaataatcctggagtttccattagtttgttccgtgagatggtcagagcagggttccaaggaaatgagagtacgttggttttgttgttgaatgcttgtggtagatcagctagattgaaggaaggtaggtcggttcatgcttctttgataagaacctttctgaattcgagtgtagttattgatacagctcttattgacatgtatggaaagtgcaaggaagtaggtttagcacgtaggatattcgatagtctatctattagaaacaaagttacttggaatgtgatgatattggcacattgtcttcacgggcgtcctgaaggtgggctcgagttatttgaagccatgatcaatggtatgcttagacccgatgaagtgacatttgttggtgttctctgcggttgtgctagagctgggcttgtttctcaaggacaaagttactattctctgatggttgatgagttccagatcaaacccaactttggacaccaatggtgcatggctaatctttactccagcgccgggttccctgaagaagcagaggaagctctgaagaatctgccagatgaagatgtgacaccagaatctacaaagtgggcaaacttgctcagctcgtcgcgttttacaggaaacccgactctaggggagagcattgccaagtccctgatagagacagatcctttgaactacaagtattaccatttgctgatgaatatttacagtgttacgggacggtgggaggatgttaatagagtgagagagatggtgaaggagaggaaaataggacgaatacccgggtgtggccttgtggacttgaaggagatagtccatggccttagactaggatgcaaagaagcagaaaaggtgttcactgagactagtttagaaaaatgctacagtgattcaccgtcataataaagttaaatccccaagttaaaagcatacggttgctcttttaccagatccagggtatgaaaagtcataaatggaagctgtgtccatgagtttggtctgtttttgcagacaaagagtagtaaaatccttgtttagaatggaaagaagagaagttaatagtctctcaaaatgtacttgatcctgtttcatttttgttctttttggggtcagatttgtcaattctttaatttgagaaaggcttttacacaatcaatgtgaggaaaaagggtaaatcaaattctaaatcatgtgatctatttacgtaatttaaattaccagcttactcaaaagtcaaaattgaagttgtgagagataagactaatgtagcctaatgactatgaaatgagttatgtcaccatctaatttaaagttaaagctgataatgaagaaagaacaaatttaaatgaggagagtttcaattcgcgaagatctcagaaaattcggtcaaaattgagacttctctctgtagagtaaagtagtgaggaacatagaatg

SEQ ID NO: 10755 - DNA, 3000 bp, Unknown
  misc_feature (1)..( 3000): cDNA_ID_2705047_gDNA_ID_2213671_Annot_ID_182318 3000 nt of promoter + ATG
ctcctcctccaccgccgccgcgccctcctcctcctcctctaagccctggctctgaaaccaccacatggaccaccaccactacttcctctgttcttcctcctcctccgccgccaccacctcctcctcctccgccttcttctacatgggacttctgggatccgtttataccgccgcctccttcttcctctgaggaagaatgggaggaagagacaaccaccgcgacaagaaccgcaacaggaactggctctgatgctgctgtgacgacggctccgacgacagctactcctcaagcttcgtctgttgtgagtggattctctaaagatacaatgacgacgacgacgactggaagtgagctagcagttgtggtgtcgaggaatggtaaagatctaatggagattattaaagaagtcgatgaatatttccttaaagctgcagattctggtgcacctctctcttctctccttgaaatctcaacctctatcactgacttttctggtcattccaaatcaggtaacaacaatcaagctcttgtcttctcttctttgattgattttgattagtgttttgtgtttgtttcttcagggaaaatgtacagtagtagtaactacgaatgtaatctgaatccgacgtcgttttggacaaggggatttgctccttctaagttgagtgaatacagaaacgcaggaggagtaattggaggaaattgcattgttggtagccattcatctacagtggacagactctatgcttgggagaagaaactttatcaagaggtcaaggtattcactttttgacttcatttcattcataaagttgcaatctttgaacaaaacaattaatctttgatgtatcttcatatgttaagttttgtggaaagagtttgaaaatgttgtttatattcagtttgaagtttgaatattgaaattgcttgcttagatttcatccaaatatggataaatgttttgtttttgggaatttggttgattcatgtgggcattaaaggcttgtggtgggtccaagcgtgagcagatagtgtaagagacccacgtgtgtacttaattctgatgaataatgtgttatgtacactggcacaaatatcttgccaagtagtgagtgagtgtttgttgttttttgaatgtgggttttgttgcagtatgcagagagcataaagatggatcatgagaagaaagtggagcaagtgaggaggcttgagatgaagagagctgagtatgtcaagactgagaaggctaagaaagacgtcgagaagttagaatctcagctctcagtatcttcacaagccatccaaagcgcctctaacgagatcatcaagctcagagagaccgagctttaccctcagcttgtcgagcttgttaaagggtttgttttgtgcattcccattgcttcattaacctaaagtatcttatgttggtcaatgtgaacaaggttcttgtatgaatgtaatgtaggctaatgtgtatgtggaggagtatgtacgagagccaccaggttcaaacccatattgtgcagcagcttaagtaccttaacaccatcccctccactgaaccaacatctgagcttcaccgacaatcaactcttcagcttgagctcgaggtccaacaatggcatcactctttctgcaacttggtcaaggcccaacgtgactacatacaatctctcacgggctggctcaggttaagtctgttccagttcagcaagaatccacttgttaggagtagctacgagtcaaagatctacagcttctgcgaggaatggcatttagctattgacaggatccctgataaagtagcatctgaagggatcaaaagctttctgacagcagtccatggaattgtggctcaacaagccgacgagcataagcaaaagaagagaacagaatccatgttaaaagatttcgagaagaaatcggcttcgctgagagcgcttgagagcaagtatagtccatactcggtacctgagagtaggaaaaagaacccggtgatagagaagagagtaaaggttgagatgctaaaaggaaaagcagaagaagagaaaagtaagcatgagaagtcagtgagtgtgactagagccatgactctaaataacttgcagatgggtttccctcatgtctttcaggcaatggttgggttttcaagtgtgtgtatgcaagcctttgagtctgtgtacaaccaagctaagagcatcggtgaggatcaagaggaggttaagaggttgcttccttaaagagagaaagacaaattgttttaccatttgctctctgtttttgcttgatccaagctaatcttttggttgaatgttaggttgagtttatgctgttttcgaaatgaaattggttaaatgacttttcattgaatcactgcttgaaacttcatcaattcaactacttcttagccaagtcaaatcattggaaggtgacctaccaaggtattattaacattggagaagtgttagttagttagttagtgaggtagttaaggggattgcttaaagaagtaagcaagtttaatgataatcaaacactcgtgatgtgtacgtaacagaagaaaagagagatgattcgtttgagcggcagaaaaagacaagtgcctaatttgatttcccataaataaacacacaatcgattggtaattttgattagttgggagctattaaaagaggaaatccacaataatcggaaatagaaagacaagtttggttagcggaacgtttcaacgccatttttcccggccaaagctaactctaactaactctttgttttttttcggtttttgtgccatcttccagttttcattttttttgtttcccctctatctttttgggtaatagggtttctaatctctgggacaaactccaatcgtttcgaatccgcaatgcccagatggtcgatcaatagaaatatcaagagtctccaattccaaaggctaaatctttgagatctttttttttataaatttccctgaaattaataaactttgaggggaa

SEQ ID NO: 10756 - DNA, 3000 bp, Unknown
  misc_feature (1)..( 3000): cDNA_ID_3037860_gDNA_ID_2213671_Annot_ID_182317 3000 nt of promoter + ATG
agcggggctaaactgaaaacacatgaaagtcaaaggagtagatgcgaaacgctcccccagtaattagcggaaatagaaaataatggaacgcaacggctagtgatctcaacggtcgaaaatttaaacttttttataataattgacagacctctctcttttgttaaaatcctaaccttgttctcacattaatcctccgccgagattccttttgtcttcttcttcttcatcttctccatttcaattacaaagatgatgagagatgttttcaggccgactaaatcagccccttgttctcctgcaaagccacttggtatctctcgcactcaatctgaatcatttcatgctattcacaaagttcctgtcggagacagtccttatgtcagagcaaagaatgttcaggtgatttgattatatcccttctatagatctgaatttgtgtttgatttgatttttgttctgtctctgattgttgttttatggatcagttagtggagaaggatccagagagagcaattcctctgttttggaaggctattaatgctggagatagagtggacagtgctttgaaagacatggctattgtgatgaagcaacaaaaccgcgctgaagaagccattgaagctattaaatcactcagagttagatgttcagatcaagctcaggaatctctcgacaatatcctcttagatctctacaaggtccgtcctttatacataaccctgtttcctctgtttcgtttttgcatttggtttgattctgtattgaaatggatttgttactgcagagatgtgggagattagatgaccagattggacttttgaaacataagctcttcttgatacagaaaggactcgctttcaatggtaaacgaaccaaaacagctagatctcaaggcaagaagtttcaagtctctgtggagcaagaagctactcggttactggtaagcagcaatttcaaaatgtgcattatgtttagcaattaccaagtttgtgttaattcttaattggatgatgattggtttgaaacagggaaacttgggatgggctctgatgcaacgagacaactttgtggaagctgaagatgcatacagaagagctttatcaatagcaccagacaacaacaaaatgtgtaaccttggtatctgccttatgaagcaaggaaggatcgatgaggccaaagagactttacgacgtgtgaaacccgcggttgttgatggccctagaggcgtggattcacatctaaaagcttacgagagagcgcaacagatgctgaatgatcttggatctgagatgatgagaagaggaggagatgataaggttgaacaaagaaggctctttgatgcaatctttggatcttcctctatatggcaacctcagccttgtagtgagcagactgtgaaggctaaaccaaagcctggtttaagcaatggtgatggatacggtgatgagaacgtgaagatgagtgtgaatccagtagtagtaaacccattaagggttgatgcaaaaccgttcttctcttcgaagttggtcatcagtaacaacgagaagctgaagagaacgagatcgtcgagccaagggatggggatgttgagtggtattggtggtgatcatgagggagagacaaacacaagcacgagaaggagattgtcaatggagaagaaagcaacggagtgtggattaccagacaataaagactttgaagatgcgatcatggctgctgttttaggaacagaaaccaaagtggacaagaagaggctcaaggtgttccaggatatcactttgtgtctcaatcagagtctctaaccactcttatcattttatcattctaatttataatttagtcaaggaatcaaaaaaggagatgagcttaattcttcttggtaattttattaatgtttttgtcagctttaagttgctgccatttttttcacaattattgtcttcattgaccagtaataaaagctgaagttattattttccttgccattctacaaatatagttattgatcaagaatagtgttgtaaaatgttactaaaatctaatgagatagagagaaacaaagaagatgaagatgacatgagtggttaccatgaatatcccattaattaatccatcagaatcttatttactgcgttaccattaatcagatggttgctcttactctttttattcaccactcactcaacttttgtggtcaagtttgtagcaaattaggggtaattagtatccattaaaccaatcatttgtatctatcaatttggactcttctgcttccaatttgtagtaacgcttacccacacttttaattcggccaaaatacatccgttgaaattgtataaagttccggaagtgcccctcttattttattaaccatggcaaatgaaacggtgtaaaaacttgtttttttcccacttaatctctctctatttgaaagttatgcatttttggtatccgcattaactcgagtcttttaaactttgactgtcagaaaaaggcaaaaaaggtaaatttgttttgataattccatggtacattttgtaatagaattgagaaataaaggatattttagtcaaatggactgttttggtttttggaagaaaagaaaaaagaagagatttaattggaggaaagggctctctgaccaaagcttaaggagagtgtgaggttaaactgaaaaaagaagaatcccaaattccaactacattcctcagggaagccaaagtggccttcacaatcctaaagttaaaactcttgagtgttttttttcagatcaagacaaagtttagatcttttctttttggtttaattgttttgacacaaacgaggtaagcacaagcagaagaagaagaagatagagtttgagttcaaattagatttgttgagaagaaaaagagtgatttttgttttctgatgcatggtgaagaagaagaagaagaatagtgagtgagagaaaaagagtgattttttcatttttcagacagagagtgagtacttgaagaa

SEQ ID NO: 10757 - DNA, 3000 bp, Unknown; identical to SEQ ID NO: 10743
  misc_feature (1)..( 3000): cDNA_ID_2705049_gDNA_ID_2213671_Annot_ID_182316 3000 nt of promoter + ATG

SEQ ID NO: 10758 - DNA, 3000 bp, Unknown; identical to SEQ ID NO: 10742
  misc_feature (1)..( 3000): cDNA_ID_2716486_gDNA_ID_2213671_Annot_ID_182314 3000 nt of promoter + ATG

SEQ ID NO: 10759 - DNA, 3000 bp, Unknown; identical to SEQ ID NO: 10741
  misc_feature (1)..( 3000): cDNA_ID_3037840_gDNA_ID_2213671_Annot_ID_182312 3000 nt of promoter + ATG

SEQ ID NO: 10760 - DNA, 3000 bp, Unknown; identical to SEQ ID NO: 10756
  misc_feature (1)..( 3000): cDNA_ID_2716478_gDNA_ID_2213671_Annot_ID_132804 3000 nt of promoter + ATG

SEQ ID NO: 10761 - DNA, 3000 bp, Unknown; identical to SEQ ID NO: 10755
  misc_feature (1)..( 3000): cDNA_ID_2705047_gDNA_ID_2213671_Annot_ID_132805 3000 nt of promoter + ATG

SEQ ID NO: 10762 - DNA, 3000 bp, Unknown; identical to SEQ ID NO: 10754
  misc_feature (1)..( 3000): cDNA_ID_2716474_gDNA_ID_2213671_Annot_ID_132806 3000 nt of promoter + ATG

SEQ ID NO: 10763 - DNA, 3000 bp, Unknown; identical to SEQ ID NO: 10753
  misc_feature (1)..( 3000): cDNA_ID_2716466_gDNA_ID_2213671_Annot_ID_132808 3000 nt of promoter + ATG

SEQ ID NO: 10764 - DNA, 3000 bp, Unknown
  misc_feature (1)..( 3000): cDNA_ID_2716612_gDNA_ID_2213672_Annot_ID_132812 3000 nt of promoter + ATG
ataagatttgatatctaaatttttattaatttaatttaattagataaacgaaatacattattaattcccaaaaaagtaaccaattaaaatcaacaaattagatttgatatctaaattatcatattaattttttattaattattatagttcacttctcatctttatatgattccatttttgccgaaaaataatatcatcattatagaaaaataattagagttttttcgcatatgccataatttgaatttttaaaaacgaatataaactgttcaatacatgaaaaaatattataacgggtgaaaaatagatttaagaaaactttctactgagtaacatgtcataatttgaaatatttatattcaatttcatacatattatattgaaaatttataatcttatatactacaataattaataacatagtagatgtgatttaatttttaatacaagctggaaaatcctagaattgacgggtttagatcgatattaatacaagatggtatactacaggtgaaactcttaaattaataatcaaactacaagtgtataatcttaaacactaaataatatagataatatcaacaaaacatatacaactcacagtttactatacatttaaaatcaaataaaataatatcatatatttttaaatcatctttacaataaaagtttttagtttaactaaaatataagcctacctgcggtatactgcaggttaatatttagattacagggcttattggatctaaagacaagtcatcaaagatttcctaaactgaagcaaaatatactgaatattcaaatatctatctgttacctaattataaacaaataagttcgtaaaacaatttaatattttatatacgaaatcaactaaatcttaatcacataaaattagcacaaaaaaaaagtattcaacaattaaaaaattatcaaatctctatataacttttgatactatattcgaataaagtgtaatataccttttcaatttgtattctttaactaatttaagcgaactaatatatttgctaatcttatacctatcaaaaccgactatcgtttcttatctctataatatatttgcaagacttttttggtggatttgtataaaagtgcatatcgtcctactatattatttgggaagtacattttaaatgtaaccttaatttttgtaattaattacatgataatgccattagaaaaatttaatcaaaaacaaaatcttttaatgacatcattaagattaccaaaatcatttaacgacaatattcatcttttaattatagggcttattggatttaaagacgggtcatcaaagatttcctaaactgaagcaaaatatactgaatattcaaatatctatctgttaccaaattataaacaaataagttcgtaaaacaatttaatattttatatacaaaatcaattaaatcttaatcacataaaaattcgcacaaaaaaaatatggtacattcgggtctaaagtagttttgcaagacttttttggtggatttgggtaaaagtgcattcgggtcatatggtacattcccctattaaataaatatggtgcactcctatgttattagctaaaatgtttagattataattcaaagtcatatcataaataaaattaatattaataaaataaatggctttttggcaagacggatttggaaggacgggtttttgaatcaacattaataaaaagtaaaatataattaatccaccgtttcaatacgggttaaatctttaatttattatttttaataacaattaatatatataaatacttaataataattataaactgtaaaaatagaaatattttataaaaataaaatttgcaagttttaatatatattacttttaaaaaataaatcatcccgcggtataccgcgggttaaaatctagtttgcttttacttgggattacagaactttctttttctctctttgtgaactaaatgcattatgcattatggaagtcttaatgacactaacgattagggctgggcataatatccgaatccgagcacccaatccgaatccgaaatctcaaaatacccgaacaggttcgaccgggtatccaaacatatccataatttaactatataataataatatattattaatatttacatttgtaataatataattgtcaaaatatgcaattttttggatatttaaattatttttacgtatttaatctacttttgagtaaatttgagtaaaacattttcaaaatatttagatattttgtgtattttcgagtagtttggatagatttggttataaaaaaatttgatttttggaaattcgggtattccgaatccaaatccgaaatcttacaatacccgaacgaattgtatatttctaaatccgaaaacctaaaaattcgaaatacctgatccaaacccgaacgggtacaggaaaccccagacctagatgacgctagtacaacactactaagctacaaaatatttcttaattaagggattatgaagtttatgtagaggtgactctaaaagccataccaaaatttttaaaagtttaaactaaaagccaagtataataatttatctaaaaaatgattgatgcttaattatccaaactgaagaaagtagaatcaaattttataaagccgactcaaacaaagtgaaattctataacttaaatattttattcgaagagatatgaatccctatcatttaattattatttttatatagaaaagataatattaattaaaataattatttgttggcaagtgggcctaaatttgagcccataaagtataataagacagaacacattgctgatttgtagttttaaaacgacaaggcgttgcgaatccgctgaactcaaccggagggaaatctaattgttgtgttccttcctttcacagaccgatcgctgataaagtcagaatagttcggaacaagagacggcgagaaaagggaatgcgaagaagataacggtatagagaaaaggcactatg

SEQ ID NO: 10765 - DNA, 3000 bp, Unknown
  misc_feature (1)..( 3000): cDNA_ID_2705125_gDNA_ID_2213672_Annot_ID_132813 3000 nt of promoter + ATG
tggttgcgaggtagtgatgctttgtattttattactgcttcaaatgtgataaagagacacacacatgatctggttactgaagtttattgggttcttagtgatagtacttttgatgtagatggtttcccccaacagaacgttctagggcggttggtattgcaatggcagggtttcagcttgggaatgttgtaggactcatgttgtctcctattcttatgtctcaaggaggtatatatggcccatttgtaatttttggactatcggggttcctttggttgctcgtgtggctctctgcaacgtcaagtgcaccagatcgacatcctcagattacaaagtctgaacttgagtatataaagcaaaagaagcaaatatctactatggagaacaaacgaattagcacaagtggaatacctccttttggacgccttctctccaagatgccgacttgggctgttatagttgcaaattccatgcatagctgggtatgtatacagattcctctcaatacaactctttcattcttgttactatgaggatttcttgtggaagggaaattgttagtaccaactactgtgacttacagttatgatcaggtgttatcctatttgttggaattctttgaactgacttaatgacttatttccagggtttctttgtgattctttcatggatgcccatatacttcaattcagtaaggccctagtaccaacatgttcttaatataatcttgttcgttttagttctcttaagaaatttataagaatattgtaccgcaggtatatcatgtgaacctcaaacaagctgcttggtttagtgccgttccatggagtatgatggctttcacaggatacattgctggtttttggtcggatttgttgatacggcgtggtacaagcatcaccttaacgcgaaaaatcatgcaggtgcgtgatgtgtcacaagatttcattcaatcaagagctctctcagactgaagagttctgtaaacatatccgaaagatgttgaagcctgatgcaatgaaatctggtgcattcagcattctttttcttttgctgactgggggatttcatttcttgtttggcagtccattggtttcattggtcctggaattgctctcattggtctaacgacggcaaaacaacctttagtggcatcagcctggcttagtttagccgttgggcttaaatcattcagccatttggggtttcttattaatcttcaggtacccaagcgtgtgattcatacctaacccaatacaaatgatgagtatctttaacatttattcccacttgtttcaggaaattgctcccgaatattccggtgttctacatggtatgctttctaattctcctttaatagacattggtttccagagtttcctattgttttatcaaacacatatagctaatttgtaccatctgagaaggaataagccttagactcaatcaaatttttgttgggaatctggaaacatttttccaaaaatctctaaccgtttctgcgctgttttaggaatgtgtcttactgctgggacattagctgcgatagttggcacagttggagctggtttctttgtagaactattgggctccttccagggattcatccttcttacagcaatattgtatctcctttctgctctcttttacaacatatacgcaactggagaaagagtagattttgacacaacaggtccgtcccttctcttttcttgggttatgttgtttgctttacctgttcagtttcattcattttgaatcaatgttttgcataattctaatggtatatatatgctggtcttcttagcagcttgaaggtgaccacaaagtcacttaataggtggatcagctagtaaagaagttgcaactctatatagaatcagcttttgctctccaagtaaataccaggaacaagacctcggctttgtacagaaactagaatttcttcgtctcgatggttctctccttgataaataaatgaaaaaatgtagcaagttatctatgttcaatgtcgtgaatcgccttagagaagataatgaaaacaatgttgacgtagtatttgtttgttatacggttcaatggtatagagacacgaagactttcatcaaatattgtaatagttttagactgaaaaacagattaagggcgggcacagaagcagagaaaagtgaagttacaggtgcagatccgtgatttgggaccttgaggttctcgcacttctctacctcgtgatttgcatacacacgtgttcgtgcacctcagtcctggtaataatttcccactctagtcctctcattaccgtattgatacgtaagcgagccactacgtttggctttttactcaaattggttacctttttaattcctttcgttgccaaaagttcaattaaattccttacaaattacttattttcttttgatgaatgtccacattgcggttaccaatatttatttctaattaaattcttagaaaatgatcaatggtcccaaaatacgaaaacaatggtgttctttttacattgaaaataatattaagggtgttgctaactaaaaaacaaatagatgtgggggctgcttgttagatattttcaacaaaaaatacaaaaatgttcttcggagcttcctctgacacacaaaaacttcacttcactctctcttttcttgtgatcctcacattttcaatcactaaatcaaatcgccaaaacaaaaacagaaaatcaaatataaaacaatgaaaattacgtttctgtcattcaccttctgaaaaatatcttacgcttcttttttagtatatactgattctccgtagtatcttctcccttattaagctctgaagtgttggctcatctctttccagattccggcttcgaaatttggtaattgctccataatcttcggcactaccttggtgaaattgtattcgagtttcactatgattttgattttattcgtgtttaagcaatttttgaatactgtggttgttttagggagataagcgatg

SEQ ID NO: 10766 - DNA, 3000 bp, Unknown
  misc_feature (1)..( 3000): cDNA_ID_2716601_gDNA_ID_2213672_Annot_ID_132816 3000 nt of promoter + ATG
aaaagacaaaagaagagtatggcagagactgaggagtcttcatgggtttacaagaaccgagacgcgccggtggaggcgcgtgtgaaggaccttctctctcgcatgactttgccggagaagattggtcagatgactcagatagaacgctccgtcgcttctcctcaagtcattactaattctttcatcggtaatagtgatacaataacaccactgaacggtttttgtttttgttttggtcaacgaaccaaacttttctactttcctttcgaaaataaaaatcacaactttggttttacaggcagtgtacagagcggcgccggaagttggccgttggaggatgctaagtcgtcggattgggctgatatgatcgacggttttcagcgttcagcgttagcgtcgcgtttgggaattccaataatctacggcactgacgccgttcacggcaacaataacgtctacggcgccaccgtcttcccccacaacattggactcggcgccaccaggttcttaaacattctcttccactttaagcaaactttagtttctgcaaaagagagtcagagaatgagagagttttgcatataatggggttttaggaagtctatggatttaaagcttttgaattttgattaaaaagtttgaatcattttgttaagttacaagcaatgtcggattgttttaattcatgttccacaagaatttggagtttctgatgattttgcttcaattagcttttgatcacacagtagtagtactagctatgattagaatctgattgtgtttaagatctgtccatgtactgtgtttggttgttgttgatgtgataacaatcgtagttttgtgtggtatctcgatagagacgcagatttggtcaaaagaattggtgctgcaacagcacttgaaataagggctagtggcgttcactggacgtttgctccttgtgtggccgtaagtcccttgtagattgttggtatattgggatactaatttgtaaatattgaaatgaaattgttgttactcacaggttttgggagatccgaggtggggacgatgctatgaaagttatagtgaagctgctaaaattgtatgtgagatgagtttgcttatctcgggcctacaaggcgagccacctgaagaacacccttacggttacccttttcttgcaggaaggtatagatgtacatataaacattaaaatgcagtagacttgaataggcttgttgtcatttttcatggatttgtttacttggtgatagaaacaacgtgatcgcgtgtgctaaacactttgttggagatggtggtactgagaaaggcttaagcgaagggaacactataacatcatatgaagacttggagaaaatacatgttgctccctatcttaattgtattgctcagggagtgtcgaccgttatggcctcattttccagttggaatggaagtagactccactccgactatttccttttgactgaagttcttaaacagaaactcggtttcaaggtttattgaatatggaaaagaatctttataagctagaggtgtatgcattgagctcgtttaatgtactttgtcattttgttaccagggatttctagtttcagactgggatggtttggagacgataagcgagccagaaggttccaactaccgtaactgcgtcaaactcgggattaatgctggaatcgacatggtaacgaatgattttcatatgtttcgaatgatttatagaagacgaagattgttaatgaatgatatttcaggtgatggtgcctttcaagtacgaacagttcatacaggacatgacagatttggtggagtcaggggaaataccaatggctcgggtcaatgatgctgttgaaagaatactaagagtgaagtttgttgctggtctctttgaacatcctcttgcggaccgatctttgttgggaactgttggctgcaaggtgaggtatctatagctgaggccactattgtaagatgtacgagagcatgattgactatgttttccacaactgcaggaacatagagaagtggcacgtgaagcggttagaaagtcattagtgttgctgaagaatggtaaaaatgctgatacaccatttctaccactagaccgcaatgccaagaggattctagtggttggaatgcatgcaaacgatcttggaaatcagtgtggaggatggacaaagataaaatccggtcaaagcggcagaatcacaattggtagttgaatcgaattagaagatatcagaaaaaatgatgtggacacttatatacttgtttgttttgaaatgcaggcacgacgcttttggattcaataaaagcagcagttggagacaaaactgaagtcatcttcgagaaaactccaacaaaggaaaccttagcatcaagtgatggcttctcatacgccattgttgcagtgggggaacctccatacgcagaaatgaagggagataactcggaactcactatacctttcaatggtaacaacattataaccgcggttgcagagaaaatcccgactctagtgattttgttctcaggacgtccaatggttttagagccaacggttcttgaaaagactgaagctttggtcgctgcttggttccctggaactgaagggcaagggatgagtgatgtgattttcggagattatgacttcaaagggaagttaccagtgagctggttcaaacgcgttgaccagttgccgttaaacgctgaagcaaattcgtatgacccattgtttcctcttggtttcggtctcacttccaatttcggttaactggtttaacttcaccggttaacttgtattaaaaatatgcgattaccatatgaaccacacgtttaatttaataagttaatcaaattgatgaattttttacataaagcaataatcattaattaagcattttgagtcaaaatcaatgtgtcacgtctcatcttgttatagataaagagaaagtcgtacaacaactacaacgaagaagaagagtaaagaaaatg

SEQ ID NO: 10767 - DNA, 3000 bp, Unknown
  misc_feature (1)..( 3000): cDNA_ID_2716586_gDNA_ID_2213672_Annot_ID_132820 3000 nt of promoter + ATG
taactttgtagagacgcggatttggtcaaaagaattggagctgcaacagcacttgaagtaagggcgtgcggtgctcactgggcgtttgctccttgcgtcgcagtaagtctcctgcatacctagattttagcaacaagatcgaatatgttttggttttattagtcaactgaaagggatggtgttcttactaaaggtggtgaaagatccgagatggggaagatgctatgagagctatggtgaagttgctcaaattgtttctgagatgacttcacttgtctcgggtctacaaggggagccatccaaagaccacacaaatggttacccttttcttgcaggaaggtatgtttatatatattaacattgtggcttaatttgtgtctttagtatgcttaatttcatatctcatggactctggtcacttgatgatagaaaaaacgtggttgcgtgtgccaagcactttgttggagatggtggtaccaataaggccataaatgaaggaaacaccattttgcggtacgaagacttggagagaaaacacattgctccctataagaagtgtatttctcaaggagtctctaccgttatggcctcttactccagttggaacggagataaacttcactcacactacttcctcttaacggaaattctcaaacaaaaacttggtttcaaggttggttcagtttgaaaacaatctaaataaagctagagatgtattcattgtattcatttgatttcatattttttgtttggttattagggttatgtagtttcggactgggaaggtttggaccggcttagcgacccaccaggttcaaactaccgcaactgcgtcaaaatagggattaatgctggaatcgatatggtagtgaactttttttcattgtctcggatgatacaagagaatatataattaaaccaattaatgttattgtaggtgatggtacctttcaagtatgaacagtttagaaatgacttgatagatctagtggagtcaggggaagtatcgatggctcgtgttaatgacgctgttgaaagaatacttagagtaaagtttgttgcaggactcttcgaatttcctcttacagatcgatctttgttacctactgttggttgcaaggtgagctctcttgttctgaaatgctattaaactggagtgctaagattattgaagaccatataaaagatgatttcactctgttttacgaggtttaggaacatagagagttggcgcgtgaagcggttagaaagtcgttagttctgctaaagaacggcagatatggagaatttctgccattaaattgcaatgccgagagaattctagtggttggaacgcatgcagatgatcttggatatcaatgcggtggatggacaaagacaatgtatggtcaaagcggaaggatcacagatggtaactagagctactgcaatatggtttgaaaaacacctttggtaggaaatgctaaatggtctcgtcgaatttctaactatattgtttgaaaatgtaggcacaacgcttttagatgccataaaagcggcagttggagacgaaaccgaagtgatctatgagaaaagtccatcagaggaaaccttagcctcaggatatagattttcttatgcaattgttgcggtgggagaatcgccctatgcagagactatgggggataattcagaactcgtaatacctttcaatggtagcgagattataaccacggttgcagagaaaataccgactctagtgatcttgttctcaggacggcctatgtttcttgagccgcaagttcttgaaaaggcagaggcgctggtcgctgcttggctgcctggtacagaagggcaagggattgctgatgtaatattcggagattatgacttccgagggaagttaccagcaacatggttcaaacgtgtagaccagttacctcttgacatcgaatcaaatgggtatttgccattgtttcctcttggttttggtctcaatggtgattccgtggagaactctgacacggtttaaatttgttgttgaatatctttaacaaaatttcaagggactacttttctgttttaaaaatgattttgttaaaatcggttcatacattggaataagtttggaggattatatgcacaaaaaggtcactctcatgcttcatatgctaacagcttaagattggtctctcaaatatgttcgtcaatcttgaaaagacatgttaattagcatatcagttacatacgtctatctagccttgattatctctatattatgtcgtcaacacaacatttggttcctcctatttagactcatgcatcaaagcattttctcaaataaactattttcaagtctttgttttttaattcccacggtacgaattgttccagtagttgggtttttgtattcaattaatcattgaccaacatttttatgttttgagtcgtagttttatatttagacgacctttcaaaaaaaattagacaagtctttttttttttttttggggcaaagtcttccttaaagaacatagttgtggaaatattggatatgaaatatgtgttactgtttttttctttgttcttcatcatatttcatgttaatgggtagtctttttgttgaaatcatgtattagactagattaggatgtttaaacgatggttattatggttctttgctctatcatttatttaggttgtgtgatttatatactagatttgacttgatcattcaaatttacttaggcttttcccttagtaatcgaaaaaaaaaaaaatgtagaactggagaaaaattcagatcattactatttttcacttaaatctataattctttatcattgaactaatccactctaagctaaatttgcatatctagtcggctacggcagaacttcgtatgactttatcatgccacgtatcctcaaccttggcaatatataaaggttaagttgcaaacttgtaacagaaggataaaaaaataagaacaaaaggaagaaacaacaaatattgtgtatg

SEQ ID NO: 10768 - DNA, 3000 bp, Unknown; identical to SEQ ID NO: 6774
  misc_feature (1)..( 3000): cDNA_ID_1815548_gDNA_ID_2213672_Annot_ID_182385 3000 nt of promoter + ATG

SEQ ID NO: 10769 - DNA, 3000 bp, Unknown
  misc_feature (1)..( 3000): cDNA_ID_3037925_gDNA_ID_2213672_Annot_ID_182380 3000 nt of promoter + ATG
atataaggaatataaggagagaagttatgttttaatcaacggaaaatatggaattaggttggtatataaatatccgttttgtcatattgttatagaatatttgtttgttatggaaatattttttaatgtaactgaaccaaatctgtaataagttttaatcagtgcagatatcaagcttaaattcaaatgcatcataaatgccctaattggttaagcccaataagcccaattgggttattacgcaaccaaaattaaatgattcgtaacatccgcgtgctatccagtctagacccgatctatataccgaggatccgcgcgttttgtaatactaaatgttcattttacccttctacgaaaccattcatttattcttagaattcaaaaattctaatggcattctttgtaatatgtttagttttcaatgattcccaattaatagtatagatgttttattatatatttgttccatatgttttatttgtattttcatgggatatattcctaaaaaacattcatttttgttgtttgtattattgtcactaggaaactcacgcaatgcgtgggcttaataatttgtttttgaaatataaattgtaaattacatatgtatttgtttaaaaccttttgatggtgaaataaaatatcaaagagaagcatttaatgaaatgacttctaaacaacataaatcctactatattatttgggaagtacattttaaatgtaaccttatattttgtaagtaattacataggtatgccattaaaattaaaattttaaagagtaaattaattcatctctttaaaaattaaaaagtcaaaaactaatttaattaattaaattaaattaaaaaacgaaatacattattaatttccaaaaaagtaaccaattaaaatcaacaaattagatttgatatctaaattatcatattaatttttattaattattatagttcacttctcatatttatatgagtaacccattcgagttcgggtagaacccgttcgggtttgggattaatgggtatatgatttactacccaatagaataattctaaatatttggttctggttcgggtcgggtccatttgggtttggatcagtttggataaaaagttttaggccctaaaaattcctaaaaaaatagaaacgggtattttgtatgtagatagcgggtctccaaacaaaaaaaacttttaaatttgttaagttttaataaatttaattatatttgaatatattttactaaattttgacaaacataataaataatttttgaatagtttagttgttttggatatttaggtccaaaattaattaattgacatatttagatttataattataatcttagataattagattatattacgattaaagataattaatattttggatattaaattaatgtttgggtttttgaataccctttttgcgtaacgggtaatttttggaccaatcggatatccacgggtattaaaactctacccagtaaggaaatttcctaaaattctaactcgccctaacccggtttttttgttcggatattggattggttatcgggtccgttttttcgtgagccctatcaaagataatcttatgtaggactcaattaggttcacaaatataaccaaaatactatacaaatataatctaatatagggcccaattaggttcacaaatataaccaaaatactatacacagactaattttaagttaggccaaaaattagatcctctaatacaaaggaaacatgtttcttaccaaaacaatttgtatacaaattttacatatttacttaaaactacatatgttgtatttattataaaaataacatttttaaacaaagtcaatccaatgcaatattatatccaaatagtaaaaacattgaaaaatattatagtatcacttttatattatactatttcttatgtaattcaaataaagtatacaatttaatttatacaaaatattaatgcccgtgctgtatagcacgggttatgatctagttagtgagatttaaattgggatttatacatatatattctcatttttaaaccatgaatatacacacatagtggagtcatcactagtatatatctatttatcgagaattttcggcgattatctaaaaaaattggttgatggaaagctttaccttaggtggctattagacctcacataagataaatgacaatccaaagtcttgaaaagtcactaaaataacaaaaatgtttttacgatgtgttagttttagtacaaagagttttttttaaccgagcttcgggtgaaactttgtctcgccatttctctttatatgtagacatgatgaagccttctaattcgtatattgaacaacctctagagaaaaaaataaattattattgatgatctgcaaacttaagtccaaacaaatgcatgtgtgccatacatataatctatgcataaattacgcaacataatcacatgcaggggcggacctacgttggtcttgagttgggcatgtgatggttggatacatgcattgactatcttagtaacgtttcatttggtatataaatataatatgatggttggatatatgcatcgattatctccaatgttcaactttatttttttttctgtgctacagaaaatattgttgattttgctttatttcatgtctgtaaaatagattttcttctaaaatagaaaaaatatagaatagttttcttttttactctatatatagagtaatttctagattttgtctctatttttgaagtaactctattttaaagacatacaatggagaaaaataacctatttttactataaaataaaggaaaaaatagagttgtgcaatgaagatacttgtaacgtccgtgtcccgagttagggagtaagcaagatcttacacacgccgaattcgaggacgaattcagtttaagggggtagacttgtaacgaccgcgtcccgcgttcataaagaggccaggttgttttaggaaaaaactagaccatg

SEQ ID NO: 10770 - DNA, 3000 bp, Unknown
  misc_feature (1)..( 3000): cDNA_ID_3037975_gDNA_ID_2213672_Annot_ID_182345 3000 nt of promoter + ATG
tacttgaacttttatcggaacatctcttactatctcattgacaaaaggttcagtagtctcgacctgagcagtggcaagattggcgttatgtaaagtatctctttcttgatgatttgaatgattgaggaagctttgttgacccgtaaacttatccgtttgttggattctcatgatatcatctggacgagaagcatagaaagctgagctcacatatggcacatacattgtagaaccatcatttccctcccgcataatcggatcagaatgcatatgaggaaaagatgtctggcacatatgacaatcatttaccctttgaaaactttcagccatagttacttgttgatagaaacttccatcggggagaacaacatggttagatggtggaacttgagacccgccataaccatcaaatggtataccaggagaaatcgtaccttgatatgcagtgtttcttggctctgtaggaagcggtactaacttttgagcagcatgatagttccccaacagattttcttgggtttgcattaccgggttaatcaaaactggtgtggaactaatctgagaattcaagggagccattgacatgtgagcagcaggaaggaactggtgggatgagacacttaaaggactatcttgaaaaggttgttgggagaacaaagaagtactacttggcaaaagctggataggtgaatgaacaatatctggttgtcttaaagcttcttggcgagattcaacataggccggtggatgatgttcagatggtgtagtatacccctgttgttgctgctgcatcttaccaactattggtttctctgaaacagtctcaagctgaaaagaatgaggcggatcggcgtggacagtcattggcacaacataagcagaagagcgtggatcaggaggaacaagtcttgatacattactatgataagtctgaggtgaaaaattactcgaggtccaagtagttgcgacaaaatcactctgaccaacgcccaagctatcaacaacatccacgccactaaaatcagaattcggattagaactaccactagctacactttccttactcacaacaacaccattcacagcctctacatatctctgcccaatatcaactccatcaccatactccaatattccgaaagaatcatccacctcagacgaagaagcatcaaacaaaaaaactctcaacttccctgacccatcagaagatctctctaccaacttctcaaactcctccatcatattatcaatatcttcactagatgaaacagaaaccaaagcatcaagatcctcatcaggaagctgatacttaacaacaacagggtgaccataaacctgaatcatcttttgctcaaattcatcaaatctcacattctttttaacactaacgatccttgtttgaccaccaacgtaacgtaacatgccatcacttggtctagggattatctttccattgtagctacataaaaacttcaccttttccaattcttcatcatccatatcacttcttttattgcctaaatttggattgtttctattcgtagcatcaatacttacctgctcactcccaaacccagaaataattccatcagagacacgcttattactcaaatcagagctataatctaacccagaagctgaaagattggccggattagaaacaagattcgaacttgggctactgggttcatgtgccattgtttggagcagggagagggatagggtttatgattactcacctggtcagtatcgtggtcgtcgtattcgaggaagaaacgaagaatcctattttgtagagagaagaagaaaggagaggcaaagcgagtcgttggaactgatacaacgacgacgtttcattgggagtatcaaaacctcaatttggattttctctgtagtctttttagaatttttctaaaagggaaacacgtgagagatgggaagaggcacgtggtcgagcctcatgcaaaagaatggttgcgtttgttttccaaactgcgagagaatcgtgtgtgtaaatgctcccagttccaacactcgacatgttttttttgttttaggttattactgattattcttgaacttttagcaaaataatgaaacaattttgacttttataacacacaaaaaaagcaatacaatttcaaataataaatcgattaagagataaaaattgtgataatttggatattttaattagtttgtgcaatattcttttctcgttgatctctataaattagagaggcaaatgcgactgctaggagtagaaccttaccattggactacaaacgcttttgtgtttaagttgactattaaatttagatatctgattgtttaggatagtttaaaacgctaccgttttggaatctttatacgctaccgtgttattcttctttgaccaaaattctggagaatttgtcttcccttcgtatttctggcaacttttttaatactaaaattctctctaaagccgtcaaagaccaaaaaaaaaaaaaaaatacgaactcgaaatctctctcgtcttgttgttgcttaccattgaagctatcaatttctccgtttgatttctctcttctcaaaacctatttcgacggattattccgattcctgtttccccgaccttcacgcttcgtacttttgttttttgaaaaattcgtgtttcaggtacgttctcgatttctatttcgtttttttctgattcatcaatgaaacaaaatcgtttcttaatatacttgttgttctttgattcgattgatttttgttaggaagagcgcatgtgtagagttggtggtgtaattcagaaaactttccggagattttttggtgatgtgttgttcgtaggtaaattttgaaattttggatttaatggttgaggaagatagatggtgtttcttcaatggatctgtgaagacgagattgttggagattgatacttatcttattcgtctttatggctttgcttgattaagaaattgtgtgattgttttggggaggggtttaaac

SEQ ID NO: 10771 - DNA, 3000 bp, Unknown
  misc_feature (1)..( 3000): cDNA_ID_2705113_gDNA_ID_2213672_Annot_ID_132824 3000 nt of promoter + ATG
atcttgttgagctattacttgggaataataacttatcaggacatctcccacaaactttgggaaaatgtctttcgatggaagttatttatctacaagaaaaccattttgatggaaccattccagatataaaagggttgatgggtgttaaaaacgttgatttgtcaaacaataatctctctggaagtatatctgaatattttgaaaacttttccaagttggaatatctcaatctatccgataacaatttcgagggaagagtcccaacagaaggaatatttcaaaatgctactttagtttcagtattcggaaacaaaaatctttgtggaagcatcaaggaactgaaactaaagccatgcattgcccaagcaccaccagtggagacaaggcatccatctcttttgaagaaagttgcgattggggtcagcgtaggcatagctttgcttttgctattgttcatagtttctctaagctggttcaaaaaaagaaagaacaaccagaagatcaataattcagctccttttacattggagattttccatgaaaagctaagttatggagatctacgaaatgcgacagatggcttctcttcgagcaatatagttgggtcaggtagttttggtactgtgtttaaggcattgctccagacggagaacaagattgttgcagtgaaagttctaaacatgcagagacgtggagctatgaagagctttatggcagaatgtgaatctttgaaggatataaggcatcgtaatctcgtgaaactattgacagcttgcgctagtattgatttccaaggtaacgaattcagagctctcatctatgagttcatgccgaatggaagtttggataaatggctgcacccagaggaagtcgaagagattcataggccctcaagaactttgacacttcttgaaaggcttaacattgccatagacgtggcttctgttttggactatcttcatgttcactgtcatgagcctatagctcattgcgatcttaagccaagcaacatacttctcgacgatgatctaactgcccatgttagcgacttcggtctcgctcgtcttctcctcaaattcgaccaggagtctttcttcaaccaactaagctcagctggtgttagaggaaccattgggtatgccgcaccaggtaaaactattacacatatggaacgtttaaatgaagaatatttatgtgttccttttttcattacaatcttgttgtcgtttttgtgtgtgtgaattatggtgcagaatatggaatgggaggacaaccgtcaatacacggtgatgtatatagctttggggttctcgttttggaaatgttcactggaaaaagaccaaccaatgagttatttggaggaaactttaccctgaacagctacaccaaggcggccttgccagaaagagttttggacattgcagacaaatcgattcttcatagtggtctcagagttggtttccctgtacttgagtgcttgaaagggattttggatgtgggacttagatgttgtgaagaatctccgctgaaccggttggcaacgagtgaagcagccaaggagttaatctcaatcagagagagattctttaaaacccggagaacagccagacgttgaagtgtttatggttttctctacaaactttgccatccacttaaaagccttactttgaggcctatataatatcatactgtctttcgtaatctgtggtttgtttttttcctctgtttatgctctcttatttccatcattgtcttaaaccctaaaccctcgtttctctttctcgttgctgcaaatctaaaacgcataattgggctcctcaataaaccctaaaccagacaattcttggatctctatccttgtcttttcgttactgttttgatgcttcttgtttcctgctgttaggttttggaaactagactacagtttgcagtttcttggctgggaagtcatgtaaagccaaatacagagactctttaaatccaaagacttgggtccaatggtcgatgggtccatattcgtgataagatataaagcccatttagttttgtcaaggccccaagtactgtttaatgttgttgtctttcattatatgtaattgtatggttatgccataaaattgcactaaacagtgcatcatgcatatagacttatctctgtatttggtaaagataatccattttcttgaacgtatatctatatcaagattttaaagctttttctaaaaatctgattctaatttttgttaaaacaaatcttattagagaatgagataatctactctaaaacaagctattttcttttcatactttcgttttcaggaataaatcgagaaaatacaaatttcataacactcaatatcgagaaaacccaagtttgtgtcctcgttaggtccgtgaacccatctccatattcttcaaccccctacgtggcaatagatcaaaccgaagctatatcaaccaacacgtgattcattctcatccgtcagatcaagatcgatgaagccgcgatgaaagcaaaattttcccgaataaaccgcgtcgcttagtttagccgaatccttatcattcatcacctgtaaccgtctctacccgtggaataaataaataaaaccaatctcttctctaaaatagcacgcgccttttcaccgcctatatccggtaaattaattaaataatttactaatttttctctcttggtatataaacatacaagggcttttgtcttcttcttcttcttcttctctgtttctaacaaagttcaggagctctcgtaagcctctgaattcgatttgacctgacaaccatacaaaaaattctcccgagaaaatctctctctcaacgaacgaatttcgaatcaccaagaagaagtaagctctctctctttctcattctcattctctcttatctttcaatttctcgtaatcaattttgtcttaatctttatagcttttctcgatttatacagattctgagatttgtttgcgtttcatcggaataatg

SEQ ID NO: 10772 - DNA, 3000 bp, Unknown
  misc_feature (1)..( 3000): cDNA_ID_2705109_gDNA_ID_2213672_Annot_ID_132825 3000 nt of promoter + ATG
tcgggatacattccatattcaattcagctctgcaggtgttcgtggaaccattggctatgctgcaccaggtatgcttattttactttaaaatttataatcgttattaggtaattatctcaagcagagaccagacagtcgtcctaatattctttagtcttgttgttgttattactgaactttgtagaatatggtatgggaggtcatccatcaattatgggagacgtgtacagttttggtattgtcctattggagattttcactggaaaaagacccaccaataagttattcgtggacggtttaactctacatagttttactaaatcagcattgcagaaacgacaagcactagatatcacagacgaaactattctccgtggtgcatatgctcagcatttcaatatggtcgaatgcttgacccttgtgtttcgggtgggagtcagttgttcagaagaatcaccggtaaaccggatatcaatggctgaggctataagcaagctggtctctatcagagaaagttttttcagagacgaggagacttaacgagttgtcgtacgagagactactattaaagccacgagatataggtacgcatgtatatatatctctttactagatgtgtctgtatttttatgaatgtacgagtattctactgaatggtttgtagttttaaattattgtgccagtgtcatgggtgtatttgtaatgtgtcttgtgcaatgagacaggctattaaacattctctgtcttattcaataaaatatcttcacattgtagattaattttttttttctttcattttttcaattttttttactattaacattctaagtatcttgctgaatgagtctttccgcatcttcaacagcagctcccttgtcacatgcctcttctttttgtcttgctaactctttaaagagacgaactctataatgtgaccatttgattcaacctgcaggtacaaaaggagttactgacatttagaagacttattcacctatcctctcttatgaatggataagaaaatacagttttcatagctctcatgtctctaagaaatctgtatcagagtatggtaatgaggaatttgtacagctatggacccctgctgctggagatgttacctgaaaaggacgacagccaaagtgtcaatggtgaattatatagtttgtcacactctgagcactctttcattttcatgatgactccaaagaaagtcttaacataaaaagtattaacgagctttcgctattttttaattaccgcccacttctgttgactatttacaatactgttgatggcttccaatcaacatattgtatttccttaaaataacatatttcttctcttaatgatgcagggatgttgattattttccaattaattgattaggaaggcgacactcttctggcagaggtacttttgaataattactgccattttttaatatactttaccccctcaggaagggaagactacaaaattacacaaatatgtctttcatttactctcttcatgctcttgtgttctactgtcaggcatccacatacactgataagaccgataaacaagcaccgctcaagtttcagtaaactctaacctatcagagaacacctgagttgtcttggcttcatggaatgactctttttctctctgcaaatggactggggtcacatgtagtcggaatcacaagagagtcactggttggatctcgaaggaatgaaactaaccggtgttatctcgccctctatcggtaacctctatttcctcacatctcttagtctcacgtacaactcttccaatggtagtatccctcttgaggtagggaagctgttcaggcttcaacacttgaacctgagcaagatcattcttggaggtgggattccacttggcatatatatctaactgtttttcccttttgaccaatgatctatcctccaacaatcttgaacacgaggttccttctaaactgggttcgcttcctctgcttgtccttttatctctccgtgtaaacaacctgacagggaatttccctgcatctcttgggaacctaacagcaatttcaaaggaagccattcgcttaccttctttaccttctcttcttttttggtaccgaagagtaagaaaaagtctctggattgtgatgttagagctgatcaagttttaaactgaaaatgtgtttttctgcgatgatcatgctaaacttttaaagctgcaaccatttatttttgctatatatttctgtggttttttctgaaccagcagctttgaacgtgttcatgattgcagtgatcaatcaattctcgtcttaatctttagaaagcaagtttaagaggtaaattgcatttcttctttttcattttaattcaatcttattgacttggtctatgcaaaaatggaatcaaagaattatttgggtaaattgcttgattatttagtgttatttcagattttctgtcatgtaagtgtaacgtgtgttctgtagtttttgtccatctgagttactgggaagaataactgcgagcaccttcgctcaagctattggttcgaggctgaagtgtttttttggtttcctctacaaagtttgcaagcaatgaaagggcttgtcacatgtatggttgctcaatatcataaagtagtgttgtgtggtttaagacaaaagatgactgccgtgtgatagtaatgttccatgcttaagctaattaattgttcagattccagacatatgggaccgataaatccagccaccacatgatgcctatagaaaagtcagaaagactagttaaatgcgcatcttaatctttccttgtctttttaggcagttgacttcttgacttatattttggaaaaatctggtagttgatcattcctatttggcttcaagttgcgttagcactacaagtaggcattttgcaattgcttcgtctcttatatatttacttcctgcaaagtttgagaagaaccacaatattttaaccaacaaaaaaagaaaagagaagcatg

SEQ ID NO: 10773 - DNA, 3000 bp, Unknown
  misc_feature (1)..( 3000): cDNA_ID_2716580_gDNA_ID_2213672_Annot_ID_132826 3000 nt of promoter + ATG
tccataacttagcttttcatggaaaatctccaatgtaaaaggagctgaattattgatcttctggttgttctttctttttttgaaccagcttagagaaactatgaacaatagcaaaagcaaagctatgcctacgctgaccccaatcgcaactttcttcaaaagagatggatgccttgtctccactggtggtgcttgggcaatgcatggctttagtttcagttccttgatgcttccacaaagatttttgtttccgaatactgaaactaaagtagcattttgaaatattccttctgttgggactcttccctcgaaattgttatcggatagattgagatattccaacttggaaaagttttcaaaatattcagatatacttccagagagattattgtttgacaaatcaacgtttttaacacccatcaacccttttatatctggaatggttccatcaaaatggttttcttgtagataaataacttccatcgaaagacattttcccaaagtttgtgggagatgtcctgataagttattattcccaagtaatagctcaacaagattttgtaatcttccaatatcgtttggtagagagccactcaaagaattagattccatgttgaggtgaacaagggttgggatttgcatgatctccttaggtatagtcccatttaacttattatacccaatctgtaagtcgagcatgtgactacaatcaccaagactcggaggaacgattccttcaaaactattgttggataaatatagttttactaactgagtaaggttgcctataaaagagggtatctctccagaaaacctatttgaaaacaaaattaattccccgagccctacaagatttccaagagaggttgggagtggtcctgttaatagattatctgccaacaaaagtgattgtaggcctatgagatttccaatatcatgaggaatgcttccataaatgaggtttcctttaaggttcaaaacggtgagttccgtggacatattgacaatggatgtaggcaaagcacccccaagcctattgtaactcacagataacccatgcaaatgggagcaattagtcaaagcatcaagaaatgcaagatctccaaaagagtaacttcccaaagaattgttagcaagttctaggtaatgcaaattctctagttttccaaagttgggagagatacttcctgtcatcctgtttttaccaattccaaacatttccagagttgaaatattggcaagtgttgttgggatggctcctgttagaaaatttccatgcaaagataactcatgaatgtttggtagcagattaccaaaatcaggcttcaagttacccgagaaaccattaccaaggaggtataaattctcaagtgaggacaagttgtagaaagcaggaggaaaaacgccagagaagttgttcattgttaatgtaagagacaccatttgactcagcatagctatatcatctggaatttctccttccagatgattatatcccaagttgagcactattagagacgtcaagtttcgtataaatacggggaactttcctttgaggtcgtttagaccaagatatagataaagaagctttctcaatgaccctagttctgaaggaacaccgtctccaagattgtttgaaaataaatcaaggtacaacaatctagagcagttggacaaactggctggaatctctccttccagataattaaagcccacagccaaatatttaagtctaaacaagtttcccatctcttgagggatggttccaccaaaagagttattagagaggtcaagatatatgagaaacgaaagattaccaatagatggtgatatcactcctcccaactgcaatcctccgaggtccaaacgagtaactctcttgtgtttgcggccacatctaacccacttccagctgcagagagggaatgagttattccacgcggacaaggcatcccttttgctttcagaaacttgagacttgatctccaacaacgcttgcctatcactttcatcggtaaaaccatatgcttcgagttgcatgagagcattgaaagcaagtaaaagaaatagtctcatgcttctcttttctttttttgttggttaaaatattgtggttcttctcaaactttgcaggaagtaaatatataagagacgaagcaattgcaaaatgcctacttgtagtgctaacgcaacttgaagccaaataggaatgatcaactaccagatttttccaaaatataagtcaagaagtcaactgcctaaaaagacaaggaaagattaagatgcgcatttaactagtctttctgacttttctataggcatcatgtggtggctggatttatcggtcccatatgtctggaatctgaacaattaattagcttaagcatggaacattactatcacacggcagtcatcttttgtcttaaaccacacaacactactttatgatattgagcaaccatacatgtgacaagccctttcattgcttgcaaactttgtagaggaaaccaaaaaaacacttcagcctcgaaccaatagcttgagcgaaggtgctcgcagttattcttcccagtaactcagatggacaaaaactacagaacacacgttacacttacatgacagaaaatctgaaataacactaaataatcaagcaatttacccaaataattctttgattccatttttgcatagaccaagtcaataagattgaattaaaatgaaaaagaagaaatgcaatttacctcttaaacttgctttctaaagattaagacgagaattgattgatcactgcaatcatgaacacgttcaaagctgctggttcagaaaaaaccacagaaatatatagcaaaaataaatggttgcagctttaaaagtttagcatgatcatcgcagaaaaacacattttcagtttaaaacttgatcagctctaacatcacaatccagagactttttcttactcttcggtaccaaaaaagaagagaaggtaaagaaggtaagcga

SEQ ID NO: 10774 - DNA, 3000 bp, Unknown
  misc_feature (1)..( 3000): cDNA_ID_2705105_gDNA_ID_2213672_Annot_ID_132827 3000 nt of promoter + ATG
ttttttttagataatttaagtatttttgttacatttggttatatttggataaaaagtaaccaatatatttacgggtaatcgggtatttcggatagatttgggtatatatgagaaaaaacccgaacctaacccgaacctgaaaatattttggatatttttggtcatttttacatttttactaaaataaccgaaccgacccgaatcgaaaccgaaccgaaatttaagaatacccgaatggttctcaatctcctacccaaatagatccgatacccgaaaaaagaaccgaatctgaacgggtatccgaaaaaaagaactgaacccgaacggatacccgaattcacgtagaagatgtaaaaataatattagacatttattctagaaagggaatagaataaatgggcctcaatccgggtcggttaatctaattaggaaacgggtcattaaaacccgacccgctcaggctaatctctcatttcctagttttagggttcctcccggcaacgaacgcagagaaatttgaaaagatgaatccattgacgcaggtgaagaatctacagaagataaacgctagggaatcagatttaggaatatctgatgaagcttcatggcacgctaagtacaaaaactctgcatatgtctacgtcggaggcataccgttcgatctcaccgaaggtgatcttctcgccgtcttctctcagtaagtgttgtgtttcgtttctaaagtttcaatttttttaatgggtttataggtttaatgtctttttgttttgtggaattgcagatatggtgaaattgttgatgtcaatcttattcgagacaagggaacgggtaaatctaaaggttttgcttttcttgcttatgaagatcagagaagtaccattcttgctgttggttagtgaaactgactcttgtacatgtgaaatttactttttttttaggtgttaggatttgtaattgggttctgtttttggtgattgtagataatctgaatggagctcttgtgttgggacggaccattaaggtggaccattgtggggcatacaaaaagcacgaagaggaggatgaagagacgcgacgccagaatagagaggctcgtggtgtatgcagagcttttcagagaggagagtgtactcgtggtgattcttgcaaattttcccacgatgaaaaagtaagtaagcgtgattttgtactttattcttttcaacagatgattttgatgaatgcttgatagaagttaaccctttttttttatggacagagagctgcaaatactggttggggtcatgaagaggatagaagttccaagtgggatcatgacaagaatagagagggtcgtggtgtttgcagagcttttcagagaggagagtgtactcgtggtgattcttgtaaattttcacatgatgaaaaagtatgtaagcgagtaatctattctttcgagagatgattttgaataaatacttgatagaagttataacatactgtttatctcatttattttcttgaaaccttttttaatggacagagagctgcaactactggttggggtcatgaagaggatagaagttccaagtgggatcaagacaagttaaatggtgctaaaaagggtggtacaagttttggcaatcgaggagatttcaaacctgatgtggaagagaaaagttacagaggaaggggtgatggagatgcctcgtatggccgccctaaagagagagaaagagtggatagggaggatatggggccaaggtcaagagatgcttatgatatgaaggaacaaaagagatcaggacggtatgataatgcgtattctagaaggcacaatgatgaaattgattatgtaagggaggacaagggatccagagcacaagattgggagaaaaggaaggcagaatctagaagagatcgtaacgacagggaggaaaaagatagggattcattaagaagggaagatcgccgtcgttaaaggggtagatagtggtatgcatactcaatggttttcagttttagctagtgtctgtggaaatgacctttgttctttccaagagagttacctgtggttatataaactgcttcattctgtaacggggattctatgtttgttgtgacacctgagacttgttgatttttccgtttggaatgaaagaagtcgttatatcctttttcgtttatttacagaatttttgctatctcattataccttttgttgttagtggctgtgttgacctgtggttacagactcaggttctacagggatgagtgactctggctctccttgtacgtgtcatatggatggattagtgcaacgcttgctgttcttgtcatatgcaaattaaagaggtaaactgtaaatattttcctttcaattcctaatgactttgtctataaaaaactgaacaaagaattgtgtataaattactgtatcatatagtgagatttgaatttttcttctgctagatatgaatatgattaagatactctcgaattatttattttattgtattttgctgagaaatatatagaagcaagttggtgtatatcgaaatcgttgatgtcatggtcactgctaagaacttgacaaacatccctcagctacatttttataagaatggtcgttgctattagtgttaattaatcaagttttccttggtaaaactaaagtatatagtatttgataagcgtctgatagttgacttgggcgaaatgaagcagtgaataatgaggcaacatgagaataagtcattgctctattggactttgaccctaatagtcaacgaggattgagaataatctgcataccgcaggctgcaagccccgtggttttggaatatcattactttgtttgcgagtttctaaaaggctactatactacatattcctcattattgtatagggaaccaaagccgccagatttttatttgctcataatctcaacagtcatcctggttgtgaaagaattttttgtctccgtttcgtttaggaaaaaaaaagcttttccaacccatg

SEQ ID NO: 10775 - DNA, 3000 bp, Unknown
  misc_feature (1)..( 3000): cDNA_ID_2716576_gDNA_ID_2213672_Annot_ID_132830 3000 nt of promoter + ATG
gttagtctcgtcgcctaacccatacgtatcttcctcttcctcttcctcttcttcatgttgtgtaccttataaagatctgaacgtctttaaaattaatgggaaactagtgtataatgcggttcggggcttgatctgcataagtagactaagtatggggatttgtaaccctagcacaaggcagcttcagttttttccccaactcaagtacaaagaagatccaaaactttttacatgccccaattattttgttgggtacgattctattgaagatcaatacaaagtgctcgcaattgatcgttttcatttgagaatggagcacaagattctgttattgggaagagaagaagcttggagagaggctccatgtgttgcatgtcctcatgtttctcatacctcggggctctatatgaacggtaccctgtactacggggcgtctaggacggatatcgatccctggaataacaattctgtaattgtgagtttcgatgttaggcttgaaacgttcaaaatcatcaatgtaccaagcaaagttctaccaatgggttatgaaaatatgtggcttgctgagaggtggaggaatcttacagataaaactctgatcaactacaaaggaaaaatcggtgtggttgagaatgctcgtcaaggtagttttcgaatgtgggttgtggaagatgctgagaaagaggaatggtctatgaacactttttatttgccccaatctgctgctggccttgacttcaacatcatggataccttttataccggcgagatttgtcaggttccgaaagaattgtcagatcctttttcgtctattatggtcttatgagaatatgcacaatactaatatgtagatgtgtacgaataaaacttcgatcaactagggagaaaaatttggtggggttgagaatcctcataaggttttcgaaggtgggttgtggaagatgctgagaaagagggatggtccatcaacacttttcatttgcctaaatctgcttttttccttgacttcgacgtcacgtacggatacctttgatgctgcaacagcctcaatggtttttttttgttgacacaatggtttcttcttcagttcttgacacaaatgttaaagaagatgacgatgaaaggataatgaatctgtgaaagatgattagtaattatctgtcatagttctcttaaaagtgttcttaagtcttagtacatctaccttctgtcttttttttttttttaattgaatgtaaaattaattcaaaaccataaaaataaaaaactgtttttacatcaagtgctgcaactaccttctgtcatggttctttttctaattgtatccttgttaagttttcatttgtttccgaatcttgagattgtagttgatgatcatataaattatagaactgaacaaagttagaccaaatctataaatgttatagtcaacagtaaactcgaatccgtgagtgcagttccaagccttttagctctagatttggaggagaattgaatggtctgttctggaatgatcttctgtcatgtttgtttgaatatttatccaagacacacacaaaaaaattgtttgtttgcattcactttttgtttgttgggttgattttttaaaattcaacaatccatgatgatctaatgttctagacctatcattttggtaaatctataccactaaaaaattcatagttttatattttaaattagtacttgataaataaccgtaaaagtaatgaaaaaattatgtttgaaaatataatgattgaatataacttaatatatattgataactaccttgtttttgagttattatttgaaaaatacactttctttattttttaacaaatattacaacttttaatatataaaataacagttttgtccagatttaaaacaaaaactgttttcttaataaattaaaaaaaaaaaaaatttagaaaaaataaaataagataaagtcattagcttgtttatttttcaaatatttttgagataaaaacagtttattatttttatattaaaattttacaaaatgatatctaaaatattgtttagtctatcacttaataaagtttatttatttatttgtttggacgaattttatttaaaaatatttaagataagaattatctttaaaaattttagttgcatcaacttttaatttatggatttctttttattttaagttcaaaatatttttaactattgctaaattttagtgaggctatttaattatttatatattaaaattttaaatttaaaaaaagaaaaaaggatagggtatttttcaaatgaaaactcataaagaagttattttccaaatttactctaaagacaatttcttaaagatgaatttcaccaaatcaacatcataatttaatttaaatttcatgaagaaaagtatatattgtaaaagttctattattttgattccatttataaaaaaaaaacaaaatctgttaaatattgatgatgattttgttttaaattattcttaaataaaatctataaaatcaattctttttgttaacactataaaatcaattcttgtgatatttttcttaagacttttatatttccattgccatttatttcccctttttccttattcatattgtttcttccggaggaaaaaaaaaatagttttagggttttgtagagaaacaaggcttctgtccgattttgacagcaatctagccgatgaaaccgatttacattcctctttatctccagattaatatactcttaagattacctgtgaaatctttattgagattttgatgcgtctccaagctttggtcaactatcatcaccagccaagatttcggaaaacagcactttaatattacttcttcctcagctcctcttcgtctcctcattgcttttgaggacttttacggaggaaatcttctgttagtcttgtcgcctaaccgaaacatattttcctcttcctcttcatgttgtgtaccgtactgagatttgagcctactcaaaattaaaggtaaa

SEQ ID NO: 10776 - DNA, 3000 bp, Unknown
  misc_feature (1)..( 3000): cDNA_ID_2716572_gDNA_ID_2213672_Annot_ID_132831 3000 nt of promoter + ATG
gtttgtttgcattcactttttgtttgttgggttgattttttaaaattcaacaatccatgatgatctaatgttctagacctatcattttggtaaatctataccactaaaaaattcatagttttatattttaaattagtacttgataaataaccgtaaaagtaatgaaaaaattatgtttgaaaatataatgattgaatataacttaatatatattgataactaccttgtttttgagttattatttgaaaaatacactttctttattttttaacaaatattacaacttttaatatataaaataacagttttgtccagatttaaaacaaaaactgttttcttaataaattaaaaaaaaaaaaaatttagaaaaaataaaataagataaagtcattagcttgtttatttttcaaatatttttgagataaaaacagtttattatttttatattaaaattttacaaaatgatatctaaaatattgtttagtctatcacttaataaagtttatttatttatttgtttggacgaattttatttaaaaatatttaagataagaattatctttaaaaattttagttgcatcaacttttaatttatggatttctttttattttaagttcaaaatatttttaactattgctaaattttagtgaggctatttaattatttatatattaaaattttaaatttaaaaaaagaaaaaaggatagggtatttttcaaatgaaaactcataaagaagttattttccaaatttactctaaagacaatttcttaaagatgaatttcaccaaatcaacatcataatttaatttaaatttcatgaagaaaagtatatattgtaaaagttctattattttgattccatttataaaaaaaaaacaaaatctgttaaatattgatgatgattttgttttaaattattcttaaataaaatctataaaatcaattctttttgttaacactataaaatcaattcttgtgatatttttcttaagacttttatatttccattgccatttatttcccctttttccttattcatattgtttcttccggaggaaaaaaaaaatagttttagggttttgtagagaaacaaggcttctgtccgattttgacagcaatctagccgatgaaaccgatttacattcctctttatctccagattaatatactcttaagattacctgtgaaatctttattgagattttgatgcgtctccaagctttggtcaactatcatcaccagccaagatttcggaaaacagcactttaatattacttcttcctcagctcctcttcgtctcctcattgcttttgaggacttttacggaggaaatcttctgttagtcttgtcgcctaaccgaaacatattttcctcttcctcttcatgttgtgtaccgtactgagatttgagcctactcaaaattaaaggtaaaatggtgtataatacggatcggggtttgatctgcgttggaggtttttcaaatgttgcgatctgtaatcccagcacgagacaactgcatatttttcccgaattcaaattcaaaaaaagtccaaaagtttttccacgcccccagtacatgccgttgatactcttccttggagattagagcacaaggttattgtattgggaggagaagaagcttggagagagacttcgtgtatcgcctttcctcatattggctatacccaggggatgtgtatgaacggtaccctctactacggagctgcctggaaggacactcattccccggatagtaattctataattgtgagttttgatgttaggcttgaaacgttcaacatcatcaatgtaccaagcaaacttctaccagtggattatgagaatatgtgggtagttaagacgttgattcctacagataaaactctgatcaactacaaaggaaaagttagtgtggttgagcatcctcgtgagggtgcttttcgaatgtgggttgtagaagatgttgagaaagaggaatggtccatgaacacgtttcatttgcatgaatctgttgttggccttgacttcaaggtcatgaataccttttatactggcgagatttgtctggttccaaaagtattgttgacaagtattgttgacgatcacttttgtcttttctattacaatttggagaggaaaagcatgagaagtgtcacaattgaaggactgcctatacccgagcttaagcgactccgtaatgacctgtgactgtttctgatcatcatgagagcttcatgttcttagaaaccgaaagttaattttggcttttctttatatatatggttttttctggtaatcagggtgtgataccgcttttaccacttattagttcttctacggtgagtgtagccatctagtagctcactgaccgggttttctaatgggtagaaagcattgtatcccttcgaataaatcaaagataataatttcattgaacttggtttattatatatgagaacattagggcatctccatcagtcggatactttctgagtttctcaaaaaaaaaaagtattttaataaatattagttttataattaaatttttaattataaaataaaatttaaccaatagttgatatacatttgtttttatggatttcaagtgataaatgagtttctcatagtttctcactttagagactttctccattcacttagactaccagttgtattgacaactttccatcttgttgacttatggtggtgggatgcttgtgtacttaaattcagttcggtctaattcctcactttcgtttgaatcttctcttaagcatgtttgatataaatatttgaaaacatatataaaccaaaaaattatatatttgttctgactttaatacacaagtcagagaagtaaagagaaatacaatatatggaaaatatttctactacaagaacacttccaaattccaatgagggaagggtttgctagggttttcctttgattatttatagggttttgtagagaaacaaatcaatcttaaaaagaagaca

SEQ ID NO: 10777 - DNA, 3000 bp, Unknown
  misc_feature (1)..( 3000): cDNA_ID_2716560_gDNA_ID_2213672_Annot_ID_132839 3000 nt of promoter + ATG
ttggatatttaggtccaaaattaattaattgacatatttagatttataattataatcttagataattagattatattacgattaaagataattaatattttggatattaaattaatgtttgggtttttgaataccctttttgcgtaacgggtaatttttggaccaatcggatatccacgggtattaaaactctacccagtaaggaaatttcctaaaattctaactcgccctaacccggtttttttgttcggatattggattggttatcgggtccgttttttcgtgagccctatcaaagataatcttatgtaggactcaattaggttcacaaatataaccaaaatactatacaaatataatctaatatagggcccaattaggttcacaaatataaccaaaatactatacacagactaattttaagttaggccaaaaattagatcctctaatacaaaggaaacatgtttcttaccaaaacaatttgtatacaaattttacatatttacttaaaactacatatgttgtatttattataaaaataacatttttaaacaaagtcaatccaatgcaatattatatccaaatagtaaaaacattgaaaaatattatagtatcacttttatattatactatttcttatgtaattcaaataaagtatacaatttaatttatacaaaatattaatgcccgtgctgtatagcacgggttatgatctagttagtgagatttaaattgggatttatacatatatattctcatttttaaaccatgaatatacacacatagtggagtcatcactagtatatatctatttatcgagaattttcggcgattatctaaaaaaattggttgatggaaagctttaccttaggtggctattagacctcacataagataaatgacaatccaaagtcttgaaaagtcactaaaataacaaaaatgtttttacgatgtgttagttttagtacaaagagttttttttaaccgagcttcgggtgaaactttgtctcgccatttctctttatatgtagacatgatgaagccttctaattcgtatattgaacaacctctagagaaaaaaataaattattattgatgatctgcaaacttaagtccaaacaaatgcatgtgtgccatacatataatctatgcataaattacgcaacataatcacatgcaggggcggacctacgttggtcttgagttgggcatgtgatggttggatacatgcattgactatcttagtaacgtttcatttggtatataaatataatatgatggttggatatatgcatcgattatctccaatgttcaactttatttttttttctgtgctacagaaaatattgttgattttgctttatttcatgtctgtaaaatagattttcttctaaaatagaaaaaatatagaatagttttcttttttactctatatatagagtaatttctagattttgtctctatttttgaagtaactctattttaaagacatacaatggagaaaaataacctatttttactataaaataaaggaaaaaatagagttgtgcaatgaagatacttgtaacgtccgtgtcccgagttagggagtaagcaagatcttacacacgccgaattcgaggacgaattcagtttaagggggtagacttgtaacgaccgcgtcccgcgttcataaagaggccaggttgttttaggaaaaaactagaccatggtcaagaaatggactaaaatacttagtcggaagaacgagaaagttcaagctgaaccagctaggtgagctggacaaactaggatgaactagctagctaagctaggtgagctaaaccagatggaagactagctagctcagctaggtgagctgaccaacagctcgactgagctcggtgagctgatcgagtactgacccagttgggtggtccggtcatctgacactcgagctagttgactgtggtagctcacgggtgaagaggtgtctcggccaaaaggtgtaaggtcgagcgggtaccaacgaacagttgcatcaccaaaggatacaaagaacggatgtgacctttcggaaggatgcaaggaacggatgtgacctttcggaaggatgccaggaagggatgtgatgcttcgggaagcatccattcgccccctatataagggaggacgcccaaggcctttggaatcatctcacaacattcaaaacaccacaaaacattcttaaaagagtcccaacacatcctgaagttgttggtcggaaaggggtgcggctcggcgagtataactcgaccgaactgatgcgcatactacctcccggtccaacggttcgatggagtgtagaggatggagagggtagaccgttcgtcttagagacgaatcagatctggtagaccgatcgtcggatcggatcggatcggccagacggattggatcgcacagaccaatcgtcggacggatcggatgggacaggccgatcgtcagacggaagggtcagatagactgatcgtcggatgggatggatcgagaaaagtgttcgaggaagcacaaggataagtgcatccggacacacccaagggtcgcccatggatgcaatcttaccggtaaagggagaaagcaccaagaatgggtaaggaacgtgattcaccatatgggatcaatatcgcggctgccttcatgtatctatctccttagccatggtgaaaccgatcggagatcggtaagaccaaagggtgactcgacggataaccaacgggaaagtccacggtgggaaccgatggacaaaacggatgttggacccgtgagcaaacctaacgccgacggaggaaggatttcatgggctagcctacgatgatccgatggatgaatccacggacccttgggtgtgataaggatatcgttcggaccgcatggatggatcattaagccgaaagctttatcgaccaccatggaccggacgggtaaacggttagtaaaccgtgggcggtcgtagtgttaaacgaccggatcggaaacatg

SEQ ID NO: 10778 - DNA, 3000 bp, Unknown; identical to SEQ ID NO: 10774
  misc_feature (1)..( 3000): cDNA_ID_3037951_gDNA_ID_2213672_Annot_ID_182364 3000 nt of promoter + ATG

SEQ ID NO: 10779 - DNA, 3000 bp, Unknown; identical to SEQ ID NO: 10773
  misc_feature (1)..( 3000): cDNA_ID_3037955_gDNA_ID_2213672_Annot_ID_182363 3000 nt of promoter + ATG

SEQ ID NO: 10780 - DNA, 3000 bp, Unknown; identical to SEQ ID NO: 10772
  misc_feature (1)..( 3000): cDNA_ID_2705109_gDNA_ID_2213672_Annot_ID_182362 3000 nt of promoter + ATG

SEQ ID NO: 10781 - DNA, 3000 bp, Unknown; identical to SEQ ID NO: 10771
  misc_feature (1)..( 3000): cDNA_ID_2705113_gDNA_ID_2213672_Annot_ID_182361 3000 nt of promoter + ATG

SEQ ID NO: 10782 - DNA, 3000 bp, Unknown; identical to SEQ ID NO: 10767
  misc_feature (1)..( 3000): cDNA_ID_3037960_gDNA_ID_2213672_Annot_ID_182356 3000 nt of promoter + ATG

SEQ ID NO: 10783 - DNA, 3000 bp, Unknown; identical to SEQ ID NO: 10766
  misc_feature (1)..( 3000): cDNA_ID_2716601_gDNA_ID_2213672_Annot_ID_182352 3000 nt of promoter + ATG

SEQ ID NO: 10784 - DNA, 3000 bp, Unknown
  misc_feature (1)..( 3000): cDNA_ID_3037967_gDNA_ID_2213672_Annot_ID_182350 3000 nt of promoter + ATG
tcctgcttcttcccctcaccaccagcagcaatacaaatctttcctttagaaactaattctttactctctggtttgacatttttaatcgaataccaattcgaatccctaagttccttctctgtaaccaataacttagcaccatgaaacaaacctacagtttcaggtgatacctttgcattcgatatacctctcaattcatcaacctcaagcaatccttgtctcttaatcgaaaccgaccgatcaaaactccttctccgacgagaatccgagtaatagttcttcgtttgaaccgtcccacctggactcttctccttctcctctacttcttcttcttcaacaccacatttagctttagcatcttccgtcacagtagacaatgtcgtaagcttgtgatatgatttttcaatcaagcaaccatcccatgaagacctaggtttctcaaacgagatcctacctccatcaaaagacaatctaggatccacatcagaagagtgacgaccattcacaattccggcgaatctggaatctgatttttcgtcatttctcttattcaatgtaaaattcttcaatctcctgctcaaaaccgatgctatttccttcaaatctttgccattgttcttcttaatctggtttctccaatctagatctatgaactccttcatcgtcttgttctcttcgacgatcttcctcggcttgccttcatcaaaaccttttatatcttctccatcgtagtaatcttcttcttcttcttcctcttcttcctcctcttttaaatctggaaccagaggctttcgaatcgaactatccacccgttcttcgtcatcatcgacaaacaagtccaggagagagcttgcgcttgacctaacgtcacatgatctccgtcgcggctgatccgaaacggagactgatgcgttacgaacggagtatgatcgaatacgacggagctcgggagtctgaacggcggcgagagaagaagactgagcttctattgttacgagacgttcacgaagacaggaagcgcagaaaccgctggttggtttagcggaagggtgacggtggcatgaggaggaggaacgacggcgattggtttgtttgacgttagccatggctgacgaatagttcgtttgatttgcttgcgtgcggcggtgacttaagagagagtgtgtgtgagagtgtcttgatgatagtgtaagtgttgtttgtagggtcaattatggaaatttcacttaaaccctttcttcaattttctatttgttcagtatttttctcttgtattaatttttataaatagtacaattttaagttttcttcacaaaagtaatattcaaaattattttggacataaataatacctaaacaattattttattttaaattattaaaattaaaaaattataaaatacacaaattcatcgccaaatatttccgacaatattttttcgaaaaaaaaatttttgtccacaaaatatttgagtgctattgttgtcatttttcctttatttttctaggtcacatcattcttttgggtatttttgtcaaagatctaatgtaaattatccataacactctatagttagtaaaaaagttcgtaaaaaatattatttacaaaaataatcttatatgaatactcaaaaattatggtttaattacaatttacatgcgtatcataattttaatataataacatcatattgaagcaaatattcgtagaatttacttaagtttttttatatgaaaagtataagtaccgtatatctagccatttttcgttaaagaaaatgtgttgttttttgtttttgtattggattgaatggtagctattataatagcggtacaactttaacagttaccaatcacaataactttatcaaaagcgttacaaaaagttttactctcagtttttttatacagatttagatttattatacagcttattttaacagctttgcattattccgataaaactaatagctaaaaaactcgtacaacttatagttaccaatcacatccattaccttttcttacttaattatcgtaacaatagaaaatgtgttaattttgtataactgtcaatcaacaaataagttaacacttaacatagcccaccgtcaatatttggccgtttctatgtgtcaactctttggattccattctaaatagataggtcaaagtcaactttttctatttcattgattgaatatgtttatcagcaaatgaaatcttggtttaataattggatgattttgttttaataattcgtgtatgatatgcataatttgaataattgcgaattttaaaaggaatctatggagaatacgactacagttaaagtgaccaacacgagtaacatagagattcggatctacgacaagttcccaagagaagaaactgtgttcttcaaaaaacattagtaagtcccgaagccaagacagtgtttattatatttactgtttaccattttatacttttctctttttgtcgatatatacagatttactgtgattattttcattttctgataaagattggaatcttccacgtgtttaccccagatacagtgactgacaattattttattttattttttccaaggcataatgagagtaagatattagaaaagataaggaatgctcctaagaatttctgttcaaacaacaaagattttttggataaatatgcactaatacttgtatatttggcacaacaacacggtattaaagtctaaacatttttatttaattatttatgacatctaaattttgaaaaaaaaaagttgttttacatataatattggctttatttccaatttagctcctaactttctattttctctcacaaaagagaaaccaaacaaggttttgattaatttgtttagctaaaaataaataaactgcattatacacttcaaatcgtgctaattaggaagcccaaatcatatggaggacgagccacttttaccacttatgggcctgttattagtggcccaagacgagacggatg

SEQ ID NO: 10785 - DNA, 3000 bp, Unknown; identical to SEQ ID NO: 10765
  misc_feature (1)..( 3000): cDNA_ID_2705125_gDNA_ID_2213672_Annot_ID_182349 3000 nt of promoter + ATG

SEQ ID NO: 10786 - DNA, 3000 bp, Unknown; identical to SEQ ID NO: 10769
  misc_feature (1)..( 3000): cDNA_ID_2716557_gDNA_ID_2213672_Annot_ID_132840 3000 nt of promoter + ATG

SEQ ID NO: 10787 - DNA, 258 bp, Unknown
  misc_feature (1)..( 258): cDNA_ID_3038063_gDNA_ID_2214449_Annot_ID_182389 3000 nt of promoter + ATG
caatttaaatcttctgatctagtttagctgtctaaaacacgcattgagagtctacacttgtttatgaacttttatcgtagtctagcaagtcacactggacctaaatatttggaatgagacttcgtattgtaaacctggatattattaccagtagttgggagttggtcactgtccccatttgtatctatgctagagaattcttccagcaatcaaactggaattatgaattcatcctcatcctgtattggcttgtaaatg

SEQ ID NO: 10788 - DNA, 3000 bp, Unknown
  misc_feature (1)..( 3000): cDNA_ID_3038049_gDNA_ID_2214449_Annot_ID_182394 3000 nt of promoter + ATG
acttggattgtacatcacttttagtgtacaaatatatataaaaatacacagcgtacattttacatttgtacactaaaagtgatgtacaatccaagtgtacgaatcaaacagtgaaaagtgactattttgcaaattatgaatagtaaagtgactactttcctaattaagtttgaaaaaatgactattttgcaaacacacccttaaaaaatttatggtggaatggataatctttatacttaaagcttattcgatgaccaactatgattgtagttatagtaatactatggcgtataaatatactgtatagagttatttctctgcacaaaattttaattgcatgttaaaacaataagacagagcactcactgacagtatccttttctcttacgtaagacattgaaattaatcgggagcgaccttgcaagaaatcggtatgttaataaccattaattccaggcattcggttctggtttggttttggattcaaaagctcaataaataaataatcgcttttattaaccaattgtacaggtcctagcgtttgcagctgcattgaagtcgcgtaagataacagcaagcgtaaggcaaacaagaggacttggagcgagtgctgcttgtggtcagttgagaaataagtttcagaaaagcccttcacttgccactggtaggctctgttcaactttgatttgaaaaggagagatggctcagtgacgaaaaagtgaaagttgcgtttacggttggttggtcagtgcagctgagggtgaagtgattgaagcacgtttgagaagtgaagactttgataatagctgcataggttttgcatttacttatatatgtgatgcatgcgttggtttataattatgacaagtgagcaaacttaacgagtgttgttgttgctaaatgaatgatattaatccactacagttgtaaactacaaatatacaaagcagtaaaaatccatgtatgatgattaataagaagctttcgaatggatatagaaaaaacttgaatcattgagtgtgaaaacataagtaatgtataactttttttttgttatcaagttgtaaacaactgaatttagattttggtacataaaacaaaaataaaattacaaacttgaagacaatttaattacaaagtgaatgatgtatgtaattggcggtagacttcatgacacatcataaaaagactacacaactcccattacaaatcttgcaaaacaagaataccaacatctacttttttttgcatatcctaaaatatgtttcgttaacataaaaatattacaaatatcattccggacatctcccatttttttttacgtataatatcattccggatatctcccaattttttacgctatgttggacttagaatatgctatgttggacttagaatattcttctaccatcctatcaatcataactactctgataatatggtgaatggttagataccgatgaatgactcattcgcttgttgagaaaaatcacaagaaaacaaagttgtctcctcctgaaaatagatctccgtattccgataaaaccaaatacagagagcacgggactggtcgaaactgacacatggctggtgacaaatagaccgggacatcgaacctaatatctcaaaacctcaatctcaatctagctatagaagctactcaagagaagtaaaagaaagtacctttctatgagacaagaccatgactcgatttaacagcggaacctgatctaagaacctatctcaacttttgtgttaagatggagttacagatcgtagttgcagagcttgacggcgctcatgtttactctttttgttaaatgacgtcaggcttagccgcttaggtttagatttatgaggtcggtaatgagtgacttgggtttataaagtcccatcgttttccctatttgaccttttttgttatgtaaagagtacaaagcctttttgggtcaaattggtatgtatacggcaatcttattaaagttggatatattttgtcaaattgtttaactctgttttttttttattggaaaagaatatattacttatagtcacgttgaaacttaactgggaaaataattttctttttgccaacataatcacgttgagacaaaactgaaatatattggaaacaaagttaattataactcttttcatataataaatttactgttaaactatacactatccaattttaaaatataagagatttatgttaaaactaaccgatctcaaaatatcctttcaagtgttgattatcataatttagatataaaattaacaatacttacctatataaaattgggttcttgacaatcaatgtccaagatctctgttcaaacataaaatttcaaagattaaaatttcaatagaaacatttggaaataataaagtcaaattctaaaacaataataaccttatctctttgtaaaattccgttgttacgattaacagatgataaacgaagacatagtaacttgattatcagacaatttttgcaaatgatttgtattacgaagaaccgtctggtttatttgggtgtgttttagtgaagaggatgataagacaagacctgttctgttctgtgaaaaaaaaactttcatctattcggaaaaaaacaaatagattagtttgtcgtttttattcatttgcggccactttgctctagcagtacgatttttgttatatactactatagcttattttattttctcttaggagaccattagatctagcttcagatcacgcaatgcggtaataatgataattaaaggcatgataacactttttgatcattttacttcactttaaaaataaatataatatttataaaaagataagtcaactccccaatgttaaagtttcccaaaaccactgaacctaaaaaatcacacatagcctatataaagaaggcaaagcattctttcagactcacaacattaactatatatctccatcttcttaaaaataatcatcactaaagatataaatacgacaatg

SEQ ID NO: 10789 - DNA, 3000 bp, Unknown
  misc_feature (1)..( 3000): cDNA_ID_3038045_gDNA_ID_2214449_Annot_ID_182396 3000 nt of promoter + ATG
ggtcgataacgatccatgatctctctggttcaccagtagctatggcttcaatggtcacacctttcgtaccatctcctggttccaaccgcgtctctcggtctagtcctggagcttggctaatcctcagacctgatggctacacctggaagccatgggttcgccttcaggcatggcgtgaaccaggcgtctccgatgttctaggttaccgtttcgagctttataaagacggtatcgctgttgcagtctctgcttcctcgtcgatcagcacaaaacttggcgggagtttcatcattgatggatccacttctacgactacgactgcttcttggagtagctctgaaggaagtttcgatctttcttcgtggtcaagcatcagatcatcaagaactgattcaggatcggggtcggatttcaggttctcactgtctcaagcgcaacaaaacttggggtttgtgatgtcgacgagggtgcaaggagtggagaaacagagcaagcctaaggtggaggtaggtgtgaagcacgtgacttgtacggaggatgcggcggcgcacgtggcactagcagcggcggtggatctaagcatggatgcttgtaggctcttctctcagaagctaagaaatgagctgagacagccaagtcgtgttgatatcgtttgacgtttattgctttgtcgttttgatacatgagatagaattgtcagttgtcttccactcgctagttttttttttgtttctagtgagggaaattggggaaatttgagtaaagtggaaaagtctttttgaattttatgtcaaagtttggactttcgagttttgaattaacaggctttgggctttgggaagcaactaagcataataagttcattaatagttcaattccactggcataaaattttatccttactggcccatatttccttgcgaaaagtaattcacgaaaaaaggagtgaaaaactatgggagctatcttggatcgaagacaatcatacctggcttcaggtgtcccaagttttagttttgtatatttggttgatttttttttgttccacttggattgtagttttacctctgtgtaaagcgaaacggccctctcttttgtgatcatcatggaacctcttagagatagttatatatatcagttctgattctcaatatttagagacaaaaaaagagaggttggaattaactgtgaatcattcccaatggaaatatacaaaaccaaaataaaattgtctaagattacatgcaatataatttgatattttttaccgaatcaaccaatagagtacataaaaaactatctatatattaataatctaatattactatctcaatagtgtttcatatagcgttgatcggtttaattattgtggtgatcgagttttgacaattttataaattattggcgttgatctgttatcatgaaagtattaaaaatattaatttttgaaaggtacctaattaaattgtaattgcaatgtcgatgatatgatctctacgtatatatgaatacgacttttaactattccaattttttttttttttaaaaaactttaacactaaaaaaagattgaaccgacaacgcaaaaccaccattatattagctgctagctagaccaccacctctttgatccattaaactattacgcgttcttttatcttttagttcgaatccgaatgtatctttaccttgctcgcatgtatatatgtaatgaatcctttagcgttcaacccacgataggttaatttatggtctactatcttgatccacttggtatcttccttattttttttactatttatgtacgtcgttttcctctcttttttttatgtcaaatgtttacgtcgtcttctttacactctatctactgatatttaacgtttgatgtggttggagaatggtacaagtagatagagtttgttatctaaactaagttctatattaacactatgagtactgtcccattaacgttgcaaccggcggaggatcacggcctttcacatgccatcatatgtaaataaataaacattgatattaaaagtacacatcttcaaagcttaaatacatgtatatatgacctatccagaagataaaaaatctctattcatgaatatatcgttttgttttcaggaattaatattgtaatttaacataatttcatgaatattattactattgtcattttcgataaagtgataatattcaggatcctcttttgaagaaaatccgttttaaaatattataatttaaactcaccagtttattttacaattctaaattaaaagaaaaattgttcgaaaattacaaacagatctagatatatatgacctatccagaaaacaaaatatagaagagtgcaagaccatgcaaatctctattcaactttcttcttcaatggataatgctaaatatgtagataattacggtttggtgatctataagaaattaaaaatctgtattcaggaattaagattttaatttaaaataatttcatgagtattattactgttgtcatcttcgaaatagtaatcatattgaggatcctcttttgaaggaaaccagttttaaaaatatatatatatatatatgtatatatatatattcttataatttaatctcactagtttaatctaaaattctaaattataataaaaaatagttcgcaaattacaaaatgcattttattagattttatccttttgtttcatttgcgctaactattctctctagaagtatactttaaatacatatacactgcttattttatttctgttttgaaaccatttgatttagcttaagattgcttaattaatgatgaattcatgacttaattaatctatatacaaagaaaagtcaccatttccccattgtaaaagtctcccaaaaccactgaccctaagcatgtacttgcctatataaacaagaccaaagtattactcaaactcacagcataaacaatatatcaccctcttcctagaatcatcactaaatacgataatg

SEQ ID NO: 10790 - DNA, 3000 bp, Unknown
  misc_feature (1)..( 3000): cDNA_ID_3038055_gDNA_ID_2214449_Annot_ID_182392 3000 nt of promoter + ATG
ctttacccggaggaggaacctaaaaccgaaaaaccattacactactctttagcagcaactactaaagatgagagtaacctacgatagagaaccacatcagaaggaactagaggtacaatggtccaatagtccatacccatttcttgttggcaagcacagtttgcttaactgcctcgacaaattgttctagagtaggaggtgtcatacaaagcctctccgcaccagtttgcatgcgaagagcgttttggtcaggccggaaaatcctaatccggtcgtcttctgttctgtaagctttgagaccttcaaatagtccctacaaagccaaaccaatatcaaaaggtatagacgctaaagttgctgacttttacagtcaattcaaacaatcattgattaaaggcttcaaatttcttaataatgtttctgataaataccgaagttcctacaatcagtgagatttggtaaggcttatacaaccagagaaagcaaattagcactaatttgatgaagtaagagccataatggtcctcaaaacctacctggccgtaattgagaatcggagaacaagggctaattgaaatgtcgccataaggaacaatcttcccttgtgtaaagctctctccttgtctgcatttggctacatacatataatctattggagtcagagcgaatccaagctcttcccatttgacattcgcatatttttcatctgtttcactgatttgatttcaatgcatgcccaccaaaagaaaacagaaaatgagtaaaatgaatttaaatgaacaaacacgagataaccccagatcaggggattctaataactataaatctgtccttttttttttcttctcatttatcataaaaagatgagacctttttataccttgtagtacgaagaggtgatgaagaaggagccatctatggagaaatagagaaagcagtagtgaagtgaagcagaagaagagaggcgtgtagtggtcacgtggtttcaggagcgtctttttatagtgtgactgacaacaaacaaacccttttgattccttctccacttttttcttttaaagaatttgttgatgggaatatactaataaattgtagaatcttcaactatttttctttttatacgaaggttgatgggatggctaaagactttttttattaagctaaagtggccgttctttgttgagaaaaggtgtctttaattcattagtaccaatacattgcaccgagactccgaatggagagtaaaccatatagtgcaatgcagtttcatagtaccgaaaacatttacatattattgataccgatacattgtactattttttttttctttataatcaggataatcagaacctttacaaccggactatttttttccaaaatgataaatttttagtttttatttcatttttaataataaaatatatctattactaaaaattaaaatataaaaaagaagttacaaaatttatcgggtgaaaatggagtaagattcaagttgcaatgaattgttgggcaatcactcactttgttaaattcaatggttcaccaattaatccgacgacaaagttcagagatttagttccagttgattcgcttttttactacagtcacatttatgccaacaaagctcaagtcaacaacatgtttgctaccacgataaatatgttttgctttccctttatcatttttttttttgtttgttttagattctaaacaagcttcgtaactgatatgatttgtcttccatggactactcatgagcaaaaaatcgttttgagtaatcttgatagaatcctaaggagtattgttgcctagttttgcatttgttactgattcagaagaggtggccataaataatgaactagctcttaccaaagcaatccgtgatgtaaatgaccaaattttatggattttatatgatttggtttcgtgtgattatagataaactaactcgcaaaattagacaacttcaaactatattgttcaattacagtttcaatgttttgcaaaagacaataggaacaacattttgctaagaatcaagacacctagatagttttatgttcatgtaaaagacaatcagtgaatgcaagtaaatacttaagatagaaagacaaaaagtctagcctactttaaaatccatgatacataatccaaaacacactaaattgaatgtttaaggaactactactgtatagtatttctaattagccgagtacacatttttaagatgtcgaaaagatgctaaaattgaatatgaaaatataattacttctttgtaaattaggtgttttttaacgaatcatcatatgtacaaaaatatgatgagccaatgatttattgaattagatacatgtagaaaggatttgtatgatcctaaagaacttcgaaacgaactaatcaaatggatcaaaaatatgattgcagaatataagaaatgttgggctcatgttgggctgaaataagacgtagagattaagttaagctaagctttctaaagtaattgtaagcttctcctgcagaggagaatagaagtcatcaaacaaggatctcagaaaattgcttatctccctaatttcttcatctccctctaaactctcttccagaatccttgctcaattctcttcatttgtgatctcggctctcttatcacgaagacttctcccggcggcaccgtcttcacatttctgctcgtcattctcaaggaaccaaggtagaagctcactctctgtgaacgaaacatttgccttttgttcggaacgaaatctcacaaattggttctatgatctgcgcgattcgcgtcgtcttctctctggatctgaagtaattgattgccattcgttagctactgtctgccaattttttatgtttgtcctctctctggaacccttgaatgattcaactccatccaagtctcgtcgtccttgtaattagcaccattgaagcgattcatggaaggcattgttgtattggttaagaaacacagccattgaagcgatg

SEQ ID NO: 10791 - DNA, 3000 bp, Unknown
  misc_feature (1)..( 3000): cDNA_ID_3038059_gDNA_ID_2214449_Annot_ID_182390 3000 nt of promoter + ATG
ttttgattgcagttgttttatacgtatgggttgcatttgcatactactcagaacactgaacaaaaatgcgcttaatgcagactagagcaaatgacgcatatgatagtggtgaggatggatatgacagttcacgtgacgagatctcatctgtttcttcctatcccaacaaaagcaatttaaacagaacatttggcagttcattgtccttgaattctggaccgcgattgtcaatgaaagacacgtcatatgttgaagaacgtgtgggatcatctccaaagatgatgctttctcagttatcagctgccgtggtgtcttatgattccggaactggttagtgatttatgtgcgagtacatacctaaaacagtattttaatggggtcactgagaatagcaccagctcatgtagcctctctgttttttggtgaaggctggtttcgaactaatgctaaacacagtactgttctcaaataccaataaataattgatggaaagatgctaaataaaaaaagacctcatcatctgttttgtttatcagctctataatattcgtgaggaaaagattactgaagaatactttttttttttttccttttagatgtatcttcccctcataaatcatcaaattctgtggtcccgagccaacagcccaagcaaacaaatggtgcaggagcatctatgtcgcctggagcaggagcaagagaaccagttccatgtaaactactcgtcatttctagtctttgcttgtatatagattctgcaagtacctacttatccagatgcaatcatttcttgcagcagaaggatttacaagaggaagatcatacaacattagaatggatgaccaagtccttcttaggttttcccccaagaatgccgattctacttattacttcagcgatactgtaattggctgtttcatctcttctcacattcttctaaaacattgcctgcatctgacaactgtttccacgaatggtaatttttttttgcagataggtggaactcttacattcttccatgaagaaggaaccagaagatgcctcgaggtaaatccagacaagacaaaacttctggtgtacattttgctatatcgagggccattggtactgatgatccatatctgtttccaggtctcggttactctagaaactttagagacaataaacaggagatttgttcatccatcaaggagaaattctccaacacttactaaggtatggatgcagcggattataatttggctatggatattgttactttgctttttccgctggatgctatgtctctacaattgtaatcttactaccccatatgtttttcgtcaaaaggtccaaagcgatcaccatgaggtggtggcagaccttattcaaaccagctttctattttcaattccgacggatggtccaatgtcgttttctacgccccgtgtttctgtgcaatggattcttcggtttgagttcctaactactcctaagagtgtggacttaagcaggtattactcccaatactcaaacgatccattctctggttgagtcttttgaagtgctcaagttgttgaagtcagtttctggttctgttttgtggtaatttacaggtacgaacatccattgttagtaccggaaagggaaaaaagcgaatgggttcttccgattactgtacatgcaccgccgcctcggacatcaggtgctcaaaaccgtggagataagctttttggtttggagccgtcttggattcgtagctaaatttgtttttggtgaaagatacagtttctggtctctgtctagctcacctcatgcaataatttgtttttcttttgatcatttaaaaataacttttcaagggaaatatatataccacaaacctattttgtttagtttttaattactagtttattagactatagagagcagatttatttttctttttggtgtcctatgataaaagatcttaaatctttaatcacaaactgtttcttatataagcgttacttaaatcagtttcatcagttttgggcacataaagtaacttttgataaacaaaattgtagaaaaatgggtaagagaaactgatgataaatccaaatctcaaaatcttaatcctaccaaaaaaaaaaaaaaaaaaaattattaatagaaaagttggaaaattggaaaaaaccctagatgtctttacttgttctatattaatacaacattgagagggaaaagaaaaagaaaaaaaccctatcgtctctgcgctccatttttctctccttgcactaagcttctctctccctatctctctcgcgtacggtgattgtttgtttaggtctgggcaggtactgtcacctaatggcatctgaatccaatagctttgcgaaaagagatcgtcttctcgagattgaggtagcagttcgaaagtggtgggaggatgaggatgttttcagggctgaatctcgtgatcatcttccaaagccaggagaaaagttcttctccactttcccttttccctatatgaatggttatctacacattgggcatgctttctcactctccaaggttgattttgcttctgcttaccatagactaagaggtgccaatgtgcttcttccttttggtttccactgtactggtatgcctattaaggcttccgcggataagctttctcgtgagatcctacagtttggagaccctcctgtcttccctgctcaagataacctagctcctcaagttcacgaggagggcagtgatacaccggctttaacgggtcagttcaagggaaagaagtctaaggtggctgcgaaatctggtggacaggtttatcagtggcagattatgcgcagttttggtcttactgacagtgagattgcaagatttcgggatccagatgaatggttgtattactttccccctttggctgttgaagatctcaaggcatatggattgggctgtgactggagacggtcatttgtgactactgatgttaatccttttttcgatgcctttgtgaggtggcagatg

SEQ ID NO: 10792 - DNA, 3000 bp, Unknown
  misc_feature (1)..( 3000): cDNA_ID_3038043_gDNA_ID_2214449_Annot_ID_182397 3000 nt of promoter + ATG
aacaaccaaaaatcataaacaaagtcgcatacttgatggaaaccaacaacaatagatcaaaacccacaaattgccagacctataagaactaaaacttcgaattttccattaaccagaacagagagattccgtcagataagcaataaaagcaaaagggttatatgggtttctactaaagcataaaaagggagaatactttacaatgttcttcattaccttaggattaccacggctgcaaaggtcagcgatgacacgattcaaagtgtcaaagcttccgccaccagaagcggtggctgagggaccacaaaagcggtgcgattgcgaaggggaagccatggatgcaggccgtccagccacaaaagattgcgacgaggtagacatcgctgcagggccagtccagccacaaaaatcttccaaaaaccctaaatctgacccctttttggttcaacaacacttgggcagagagagagtatgtacagaggaagatagaagaatcttcaacacatgatgcgtcgagaaccgaagatcgcagaagaaatcaagattttttctcttatttttttacaaattcaattcgctgagtgtctttttagctttcttaggttttgctttgttctttcagagaccaattatctttggtaaataaattggaaaacccgaaaggtttttactaggaaaatatgactttttccttggaaaattgtaaaacttatgtttgtctatcaaaaacttataaatacaatattttcatttttttttgtcactgattaattacttaaaaccctgaaagggtctttgtttgggctatgtaatgtttagaatgtttaatatacacttgtcaaagaaaaaaaattacttgtgaaaaaaaaaatagtcaaaaactcatatttgttcactggacaatagaataactttttttgtcaaggaataactttgtagtttcttgaataagttttcttttattgtcatttcactttattattattatttccaattatgcttttaagcagataaggagtttttaaaatgatcattaaattgtaggaaaataataaactatagttttgttgtaattagtagtcattacgaacaaaaataatggggaaaatgaaaaaattcaattgaatgcatatggttaagtttgtcaacaaattaaataaataagaggaataatatctatacaaaaaaatatcgaatattagtcaaattttgaataaaaaatgtcaaataatagtagaattgtaaaatagttgtatggtaatcgatatatcatatattgaaaaattgatgaaatgtgaatcatatcattcagttaatttgaattgtttttcttttttttggtatggagtggatttgaattgttagatgtgatgaaactttgtttttctattcataaaaattctaaatcatagaaatcattatttattctccaatggtaaatttttgttttgcttgtatgttaagtagtattcatattcatatgtataggaaaaactaaagaaatggctcctccaaaatatagttcgtgtttctccgttgttacaacgaaaataatcacaatgattgtgtatgacaaaataagcattacattcgaaaattaaacgaagcacatccaacataaaatttcaaaagagttgtggcttgtgggaggctatagcatcgcttggtttcatcgtacacatcaaggatggtgaatagacagggtccaagtgttaacgttgcgcaatcccataacgtgacaagaatgtcggtgaaaatattggtgttcttttctctccaaattaataaactacaactaagagtactatttaaaaaagagttaaaatgacacaaaataactcaattttttatatcattaacgcattatacgtatagaatttaaataataacatatacatttccatataggataaataacctcatcaaaaaaaaagaagaattttattattagtttagacttttttgtcaatattaatttattagcttcttaagttttatattattagcaaaggataatgatgccaactatatacatgcgtgctccaacttttgggaccaattcatctaacctaagtgataaacagatagataaattatccacttctaactattttccatcagcttatttcaaaatttaaaagctaaatcatttcaaatcaaaaaggtctttggcttttttttatccactgttccattatttctctcttccattaaaaaaactgcattttacaagatctttcagtttttagaagtaatcaagtatcagtgccaaaaaaagctacattaaaatcttacaaattacagtatacgacgtattcctattttcaatcgttatctaagtagaaatatatttaataaaacgtgtgaaatgtcaataaaacaacaacaaaatgtacatacattaaaaagaattcaagaccagcaaaaatatatatacacgttactatttaatctcttgatatgtttcctgtataaaagaaaaaaatctaccatataaacctcaataacgattccagaaattatatcaaaattgtaaaagacaaaaacatttaactaaaaaaatcatataaaggagtaaagaaataaatctatttagaacactagaaatttcaaggttaagaatcaatacatacttaaactaaaaaaaaacttttatttaccaaaaaataaaaaaataaaataaaagaaagaataatattatttcaatttacacatctggaaattgacaggcgatagtttggttttttggagttttgaccccacaaaatctttcacctaatttccatttgtttttctcaacaaaaaaatcacagctatattccagcctgtttaattctcatcaatcttccatttttatagctcttctccaaaatcccttcttcttccactccaattctctcttaaaccctaaactagttagggttagtagtgttaaagttcctttcttcgtagctctgactaattaacatttaccgataattcaatcttcaattcacaatg

SEQ ID NO: 10793 - DNA, 3000 bp, Unknown
  misc_feature (1)..( 3000): cDNA_ID_3037991_gDNA_ID_2214449_Annot_ID_182400 3000 nt of promoter + ATG
ccgtttgatacttatatcgtctatctgtgggatcgtcaacacggttgtttggtatcgggttacttgcaggcacaagagtttattgttcatcaagagtcagagaatgggagtagtagtgaaggtgattgttgtcgcgtaaacacgtcgggtactgaggggtacatggaagagagatgcgatggagtccttatgttatcccagtttgtgctcccatcttggatggactcggtaccccgaccgccaaattgattatccttcttcgggaagcttgttcttcggtgtttatgtatttttatgtatccttgattccttgtttatcatgaggctttaatattcaaacatcctctttgttttcttatcaatgatgtccagactcaactaagcaaaatctctgaacacaagacaaagcctaaaggcaccaaaaactaaagcctaacaagcttttagatcatctcttgagagtcagaccacatcactagagttgccaaaagagcaatggttgcggtctcaactcgcaaccggtgtggccccagtccaactgctgtgccgcctgcttccaacatcatctccacctctttcttcgtaaagtctgcttcaatttcattgttgaccgttagataacaaacatattttttatatcactgagacaagtcatattaacaagagccataagctactgttcattttgtgtctactcgagcattaacccatgatttcattttcgacaatgtgaaagtgtagcaagtcagtagaaattttaaaagagaactacatcagaaatgtattgaagagaagatttcttaccgccttctggtccaacgattaatagtccgctggattcttttgctgaggagtttactgcattaagaagaggtttagcttcggctgtagcaaccaaacataactttgacttcaaaatctagaaaaccccaaaaggtgtcaaaacaagtttagaagaacaaaaagtcagaaattttataaaccaaggatcttagagtttgcgtagaaaaatgttcaaacatacatgatccaagagggtaccaaatttgattggagggttcagtaccatttgatgaagtctttggcctgtgacagtgaaagataaggcaaatagtttctgatcatacaactataatgcgaaggaaaaagaagagcaagattaaccaaccaattgttttctttcactattgctacttacattgcttagctgcagcaaaactaacgcgttccaatctatcgacccggttttcagagattatgggtgatctttccgttaaaagtggtgtgacactgctcgctccgagttcctaagacgagcatatacacatattcagtgacacaatattcacaggtgatttagacagttacatactaaaagtagatacatactgtacatttctcaattagccaatccgctcgaccacccttcaaagttcctgacaagacattttcaaagaaatcatgactcaagctgagccagagactataacatccggcgatatcgtaaagttaggttgaagtcctatttcataccaaaagctgcaaacacctgccactgcatgccctgaggaagaatcaccttctgatcttcttgtgcgataaaatcaactccagttttgtctatgctttgtatacagccttctactagaccccctttgccattaaagagttctacccttgcaaagaaaaggggtgcaagtcattacttacattcacttaaggtttagtgatcttaaactaaagaaaaggttggcctcctctcacctcagggttacttttgatgctatcattacttaaacaactgaattcctcatgataaagatgcataaaaatgaaaggatggatccagatacattacaaacatcattcagataggataaaacttttagcaacatggatacaagcaaacaaaaaatgaacaaatcaatttttaaaagggcctttcatgaatgcaacactggaaaatgacaataacatatatgaatgtagtaattacctgtcctcctgtttcagtctaagaactttagccatatgccaaaactcagagccttgaacacgaacaactccaccctataaacaatcataaaacgatttacacaaagaggagcttatcatttcaaacaacaagaacatttaatattatcatttcaccatgattttaccagaaatttcttagagattacagtgaattacagtaatttctaaacttctcagtgattaccctcactctcatttcgattggattcttacacagatttaaagggaacaaaaattatatgagataaagatagagatagatagggtgtgtgccttgcgagatggaagatcatcggaaaagaatcgaggaaggccaccgcgagattgattccggagattcaaatccgacggaggagacgaagatacagtagcaaacgatttgaagctagaagtcggaagccatgaacgaacgagactcggcaaatcggaaaacagtggccgtgaagccgccgctagcgctctcatcatttactcaaagctttgaatttttggttaccatttcgaagattttggttaatactagtttcttatcgtttcggtttactttaaatattggtctgatccggttcaattctaattaaattccggttcatttccacgcaattcaaggaattttgctatttcaaaaataaagagaaacggtcagaaagcgattgccaaacagaatctaaggaatcaaaattcaaaattagaaaatacgcaactcacgaggatatcaacaaatcgtggttttaacgacaacccaattacatcactacacgtgtatcatacgtgccgttacatacagatggatactttcgcttataaatatagcatcaaacagctctgtaaaaacctagaaatcgaaaaaatcagatctagatctaaaagaagagcgtcttcataaacgcccttcttcttcttcgtcttcttccctgcaaatctagtttctagatcttttctttcttccgcgaaacgaaaatg

SEQ ID NO: 10794 - DNA, 3000 bp, Unknown
  misc_feature (1)..( 3000): cDNA_ID_3038039_gDNA_ID_2214449_Annot_ID_182398 3000 nt of promoter + ATG
aatcagcttctcaccggaagcagcgacaaatccacacgacgcactacggcgagagtaaacctcgacggagagaacactccatttagccttcttaagagacgtctcaatctgagacttacttagactaaagcaagcagcgacggttgagacgttaccggaacaacaccgagactctgattccgattcggttcgcaacagaacgggaacagaaacaatctggcgtgggaaactcttgaacttgattttacaatagcaattaccagaggatacatccgaaacagacggtccagatgaagaagaagacgacgatgatgacgacggtgatctcggaaacctaaccgccaaattcccgacgatgatgcgtacgaaagagcaaggatccattgtgaattgaagattgaattatcggtaaatgttaattagtcagagctacgaagaaaggaactttaacactactaaccctaactagtttagggtttaagagagaattggagtggaagaagaagggattttggagaagagctataaaaatggaagattgatgagaattaaacaggctggaatatagctgtgatttttttgttgagaaaaacaaatggaaattaggtgaaagattttgtggggtcaaaactccaaaaaaccaaactatcgcctgtcaatttccagatgtgtaaattgaaataatattattctttcttttattttatttttttattttttggtaaataaaagtttttttttagtttaagtatgtattgattcttaaccttgaaatttctagtgttctaaatagatttatttctttactcctttatatgatttttttagttaaatgtttttgtcttttacaattttgatataatttctggaatcgttattgaggtttatatggtagatttttttcttttatacaggaaacatatcaagagattaaatagtaacgtgtatatatatttttgctggtcttgaattctttttaatgtatgtacattttgttgttgttttattgacatttcacacgttttattaaatatatttctacttagataacgattgaaaataggaatacgtcgtatactgtaatttgtaagattttaatgtagctttttttggcactgatacttgattacttctaaaaactgaaagatcttgtaaaatgcagtttttttaatggaagagagaaataatggaacagtggataaaaaaaagccaaagacctttttgatttgaaatgatttagcttttaaattttgaaataagctgatggaaaatagttagaagtggataatttatctatctgtttatcacttaggttagatgaattggtcccaaaagttggagcacgcatgtatatagttggcatcattatcctttgctaataatataaaacttaagaagctaataaattaatattgacaaaaaagtctaaactaataataaaattcttctttttttttgatgaggttatttatcctatatggaaatgtatatgttattatttaaattctatacgtataatgcgttaatgatataaaaaattgagttattttgtgtcattttaactcttttttaaatagtactcttagttgtagtttattaatttggagagaaaagaacaccaatattttcaccgacattcttgtcacgttatgggattgcgcaacgttaacacttggaccctgtctattcaccatccttgatgtgtacgatgaaaccaagcgatgctatagcctcccacaagccacaactcttttgaaattttatgttggatgtgcttcgtttaattttcgaatgtaatgcttattttgtcatacacaatcattgtgattattttcgttgtaacaacggagaaacacgaactatattttggaggagccatttctttagtttttcctatacatatgaatatgaatactacttaacatacaagcaaaacaaaaatttaccattggagaataaataatgatttctatgatttagaatttttatgaatagaaaaacaaagtttcatcacatctaacaattcaaatccactccataccaaaaaaaagaaaaacaattcaaattaactgaatgatatgattcacatttcatcaatttttcaatatatgatatatcgattaccatacaactattttacaattctactattatttgacattttttattcaaaatttgactaatattcgatatttttttgtatagatattattcctcttatttatttaatttgttgacaaacttaaccatatgcattcaattgaattttttcattttccccattatttttgttcgtaatgactactaattacaacaaaactatagtttattattttcctacaatttaatgatcattttaaaaactccttatctgcttaaaagcataattggaaataataataataaagtgaaatgacaataaaagaaaacttattcaagaaactacaaagttattccttgacaaaaaaagttattctattgtccagtgaacaaatatgagtttttgactattttttttttcacaagtaattttttttctttgacaagtgtatattaaacattctaaacattacatagcccaaacaaagaccctttcagggttttaagtaattaatcagtgacaaaaaaaaatgaaaatattgtatttataagtttttgatagacaaacataagttttacaattttccaaggaaaaagtcatattttcctagtaaaaacctttcgggttttccaatttatttaccaaagataattggtctctgaaagaacaaagcaaaacctaagaaagctaaaaagacactcagcgaattgaatttgtaaaaaaataagagaaaaaatcttgatttcttctgcgatcttcggttctcgacgcatcatgtgttgaagattcttctatcttcctctgtacatactctctctctgcccaagtgttgttgaaccaaaaaggggtcagatttagggtttttggaagatttttgtggctggactggccctgcagcg

SEQ ID NO: 10795 - DNA, 3000 bp, Unknown
  misc_feature (1)..( 3000): cDNA_ID_3038016_gDNA_ID_2214449_Annot_ID_182405 3000 nt of promoter + ATG
atttagctgagagtaacaatttaataatacatattgtctatgagaaaagaaaaaaaagatgcaagaacgaaaacagaatacctcaatgtaggcaccaattgttgttttgttacagccaccaggttctttcagggtagctattgcttccattataaggctatccaacctgcaacgtttttaaaagttacaatttgtctataataaaagatttgagtgatacaaacatctacgtgtaagtgggactttacaaatcctcatcataatttcacaattataaagccacagtgataggattgagcaaacggctcgcatgataatagtaagaaggaggagaaatgtactaagccagtgaagacaacttaaacagaggtgtgaaaacaaacccatatcacatgaatgtaatccaacacttatcgacttgcacagaataaaaagtgacggcaaaccatacattttgagatgtaatccaacttcagaaataccagcgagagagatacaacaaagcaactcctcttcaatacaagaaacaaaatagacacatttctaaccttacattaggtctccttggaggaggattagaagaaacttggagtccagaggtcgcatccacattttcttcatcactttgcaaagaattggttagggctagtgagttctcttcctgtttaggaagggagaacgtccttttaacagctaacctagacttttcgcgcgatccccagccatttgccatgacactcatgtttctccatttgtcctgtcccaatacaataaacaaaccatctcccagtcagataaaatcacaaacaaaatacagtagcattatcaaagctgacaaaaaggataagaagtaatcatgaccttaagatcaacattggaacgcaggtacaagactccgctaaattcaggatctttgagaattgtgcgccatttaccaggtccatgctttataactccagactttaaagctgactcttcttcttgagtccatttctgcttaggagcacccatcccgatttacggtctgctgtgtcaaagcaagtccgttctgcaacaatacatatcaaatgtcacgaaaccaatcagaactaaagtttctacataaaaatgtaaactttttcttcagttgtagctcacaattcatcatcaaataccacagaatagtaaaaccctaattccctgttccgaggaaaccctaacatagattatcaaactataccgcagcaatagttcagaaactaagacgcaatagcaaacaccaacttcacatcactgaaagatgccgaaactcaaaccctagaaaaatccgttctttcagaatgaagcctaatctcatgctgagaatatacacaatcgagaaagaagaaacagatgaattcaccaggaatcagagtttagaggaagaagaatcgatcattcgcaataccaatttttgtttaatctctggattcagatttcgagacgcttgggaagcagaaaaagttagggttaatgcgaatacaaggattcagagtaacggacctccgtcaattctgatgcggcaaaccgcttagaccaattaagctttaaacgcgttttttcacaaacggccttaaaacgcgttttttacaaacggccttaaaacgcgtttttgtttacgctagttattatattctgaagattataaattgtctaaatatttacaaattcaacttttaataatgataaagaaaatatcaaattccccaaatgaagtgttaatatgattgtcaagaaaatatattatcaaaactaatacgcagtgacccagatcatatttacacgaacaatttggtttatgtttgaaagttttggtggtgattaaaaatttgatgattaagtggtattttgaacataaaatacaaatatgttgctagatataattcagaaatgtgtggtggggtggtagttgtgatattttttttcaaaaatgctattttcattttatccatagaattttctctattgtttattttttctgaaaattatctagttgactgtaccactaattaaaaaaaaattgtggacatggtagttgcgatattttgagagttttccaaatctatacacttgttttaaacacattaaaaagttttataatttatttatttttgaatttctccaaaatttgaaatataaagatcatttcgtaaaaaaaagaaaagttcgttgaacatagttttagttgatttgttttactaggtttattttctgcagatgttcagtaaaaagaaagaaccttctctaatttcacctagatatttatgattttataatacaaactaatttcatatttgggtttaaattaataattgtccaaataatttcaaattacagtcaaaataaaacattagcaattagttccatccaaaataaattattaaattaccaaattaacatttttagctcatgagcccaaaattatttatgatatgaaatatgtacttgataataattcaagtcagcaacaataattcatcaaatttatttcaaaataaacctccttaaatctttctggattttttaactgataatcctattgttttatcttattttcattaagccaacaataagtcataccaattagtcattagttataattcttgatattggttaaagagaatgtttaagtggtggatggagttagttgtatacttttttggcattaagatgagaataatttgctacttataaagactttgtaatattaaacatcatattcttcacatgaatatacaagtggacaattctggttaagtcacaccagtggtttaatccggttcatttttctacgtatagcattagtgttaattacgtgcacgagaacacaagacagaaagtaaaaaaagcaagaaagagtcaacaaagttgcccgcctaacgattacttagcacttttgaatccgttttaagcaaagccttagtttgaatttacagctctcatcacaaagagagtagcccttctcgaagcgagtgagatatg

SEQ ID NO: 10796 - DNA, 3000 bp, Unknown
  misc_feature (1)..( 3000): cDNA_ID_3038020_gDNA_ID_2214449_Annot_ID_182404 3000 nt of promoter + ATG
ttatatgtctacttgtttatatgtttacttgttgttaatattataaactcctggaattttaaaattactatgacaaatagttacaatttaaatacataactaaaaataacttcaaatacaacttttaggttttacaacaattatcaaaagaacattttttggttcataactctctctttagctttagatatttaggataacgacgtctttttacgtatgaaataaattgttgtatggagaataacttcgacgactttcttattttggtacccgtaaatttactattgtttttcgtttatcttcactgcattggttagtctatatagaagtatattcataagcttatctacattttcttttttaatttagaacgagtaacgcatgcatacgtgttttggggaaaagtcgttttggtcttttgatttgaccatttactgtgtatttttgcggtaaattaatattatttaattactttgactaacattaattactaaaatgtgttctattgatcacaagaacaacgagatgtagtattttccagtggtgaagacgccggagataatgtttatccggtgaaaatgaaggtgtttattaacgaggtgcctgtcaaaattgtgaccgtatatttatttttctgaatttgaacttttagtatatatccttatttttaaaagaaatttgagtttgtttacgtttttttaatctaggatctaatttaatttcttgttgataaaaaaaactgaattcatttaaattatattaagggaccaattggttacaattatggttttggttgtagatattctagatgtagaaatattgactgtaaaagttatgaaagttaatttagatatttataagagttttattcgcgatatagttgtatctattatactattaaaaatctagacttctttattggtgaataatatgcattatgtgatatttaaaatcaagttatggtataatgacagatatcgaacaaattactaaactacacgttttgtaaaaattaaatttttaataaactttaaatagtgcaaaaaatatatactaattattttataaataaatattcaaattacttgtttagattttgagttggcaacaattactattatctgatttttatgtcataactcaaaagtaacaatgattattttcattaaaatgctatagatttctctctttattttggaacattaaactcattaataaaaacgggaaattctgtcaaatggccaatacataatatgtcatgtaataacaattggatgacttgtgtttaatttgaaagtaggtaaaacaactttggtaaaacgatatactgtatggattaaaatagagaatttaactattcgtttctataatacaatataaatcttgtaatacgatatgagtgtgttcttgttaggtttagactcactaaatcaagctcaaggtagattgctggccttaactggagaagcaagaaaccgcataagaaggcttacttgagacacacgaaaccatctaatgcttttgtgtgtttgatcttgtgacggaaacaggcggagtttcttgagaagatacctagtagaagcacattcgcacacaagtgaaaggcattgtattctcatctgtccacatggaaaccataaggatactacaaaatcaagaactttagcgaccagaaacgccgtggacaagcttatctacgagtggagaggttttaagcacaccattgactggaaacaaacggtaggctctttagaaatatttatctcccatgagacactatgagcttcaattcacttccccactccactctcctgactatgttattgcatccacaagattgagcttggattctggtactccgttttcgaaaataaagtttgttgagaaaagcaaaaccgattcaacaaaaacatatacagagcaagatatataaattactgagcagccctttttaaaaaaaagtttcatagacaaacaaaaacttatcatcattatcaatttatcatcatcatcatcatcaattcatcataatcatttgttggctttgagccattccagaatccgtttttcagattcactgagctctgcttctgtctttccctttatagatccttcaacaaactcaaagtagtctttataattcctcttgtaaaaactgtccaatctctgtttcattttcccaatatgaacgaaaaaaagatcataagaaaatttcctacaaaagacataaactatgtgcgttatggtatataaatgtcattctctttacctccttatcattcttggctttgttttcctcagtcttcttcaaatactctgaaacaattcttccccaaagaacgacatagtttaggcaaaagaaacattctaaatgtaaagaagaaaaacacaactaagaatttctaattactttggagaagctggtcgctgctggtcaaagcagcggcgatgaaagacgtggaggagaagagaatgtttctgcgtcctaaatcagcgggtggagcagttaaagaatggcgtttggtatcgtttctgcgtacagcttgaacattggaagaagcatatttgttaacagttactgttaaagccatgagaatgctttggcttatggagctcatctctctcttgaccagaagataagattcttgttttatgtctcttatctacattacagagaagaaacaaacatctttttatttattaacaaagagtccctaactatgtaatttacaagaacaaaccctcaaatctattaaaaatagattccaaacccagatagaaatttgtagagacaaaaccggtttaatagacaaatattctcaaagcgattctggttcggtcgggattttgactgtactcagtacttacatcttcttcatctgacgatagcaaaaatgacaagcaatccctaatttcgcctcaaaaaatcccaaaaagcttcgttcttttttagtcatcatcatcttcttcttttcttcttcttcggttgctaaatcgaag

SEQ ID NO: 10797 - DNA, 3000 bp, Unknown
  misc_feature (1)..( 3000): cDNA_ID_3038027_gDNA_ID_2214449_Annot_ID_182402 3000 nt of promoter + ATG
ccagcagcgaccagcttctccaaagtaattagaaattcttagttgtgtttttcttctttacatttagaatgtttcttttgcctaaactatgtcgttctttggggaagaattgtttcagagtatttgaagaagactgaggaaaacaaagccaagaatgataaggaggtaaagagaatgacatttatataccataacgcacatagtttatgtcttttgtaggaaattttcttatgatctttttttcgttcatattgggaaaatgaaacagagattggacagtttttacaagaggaattataaagactactttgagtttgttgaaggatctataaagggaaagacagaagcagagctcagtgaatctgaaaaacggattctggaatggctcaaagccaacaaatgattatgatgaattgatgatgatgatgatgataaattgataatgatgataagtttttgtttgtctatgaaacttttttttaaaaagggctgctcagtaatttatatatcttgctctgtatatgtttttgttgaatcggttttgcttttctcaacaaactttattttcgaaaacggagtaccagaatccaagctcaatcttgtggatgcaataacatagtcaggagagtggagtggggaagtgaattgaagctcatagtgtctcatgggagataaatatttctaaagagcctaccgtttgtttccagtcaatggtgtgcttaaaacctctccactcgtagataagcttgtccacggcgtttctggtcgctaaagttcttgattttgtagtatccttatggtttccatgtggacagatgagaatacaatgcctttcacttgtgtgcgaatgtgcttctactaggtatcttctcaagaaactccgcctgtttccgtcacaagatcaaacacacaaaagcattagatggtttcgtgtgtctcaagtaagccttcttatgcggtttcttgcttctccagttaaggccagcaatctaccttgagcttgatttagtgagtctaaacctaacaagaacacactcatatcgtattacaagatttatattgtattatagaaacgaatagttaaattctctattttaatccatacagtatatcgttttaccaaagttgttttacctactttcaaattaaacacaagtcatccaattgttattacatgacatattatgtattggccatttgacagaatttcccgtttttattaatgagtttaatgttccaaaataaagagagaaatctatagcattttaatgaaaataatcattgttacttttgagttatgacataaaaatcagataatagtaattgttgccaactcaaaatctaaacaagtaatttgaatatttatttataaaataattagtatatattttttgcactatttaaagtttattaaaaatttaatttttacaaaacgtgtagtttagtaatttgttcgatatctgtcattataccataacttgattttaaatatcacataatgcatattattcaccaataaagaagtctagatttttaatagtataatagatacaactatatcgcgaataaaactcttataaatatctaaattaactttcataacttttacagtcaatatttctacatctagaatatctacaaccaaaaccataattgtaaccaattggtcccttaatataatttaaatgaattcagttttttttatcaacaagaaattaaattagatcctagattaaaaaaacgtaaacaaactcaaatttcttttaaaaataaggatatatactaaaagttcaaattcagaaaaataaatatacggtcacaattttgacaggcacctcgttaataaacaccttcattttcaccggataaacattatctccggcgtcttcaccactggaaaatactacatctcgttgttcttgtgatcaatagaacacattttagtaattaatgttagtcaaagtaattaaataatattaatttaccgcaaaaatacacagtaaatggtcaaatcaaaagaccaaaacgacttttccccaaaacacgtatgcatgcgttactcgttctaaattaaaaaagaaaatgtagataagcttatgaatatacttctatatagactaaccaatgcagtgaagataaacgaaaaacaatagtaaatttacgggtaccaaaataagaaagtcgtcgaagttattctccatacaacaatttatttcatacgtaaaaagacgtcgttatcctaaatatctaaagctaaagagagagttatgaaccaaaaaatgttcttttgataattgttgtaaaacctaaaagttgtatttgaagttatttttagttatgtatttaaattgtaactatttgtcatagtaattttaaaattccaggagtttataatattaacaacaagtaaacatataaacaagtagacatataaaaacatatatttcaaaattttcaataaaagcttttagtcacacaaaaaattattaaaattttaaaaatagactcacgcgtagtttgggttcataacctagtttcttttaaaaataaggatatatactaaaaattcaaaaaaaaaaaaaatatactaagccatccattatatattagattttacagaaaagaaataaatatatattagattttactttttatttgggtatcatttttggataaaacgaaaatataaaataaaagacctaaaaattcaaattgaaatccagattaaagacctcttaagaaagacaacaacagattgcataattgcgaatagggttcctttatcgaaattttgaaatttaaggatattataaaaaagttgaaatggaatgaggcgttaaatcgcaatatataaataaataaatataaatttcggttcggttcaggtatgaatcgggcgggcttttccgatacgccttgcaaataaaattgcggcgaccaaactgttcctcttcttctccagcaagcttcgaagagaaggaagaagattggagaagaatg

SEQ ID NO: 10798 - DNA, 3000 bp, Unknown
  misc_feature (1)..( 3000): cDNA_ID_3038031_gDNA_ID_2214449_Annot_ID_182401 3000 nt of promoter + ATG
gatgaaaatattatcagaaacaaacgaactagaacaaatggctaccgccacaagcaagagatagaaatatggtttttgaaaacacaagtacgactcgtaagagtttcgagcctattcacacaaacacgagataatagaaatcccacataaaaccgacaaccttcttagtactcctctccttcatcatcctcatcgtcaccaccttcagcaccaacctcttcgtaatccttctccaatgctgcaagatcctcacgagcctctgaaaattctccttcttccataccctcacccacataccagtgaacgaaagcacgttttgcgtacataagatcaaacttgtgatcaatacgggagaacacctcagcaacactggtggagtttgagatcatacacacagctctctggactttagcaagatcacctcctggaacaacagttggtggctggtagttgattccacacttgaatccagtaggacaccagtccacaaactgaatagtacgcttggtcttgatggtgccaacagctgcgttcacatccttggggacgacatcaccacggtacatcaaacagcaagccatgtactttccgtgacgagggtcacactttgccatcatggatgctggctcaaaagcactgtttgtgatctcagcaaccgagagctgctcatggaaggccttctctgcggagatgactggggcataggaggaaagcatgaagtggattcttgggtatgggaccaagttggtttggaactcagtcacatcaacattcaaggcaccatcgaacctcagagaagcagtcaaggatgagataacctgaaaccatcaagagagagttaaacataagaaacgaaacagcaaaaagactgactgatgtaaatgattgaagctggctctatacctgagagacgagacggttgaggttggtgtaggtgggtctctcaatgcttagggaacgtctgcagatgtcatagatagcttcattgtcgaggaggatagagacatcagtgtgttccaagagtgagtgagtggagaggacactgttgtaaggctcaacaacagaggtggagacctgtggagatgggtaaactgtgaaacccaacttggactttttcccgtagtcaacagaaagtctctcaaggaggagagatccaagaccagatccagtccctccaccaacagcgttgaagacgaggaatccttggagaccagtacagttatcagcgagctttctgatacggtccaagcacagatcaacaatctctttcccaactgaaataagatttcaaaagtaaatcagtgaatgaacagtaaattcaacaagatatggttgatgatgaagaaacaagggaaggagtaacttactggtgtaatgcccacgggcgaaattgttagctgcgtcttctttaccgctgatgagttgctcagggtggaaaagctgacggtaagtaccagtcctgacctcatcgatcacagttggctcaagatcaacaaagacagcacgtgggacgtgcttccctgcaccggtctcactgaagaaggtgttgaaagcatcgtcacctccgccaacagtcttgtcactcggcatctggccatcaggctgtaacattccacatccaagacaacacatcaatacaaagagacatataaaacgaaaagatctacacatatagaagcaacgatgaaaagagaaaatcacaacgagatgcttcaactatatcgcaaatatcaatcgccatctctttaagcaaataaagcaaagttttccttcacccaatattataaaacaaatacggatatggcatcagcaaaagcaatctgacatgaaatccaattcaaacacagatctatccaggttcatcgaataatttagaaatgagaaacggatttcgcatcaaccacagaaatttcataagacgtcgaaatcaaacacagatctaaacgattacgtaaaatagatctacgaggtcaatgctgcgcaaaaatatctcagatttgatcttttaaaatacgaaaaatatgaagaaaaacacagatcaagatagaagaggaagagacgaacctgaatgccatgttcaagacagtaaagctcccagcaagcatttccgacctggataccggcctgaccaatgtggatcgaaatgcactctctcattttcgtttcgcggaagaaagaaaagatctagaaactagatttgcagggaagaagacgaagaagaagaagggcgtttatgaagacgctcttcttttagatctagatctgattttttcgatttctaggtttttacagagctgtttgatgctatatttataagcgaaagtatccatctgtatgtaacggcacgtatgatacacgtgtagtgatgtaattgggttgtcgttaaaaccacgatttgttgatatcctcgtgagttgcgtattttctaattttgaattttgattccttagattctgtttggcaatcgctttctgaccgtttctctttatttttgaaatagcaaaattccttgaattgcgtggaaatgaaccggaatttaattagaattgaaccggatcagaccaatatttaaagtaaaccgaaacgataagaaactagtattaaccaaaatcttcgaaatggtaaccaaaaattcaaagctttgagtaaatgatgagagcgctagcggcggcttcacggccactgttttccgatttgccgagtctcgttcgttcatggcttccgacttctagcttcaaatcgtttgctactgtatcttcgtctcctccgtcggatttgaatctccggaatcaatctcgcggtggccttcctcgattcttttccgatgatcttccatctcgcaaggcacacaccctatctatctctatctttatctcatataatttttgttccctttaaatctgtgtaagaatccaatcgaaatgagagtgagggtaatcactgagaagtttagaaattactgtaattcactgtaatctctaagaaatttctggtaaaatc

SEQ ID NO: 10799 - DNA, 3000 bp, Unknown
  misc_feature (1)..( 3000): cDNA_ID_2714279_gDNA_ID_2214450_Annot_ID_132908 3000 nt of promoter + ATG
gcttcttcccgatagcgtttgtagttgcagacggtagtggttggcaaaaaacatttttttatccaaatcttttatttactactaaaatatacataaacaacaaatatattaaaaaatagtatcaaaccctctatatattaacattaattctcaaaatcctaatatttttctccatcaaaatcatatagtcaattcatcaacaatggcaagatacaaactaagtattgtaataatactattgatccaaaagttttgaagtaattcgaaacataatttatttattttgtaattttgtcatattacttgatgttggtttttatgaaccaaaatgcatgaagtaataagcatttaactgataaatttattcgttttgaataattgtgtacagttttatatggtttttattataaattatatttatattattttttattttatcataataatataaacttttcaatcaaatatgaaatatgtatatatatatatatatatatatatatatatattcttttctataaatatgtttacaagtaaaagattcatatttttttctaaaaaataaaaagatataaaatcaaatatatatatatatatatatatatatatatatcttactataaaacgtcgaattatatatatatatatatatatatatatatatacgttctataatatatttacaagtaagagtatcatatacttttctattcataaaagatttataaaatcaaacagatctcctttctataaatccgtatgtgcaatgcatgacacctctataaatcttctttctgtagtctcttaatttttcacgttaatcaatattcactattcagtatacgagtaactaaatttaagagaaaagaaaaaaagaaacaaaaatggccaaggcaacttcttcacttgtcgtccccatcatctttcttgtgatatttgctttaggtatgcatttatctttaatttaatcatagagtaatgagttggcatatgtatccaatattgtagacttgtcattcacgtaactctactgtcatttttagtttcggctagattcattggcaatatatcatattgtatatatctttgttcagtgtattgataactcctaaatcttaatatagcttttgttatctgagtataaacgaaattaattaattttgtttgatatagttgagcagaatacgggatgttttgattatgatgtttaccaaccgtgcgatcattgtcgagaaagatgcctcaaatattatccagttacaagaaaggccatttgtcggaaaaatcattgtgtttgcattggcccttgtccggatgataaagcgattccagatgttaaactcttcaaaaatgtaaaagaacaaatcctaagttgaatgtcaaaatcataatatatctaaaaaactattttcagttgaagctttgattataataaaatttatagaacacaaaatttccagacatatgtttgttattgatgtggtgagcccacaaattttctcacaatttttatttatttaattctactactatcggtattcttaatattctaaaacaataaccaaacagagtattaaatctacttatcataaatatatatttcaaatttttaaatattgtcttatatataaagaagttttctgtaataaatgcattgaattcatgtattggaatattgttctgtcatcaactagattaaaaagctaaaacttataaaatatatgacttacacaacttatttaatttttcttctattgttctaaaaagcggtttagacgctaggtgctcaagctaaacataataaaatatatattagtatattatcccaatttttaaatatgttttattttcatagacatagttataaacatttatttatattttaatataaattattctttagttttggtttacaattttatattgtaattttctaatagatattttatgtaatttttatgtataatatcatacttttagtgttttataattataaataattgaatcacttaaaccgcttatatcacttaaacatcggttaaacgttctcgacgctaggcattggatcaccgcatatataacgccttgcgctttcttttttgaacattgcctataactaaaagatttacattgtgtcgttgttcaacataaattttttcttcatatgagtttttttataccttctatctaacttttttcatttgactcattcaacaaaaagagtgacaacgaattaccaattccatatctaattccatttggatacactttcaataccctacacaagtaatacacacccttcacattaaacccaaagtgagccctcttggtgaagtagagggtctaacattaaacccattttttcaaaactcgaaaataagaatttattttgaaaagacacttttaaaactcacataattaagggtataatagtttcaattaatataaatcatagttggacaattctaataaacaaagatatatatggacaaatcacaaaaaaaaataaaaaaaattcaatgttccccaaaaatacccacaaaaaaggaatatacagaccaaatataaaaaagagggaaaatacagaccaaatataaaaaagaggaaaactacagaccatatacaaaaccaaatacaaaaaaaaaggataaatacagaccaactgccataaaagaagaagagaaaagaagaccaaatacatatccattgcttgactagaggagagagattagctttctcatttacattcatactttaaattcgtgctaattactatataaattcgttgaattgcatttttctccataactagaatacagtgataacatttatgaacaatcaatccagtgaatatgatgaatatttgatatctttgaaagttatcttgtaattataaacctgtataaatacctactctttccctaagatcagatatatcttgtatcaactttcatcttctgatattcaccaaaacttctatccaaaaccaagttcaaaaat

SEQ ID NO: 10800 - DNA, 3000 bp, Unknown
  misc_feature (1)..( 3000): cDNA_ID_4266342_gDNA_ID_2214450_Annot_ID_132909 3000 nt of promoter + ATG
tttatgttggtaatgcacaacaatcatatggcaattcaacggtttcggcacttttcgcttttggagactcaatacttgacacaggcaacaataatcttcttttaagtgtttctaaagtcaatttttatccatacggtagagactttataggtggaagagctactgggagatttggaaatgggagagttttttctgatataattggtatgtatatatatattgatctctacttgttgatatacttgtaacggatgaattcaatgtttgtaatactatgacacaaatattatctaatagcaagtctttgttttcagctgagggtttgggattgaagaatctcttaccagcatatcgtgatccatacctctggaacaatgatctaacgactggtgtttgtttcgcatctggtggatctggacttgatccaatcactgcaagaacaacagtaaatttttcttagtttgtccaaaagattataacaacttttattttatctatagcaaattttaatagattatattttggtgtgattagggaagtatatgggtgtcagaccaggtcacagacttccaaaactacatcaccagactaaatggtgtagtaggaaatcaagaacaagcaaatgcagttatatcaaatgctgtttacctaatctccgcaggaaataatgatattgctatcacttattttactacgggggctagaagattacaatacactcttccagcctacaatgatcaattggtctcttggactcgtgatctcataaaggtacaaagttagattgttttacatatatataggacatagtaagagattaaaattttggtcaaattgtatgtgacatattctattgttccccctttttttttgttatttgaagagtttatatgatatgggtgcaagaaaatttgccgttatgggaacattaccgctaggttgtttaccaggagcaagagccttaacgagagcatgtgaattatttgtaaatcaaggagctgctatgttcaaccaacaattatctgccgacattgacaatcttggtgcaacatttccgggtgccaaattcgtgtacgtagatatgtacaatcctcttttgggtctcatcattaaccctcaagcttcaggtaataacatgattcataattcaagaagaatactcatgtgtatatatatacgttacatttacaattatattttccaaaaatgtagggttcattgatgtagctgatgcgtgttgttgtacgccaacgcacttaataccgtgcttggatgcgtctcgttacgtgttttgggatgtagcccatccgacccagaagtcatacgaaaccatcgctccacagattattgaaaatatcaaagcaaagctcgcatgatcaagttatcaagctcttttgttttgataataagttatcaagcttttttttttctttttttctttcggcaagctttttagattgttatgattaatatcgatcggtaggttttaatatcgatcggttacctcaaccacaacgtcgctctttggtcaaaaaccaaatatttgttactcttaataaatatttgttttagatcttcgtgttgacttgatccctctcatcttttatgatccaaattaattaaactttgtcgtcactttatttccgatattgaatccaaaatatttagttaaaggccataggctttttgagttttctagtagcgcttactagccaatatcccgaagatacatgaactatatacatcaacgttggattttttcaatgaacatcaccaatttcatgtcaaaaaaaaaaaaaaacaaagaacatcagtatcaacaaattaaaaatctaatctcctgttttagtttttttttttttttaaatcacgtgcatagctttgttttgacattagaacatgacttttccaaaatatttcagatttatgaatgctactgtactatttcttttcgattcggtccatattccttactttattcagagagccttcaaacaccgttttcgtggagcatctttttatgtcgattgtgataatattgaagtttttgaatttatttttcttacagtttttgtctttttttgtaaaacgaaaactctagatttaaatctcacactgcttcatatagctagattcctttgcctgccactaaatccaaaacctcacgtgaattttagttttgaactagtccccatttcgagaattttagtgtaggaatagcaatataatttaaacgatcttgttaattataaaatacctatcagttcataaaattaaatttaatttgatatagtttggaaattagtgaactctacaaaagtgttttaacttttaacgattagaacttttattgcttagacaccagtacgtcttgtgattaaaccaatgtggagaagaaaatgtaaatggtatcatgtatgactagcaaattattgacttaagagtcatataaaacaaaagttcgaattaagttctttagtcttctgacagcatcgagaggtgagataagtttcctcattactacattccccaaaacacatattcgttaagacgttaacgttcgttgtctacaacaacaatgtaaaataactttaaaaaaaaaaaagtaagtaactaaatgtacaaatcttctttaggactgatggatttagattgatatatgatagttactagttacgttgttaaaaaaaatggtattaaatcactaacaacgaataattcattttatagctactagtcaatacgataattttagttttcagctaacaatattaatagttgataattctctactttcaacttatttcttgtacaaaccgtattatgtaatgtaggtaagcttattctcatgattagctcatttgatctaattttaatatttatataaaaaacttataaaccctaataaaaaaatatctgaccaaaaaaaaaaaaaaaccctaataaaaaacaaacagtacactgttttttctctctataaagagaaaatctccaaaagca

SEQ ID NO: 10801 - DNA, 3000 bp, Unknown
  misc_feature (1)..( 3000): cDNA_ID_2714272_gDNA_ID_2214450_Annot_ID_132912 3000 nt of promoter + ATG
tattttccgaagtctatccccagcaattggaggcaactgttgaaagcaaaaactcgactgaagccaagaaagagagaggaaaagatttagagacaactcaggaaggaagacaccaaaacggttttggtccagtgaggtttttgcctccattaccaagagtgcaatctaaaacaaatgcacatgatcaacgtgataatggcaaagttgtaagtcagtctgattcttcacattctgaagcatcttcgacagaatatgccagaaccgtccctgctgctgtagctgcagctgctgttgttgcatcttccatggttgctgctgctgctgccaagtctgcaaactcagactcctcccccatagaacttcctgctgcagctgctgccacggccactgctgctgcagttgtggcaacagctgcagccgtgtccaggcaacttgaattaggctcgaatagcgacggggatgatggttctggtgggcatgagcctcaaggtagtggggactctaatcatgggccaaattcaggaggggaaagaatatctgacaaatctattggcaatgaaagttctaagtcagactgtgatgatgtatctgactgtgagattttgtgggaagaaattactgtgggagaacgtattggacttggtacctgacttatcatcatctgttatctgctttggtgtaactacatcttcaaataattaactactttacttcttttgatacaggatcttatggagaagtgtatcggggagattggcacgggactgtgagtattatatttgcttttccaatttatactgtgaatttgaactcgatgaaaaaagagtttagaaattccttagtttgagttccatatcgtcgaaactcttgaactttaggaagtggctgtcaagaagttccttgatcaagatttaacaggagaagcattggaggaattcagaagtgaggtacgagcctttcttctaatcttttcttttacctgattttccatgttgattagttctatatcaaacccttcttatatattcttgtgatacaaggtccgaatcatgaaaaagctaagacatcccaacattgttctcttcatgggagctgtgactcgcccaccgaatctttcaattgttacagagtttcttcctaggtaatactatgatctttgcaagattcagttactttgatatgattctcatggctacaacgatttccatctccttattcatgatgcgcatgcctctgtttttatctattttgtgacctctaaatgccaaaatcttctttgcatcaatgagtgttgttcaagtatttgctttaagttctaaaatctggatggtttgaacaggttcaatccggttgtgcttcgtttttggatctttacattataatatttttttccaaacttgtgcagaggtagcttgtataggttaatccaccggccaaataaccaattagacgagaggaggcgcctgagaatggcccttgatgctgtattagtcttttcttctcttactatatcacctgtttgtaacttcttgattctttcagtagagtgttgaggtaacatattacttgtattcaggctcgtggaatgaactatttgcacagctgtaatccgatgattgtccatcgcgatcttaagtccccaaaccttctagttgacaaaaactgggtcgtgaaggtcagattctctccataaaatttattgtttcttaccaagtggataatgttatatcgtatgtaacagctataagtttacataacaaatactggattttcatatatatcaggtgtgtgattttggattgtctaggatgaaacacagtacatacctctcttcaaagtcaacagcagggacggtaagaagcaagttatagtctcccctgtcttaatcatctctttttacagttattgtaattgccagttcgttaatctaattatgtgttggtcttataaaggctgaatggatggctccagaagtgctaagaaacgaacctgctgatgagaagtatgctcttagatcttttgctactagatattcattttgttcccttttgtcagaagcaggcctaatgtcaggaaaaaacaatacgtgaaacaggtgcgatgtttacagctacggtgtgatcttatgggaactctttacgttacaacaaccgtggggaaagatgaacccgatgcaagtagttggggcagttgggtttcagcatcgacgtcttgacattcccgactttgtagatccagcaattgcagatctcatcagtaaatgctggcagacgtgagtatagattatttttcaatgtttcagccacaatatgaagtagcagtgcttaaacaacatcatttcacttgaccatgtctcagttaacacatgtaatggctttgtgtgtgtttatcagggattcaaagttaaggccaagttttgcagagataatggcgtctctaaagcggctacagaaacctgtaacaggttccaacatcccaagaccagtccccagttcctcttcattaccaactgaacatgaacaaaaggattgataacagaagaagacgaccaaagtggcaaacacatttttgacgaattcaatctgtttgaaggaaaaaaaagctacaaatgttccttctctgctactttttgcctcagcttcagtgtttgacacagcttgtgaattgtgaaaaagaaagattcatggaagatgacgattgaagaaggtgaaggattgtgctcgtgtgttttgttgtctttgcttgcaagcgatgttcatgttcatgcgtaatttcctctattttgttttccaatattgaaactgtacaaagagagaaagaaaaaacaattgacaaactcgtcgaaacgttgaccgaaaacatatattaaaaaaaatcattgagctctgtctttattcatcacacgaacaagataaggctgatctttattattgggatatatgaatcaaaataatataatattttaaaaaactttgcttttacgaaaaatctttgacaatg

SEQ ID NO: 10802 - DNA, 3000 bp, Unknown
  misc_feature (1)..( 3000): cDNA_ID_2714268_gDNA_ID_2214450_Annot_ID_132913 3000 nt of promoter + ATG
agagattgggcacagtatatgtgaaaccaaggcaaaaataaatttgtggatgattaggatgtttcattctaaatatttttcagtggtatttactcagatcatatttaaccatgcgatttgaaagcgaaaaaaaaataatctagacaacacataatggatggtggttatgagtttcgacttataaagatgtgtagatagacaatgagaccatatattttttcacgtatcattttatgtataagtgggttcttaaagaaaaaaaattataagtggattcttaaaaaaggataaccacctcgacgcattcaacaaaataatgccatacttaattcctaaactagcgtgcatagatatagaaacttaaactaattaaaacacattagcaagatttttttcaatgatttaacgaaggaggagtatgagatagaggagaaaagtgataggtggggaagtggtcccagcaccaaaaaaaatgtgtggctgtcaccaattggaatgcaccaaattctttttacgacataaaaacaaaaactgaaagattgttttttttgttttgctttctgataggataactatgacgtggcatgcgtcactagacgcattatcattcgcgcgtccatttcacgtggtacagtcaaattagtcaaacctcccgggagaaacgaatgttcttttacggttttaacttttaacttttaatcttgctgctttggcctattaaactcttcttttctgagcaaaatcacacacgctatgttttatggttacgtaaacgcttttttttattggcttaaaccaaacataacgtgtagtaaatagaaactctccattcacttcttctttttttgtttgtttaaatgttactaagatttataccaaatcaaaaatattttcttatgttttcggacaaaactcaagccccatttacttttttttttttttttgtatgttttaatgttactataagatttattccaaatcaaaaatcttttcttatgttttcggacaaatctcaagccgcccaaaattgaattgttagccaactacccttgagcacttaaaacctccaatcgttttccttttttcttgttttattttatggaatacagatcctttatactataaaatagatttttgagaagtgtcatagttggaaaagtagataacatatttaagtcgaatggggggggggatgaatatgaaaaccacggtaatagtatatttttgttttttaccgtatttatcattccagtatataaaaattaaaatgtaaagtttaatttttaaaaaaaattacgtataaattatttcaacaaataatcatcttctatggtggaaaacaatttccaagacacataaagagttaccttaattaatgatacattaaaaaaaaattacctgatggtttctgaacctcacaatcgtgtggacactatagagttgatcactggaaaaatcataaatattcgtgttggtcaactattggctcatagctcacaccatttaataagttcaaagaagatacaatgattacctattacataaatcatacatgcatacgtgtggttgtccatattttgacattaatcatatactataataaactcatatattttgtgcatatatgacatacatagctatctctattgtaagttgtaagtcgtaaccactatataaactaattaattacatatgtatatagtgatagatatgttgaatgatcgaagagataacggtgtctcttcacgaaaatagagtttcatcaaaagcaagataacggagtactaattatctaactcgttaattaattgagctctatcttagtaagattcaccggacactgcaatatacaattaaccacgtgcttttcaagtgaatattcagttaaattctcatttgtcttttctttagaattgacaccttaagctatttctagtcattctcaaaatataaaaagttaatggtccttaattgccgtgacaattgctattcttcttttattcccaaaagagatacaagtataaaagatcgaaacgctatactatttattaaaaaaaataaaaatacagttttaattatatgaccaaaaagacttttgatatatttgatcgaaaaatgaaaattgatttagaacttgattggttctcctactaccatatgcaaatgttgagtttgcggttgctagcgtttaaaatgaatcaaagaaattgctttaaaccactttggatagtttttttattgttctaatgcaaaattttaaagaaaacattcccgtaagtatttttatttatatattagtgaattaaggacaaaaaatgtatctcacagttttctcagaattttcttttttgacatagtaatgaataaattgatgtagattctatgctgtttatagaaacaaaaagtaaccgttttaaatgcctcaattgacgttaagtctgtcttggtgcaatttaattatgtttcgtcatcatcttttcaagttcacgcactaagcttagtgaaaaagatacgccttttttcttgttctgttttgttttgcatgtcacagtaagtaactctcctcctcaattatcaaaaatgcaaactttaattttcttctagagaagagccactctctccacttctttctttgtccaactttttagacagagaaagtggcgtcagagatagatagagagatacatattcaagttggttgaaggaggagaattagcggttcatatcagtacggagaaaattgtcagtcatatgctttttttctttaaattctgcatttgagtgggtgtgtgcttttaaccattttggtgatttatcaaaaaaaaaaaaaaaattctgtgtgttttgagctcaagctctctacaaattttgctgtctcaagtttttgccttttgaagtccaataaagttgaaatctttgttctttttgattggtcttcgtgaattccggtgaaagtttcaaacttttgatttaaattccggggaggaattagggtttatg

SEQ ID NO: 10803 - DNA, 3000 bp, Unknown
  misc_feature (1)..( 3000): cDNA_ID_2714264_gDNA_ID_2214450_Annot_ID_132914 3000 nt of promoter + ATG
tcactaagcttagtgcgtgaacttgaaaagatgatgacgaaacataattaaattgcaccaagacagacttaacgtcaattgaggcatttaaaacggttactttttgtttctataaacagcatagaatctacatcaatttattcattactatgtcaaaaaagaaaattctgagaaaactgtgagatacattttttgtccttaattcactaatatataaataaaaatacttacgggaatgttttctttaaaattttgcattagaacaataaaaaaactatccaaagtggtttaaagcaatttctttgattcattttaaacgctagcaaccgcaaactcaacatttgcatatggtagtaggagaaccaatcaagttctaaatcaattttcatttttcgatcaaatatatcaaaagtctttttggtcatataattaaaactgtatttttattttttttaataaatagtatagcgtttcgatcttttatacttgtatctcttttgggaataaaagaagaatagcaattgtcacggcaattaaggaccattaactttttatattttgagaatgactagaaatagcttaaggtgtcaattctaaagaaaagacaaatgagaatttaactgaatattcacttgaaaagcacgtggttaattgtatattgcagtgtccggtgaatcttactaagatagagctcaattaattaacgagttagataattagtactccgttatcttgcttttgatgaaactctattttcgtgaagagacaccgttatctcttcgatcattcaacatatctatcactatatacatatgtaattaattagtttatatagtggttacgacttacaacttacaatagagatagctatgtatgtcatatatgcacaaaatatatgagtttattatagtatatgattaatgtcaaaatatggacaaccacacgtatgcatgtatgatttatgtaataggtaatcattgtatcttctttgaacttattaaatggtgtgagctatgagccaatagttgaccaacacgaatatttatgatttttccagtgatcaactctatagtgtccacacgattgtgaggttcagaaaccatcaggtaatttttttttaatgtatcattaattaaggtaactctttatgtgtcttggaaattgttttccaccatagaagatgattatttgttgaaataatttatacgtaattttttttaaaaattaaactttacattttaatttttatatactggaatgataaatacggtaaaaaacaaaaatatactattaccgtggttttcatattcatccccccccccattcgacttaaatatgttatctacttttccaactatgacacttctcaaaaatctattttatagtataaaggatctgtattccataaaataaaacaagaaaaaaggaaaacgattggaggttttaagtgctcaagggtagttggctaacaattcaattttgggcggcttgagatttgtccgaaaacataagaaaagatttttgatttggaataaatcttatagtaacattaaaacatacaaaaaaaaaaaaaaaagtaaatggggcttgagttttgtccgaaaacataagaaaatatttttgatttggtataaatcttagtaacatttaaacaaacaaaaaaagaagaagtgaatggagagtttctatttactacacgttatgtttggtttaagccaataaaaaaaagcgtttacgtaaccataaaacatagcgtgtgtgattttgctcagaaaagaagagtttaataggccaaagcagcaagattaaaagttaaaagttaaaaccgtaaaagaacattcgtttctcccgggaggtttgactaatttgactgtaccacgtgaaatggacgcgcgaatgataatgcgtctagtgacgcatgccacgtcatagttatcctatcagaaagcaaaacaaaaaaaacaatctttcagtttttgtttttatgtcgtaaaaagaatttggtgcattccaattggtgacagccacacattttttttggtgctgggaccacttccccacctatcacttttctcctctatctcatactcctccttcgttaaatcattgaaaaaaatcttgctaatgtgttttaattagtttaagtttctatatctatgcacgctagtttaggaattaagtatggcattattttgttgaatgcgtcgaggtggttatccttttttaagaatccacttataattttttttctttaagaacccacttatacataaaatgatacgtgaaaaaatatatggtctcattgtctatctacacatctttataagtcgaaactcataaccaccatccattatgtgttgtctagattatttttttttcgctttcaaatcgcatggttaaatatgatctgagtaaataccactgaaaaatatttagaatgaaacatcctaatcatccacaaatttatttttgccttggtttcacatatactgtgcccaatctctaatacataatattttgatctgtttaaaatattttcttattgtccggatctaaaagggtatccctagtgttgatataggccaaggcccatttatattctatagcacgtgaacgcccaaagttagtggttcacaaatcacaaatcaaaccgcaaatcatgtaaaccacacatcaaaccgatttggtcaacaatatcctttctcttcccaataatttttgactcatcagagaataatttggtcttcgtctctgcgcgcgtctctgtctgtctctttcagattcaactggagcaagtacgaaacataaatatcaataaattaaaggaaaaaaaataacagtagagaagaagaacatgttttcaactcctcgggagcaaaaaaaataattcagcaagagaaacggcgaataaggtggaaatgatttgacgaagaaacgcttggctgagagtaaaatcggaaaaacaaaatctgtaatttattattatcagcctctaaatca

SEQ ID NO: 10804 - DNA, 3000 bp, Unknown
  misc_feature (1)..( 3000): cDNA_ID_2714260_gDNA_ID_2214450_Annot_ID_132915 3000 nt of promoter + ATG
tcttccacaaaaaacttattgcaagactaaacaaacagacaagtcttagaattaaggaaatgaattaagttttcggatctaacaaactttataaaaatcaattcagccaaaatttctgagaaatttagagtgccatgtatttaatcttctttatactttcttttatattataaccgaaattcaccacaagaatggataactgccaaattagctagagcttatctacacatttattagttcactctcactctttgatgtttctttcatctaaagtcaaccccttcgacacaccactatcacacatccatacacttgtcgtgtcttagtaatcatttcaactatgttttgagatccgagtccaaattatcattaaaaaggttctttctacatgccggtttacatttttgtttggtttaatgtgccggtttagtttagtttcatgtagggcttataaaatcaccttttagttgggttcaatatatatttttggtttcgtgaaagtcaactggtaatgattgattatataaccaaaataggtctcaaattaaatctcgaagaacggttataagaaacaaaagggaatgacgtacctatacatacttaccggaaggttcgataacattttaaattcgttgcttctaatttttattactttgcataataactctgaaagcggttgatcgatggttaattgttcaagaagttcttgtatggacggtgatatacatatatatatagaaggatctagatcgaaccatacatatgtggcaagttactctctacctagctagacaactttttaagtggcaacaagagccacgtagtaataagttggtgtacttgtatcattgtaatatgttacgcttttaattcgtatcagtatatcttagtacactgatacttatacacagatcatacctgtattgttctttcgtcaaagttaaccaatataaaatatatatttcttgtccccattccttacaatttgatacgtatacgggaccaaaaaatacaagatatgacagaacaaacaatagatattttcagtcagaaaaacatatcaaattttttatatatatgtaactggagatcggattcataactgtatcttaattttcatatcttattattaggattcaaataaacgatttctttgatatttctgtggattgaacttatagccactaacaaaaattcaaccacacaactcactttttccgtctgtaacaactatttataaaatggttacgtataacaacaaaaatgcgttcaagtatttataacgatgcaggtggtcgttacccgaccgacttaaattcatttctcgaatttcgtggagcattgcatgcaaatatttctcatcaaaaagaaaaaaaagaaaagaaacagttgacatttattttattaaaattctattcctagagtataattttatcgtcaatgtctttcataaccagcttgaaatttttggcacgccttagacttttagataatgcttccttttataaataaaatctatcaataacataaatacctaataaatattagtaaccttgaatatatacattaatacatatggaaatgtcatcaataaaaatactataaaaatagattcttaaatttattttgtatctaaaataatataaatacattaaactaatatgtattgtttgatagtatcgtaaaataaatataaatgtagttgaggttaagtagaagataagtcaaactaggagagctttacataaatacaagaaattaaaggttcatcaacaagacaatgaaatctttagtattactattgaataaattatgagaaaaatgttaagaaatgtgattgaatgtacaacatttaaaatgtatacatgtatatatagttatacacacacacacacacacacacacacacacttatatccttaccatacactagatcacttaaatttgtttgatagaatacatttactagatctataacaactacattttaatttatatatatatatatatatatagagagagagagtaaaagtgatatttctattcactctttaagtgtttttattttattttaataattcatcaatccatttaaatcatttactaaaaatttatgcatgtactgataattgatttatcacttgattatattttccagcaacatgcaatatatctatctgaactcgggtgttgacccaacgaaaacactaacacgacctttgtactacatgtacttgtcaaaagatcaaacttcttagactgcattattatagttgttaactttatatatataactatataaggagaactctgttggcaaataaattaacatatttacattagatgttgaatcatagtcaattcatgcactattgatactagagtagatagtaatccaccaggccaattgggatttttagataataaaaatactatgaataaatgcatcaatccacctgtcaatgattctacactataaattacagtgtgaataatttgttagtcaatattattttctttacaaagtaatctaataatgcaagataagaaaggttgatcaaaacaaggaaataaatatccatatatagtgaattaattgaccatgattttactatttatttgcagatactattctctttttatacaaatcctccctaaaatgttgaatttaatctgaagaaatcttagtgaaatatattttgccacctagtcattaggaagtgatgctcacgacgatgaaacgaatagtcaatccgatggctaaataattaattatttagaatttactcgttgacttatttaataaaatgacatattcaagattaacttgacatacatacatatgtaaatgtgagtatgcgtgtgggtctatataaatacatgagagtaatcgtgtgaatacaaccattacaattgtgtgactatcatttaaagaataaagcaaacacatgatccaaagaagatagatagggagacaaaaaaaaatcaaggcaaaaaatg

SEQ ID NO: 10805 - DNA, 3000 bp, Unknown
  misc_feature (1)..( 3000): cDNA_ID_2714248_gDNA_ID_2214450_Annot_ID_132919 3000 nt of promoter + ATG
gttattatgcagatgtatgtcaatgaaggtttagtcgtacaggcaaaagctctgtttgagaggttccagttggattgtgtgctttcgtcaacgacacttgcagcagttattgatgtctatgctgaaaagggactgtgggttgaagcggagactgtgttctatgggaaaagaaacatgtcaggccagaggaatgatgttttggagtacaatgtcatgatcaaggcttatggtaaggccaaacttcatgagaaagcactttctctcttcaaagggatgaagaaccaagggacttggcctgatgagtgcacttacaattccctattccagatgcttgctggggttgatttagtggacgaagcccagcggatcttggctgaaatgctggattcgggctgtaaacctggatgcaagacctatgctgctatgatagctagctatgtgcggcttggcctgttgtctgatgcagttgacctgtacgaggcaatggaaaaaacaggggtgaaaccgaatgaagttgtttatggttccttaattaatgggtttgctgagagtggaatggtcgaagaagcgattcaatactttagaatgatggaagaacatggcgttcagtccaatcatatcgttctgacttcccttatcaaggcttatagcaaagtggggtgtcttgaagaagctaggagagtgtatgacaaaatgaaggattcagaaggtggcccagatgttgctgcatcaaacagcatgctaagtctgtgtgcagatcttggcatagtttctgaagcagaatccattttcaatgctctcagagaaaaaggcacatgtgatgttatttcgtttgcaacaatgatgtacttgtacaagggcatgggcatgctcgacgaggctattgaagtggctgaagaaatgagagagtctggtctactaagtgactgcacttcatttaatcaggttatggcttgctacgctgctgatgggcagttaagtgaatgctgtgaactgtttcatgagatgttagttgaaagaaagctcttgctggattggggaacatttaaaacgctcttcacgctcttgaagaaaggtggggtgccaagtgaagctgtgtcgcagctacaaaccgcatacaatgaagctaaaccactggcaacaccagcaatcactgcaactctgttctcagccatgggtttgtatgcatatgcgctggaatcatgccaagagctcacaagtggtgaaattcctcgcgagcattttgcatacaacgcagtgatatacacttatagtgcatcaggagacattgacatggccctaaaggcatacatgagaatgcaggaaaaaggtctagaaccagatattgtcacgcaagcctaccttgttgggatatacgggaaagcgggaatggtggaaggtgtgaagagggtacatagccggctgacgtttggggagcttgaaccaagccaatcgttgtttaaagcagttagagatgcttatgtgagtgcaaacagacaggacttggctgatgtggtgaagaaagagatgagcattgcttttgaagctgaaagggagtgtagttcaagatctggagaagaagaagaagacgatgaagaggaaaattctgaagaagacgaggcattttgaagtgtagccacagatgtatgtaagaaatattgtagaatataggatttagtggaaatggactgtacagtttcacagaagccaaaggaaatatgcatacttaagcctcagattgatctctggtaaagaaatgtgtatcttaaaactgttatagaaagaaaaaaaaaggttccacagggtcaaatctataaaagcgagcacctttggctatggttttggtagaggaattagcatacgctccttacaacaatagattgatttgcatcatcgggttggtcttctgttggttttggtctctggattgaacatctttctcctgtcttgcttgctcttattttcaattgtatagcatcaaagcccatgaaaagagccagatgttctggaattgattccaatttggaatcttgtcagttactggtgatgaatatcaacatggaagatatgaaacagagtagccagcaaattccttccattcggaacaaagagtctctcagcttcagtcaaagtatatcagttattgatctcaagaaagtaatagtagtgagcaatgaagatgatgatggagctctagagttgaagaacagaggagtggaacgaaccagtggagaactcttgaagaccacagtgtcaatgtgtttattgttgtctttgtctttctctaaaagttgtaaaaaaaaagggtgtgaagctaaagctaaatggtatgtaagcaatgttttgcaattttaaatttacaaaataacactcggagtttctgaaagtttaattttgacccataatatttgatatttgaggcattgtcctggaattaaaaccaaattgaaactccttcgcgtgtgttttctgctgcatttttacctcttagcgtctccggcgaaaacccactacgactgagtatggcgctcgaaatcgaagctcgagagtaagatttcgctttctcttacaaaccctagttttcgtttagtgtcactgatatgaattgtgctccaagaaccatcgtttacgaatgctcagatggatcttaggttacatgtttggagaaaacatcttgaatgttggtttttttatatcctccatactaaagttgtggtttttaaatctacccataatttgttttagcttggttcttctaaagctaattgcttctgaatatctagattcctccgtagctattcttcgtttaaattaacgtcgtatacgaaaatttgagggagatcatcgttagagtgttttgattctttgcaatgcgtctcgaggaaaaatccaatttgtataaatttgaactcttgttaattctcggcttggattgaaaccattgacagtattattagccattttgttagtaatattggatggagaacgttttgatgctat

SEQ ID NO: 10806 - DNA, 3000 bp, Unknown
  misc_feature (1)..( 3000): cDNA_ID_2714215_gDNA_ID_2214450_Annot_ID_182447 3000 nt of promoter + ATG
agaatcgagagaagaagagaaaggaggaggaaatgtttggaaatgatgaagcgtgttgctcagttctgctagttgtcttatgggatcatccattgtaaatgtctgaaaatcagaagagagattcgccatttctgagtttcaatttttattttttttttgaaaattggtgaaaatagaaagtggctgttttcgagcgagtggcaatgtttatatatagactagagttttcttattattatttttttgaaaaaaattggaataaaagtggggttaatcaaaaagatgagaaaataaaaaaggagggccaatgaaagtgagagttatgggatttttgtataggagtgggtcacacataatttatcaggagatatatccaaatagagaagtgggccaacgtttggtagccggaccagtgagcactgtttaagcaaacttctttcattatttctcaagggggaagtacttacttaagacctcctcaacaaagtattttatttcaattggtgctcccttttctgctttcttcttctagtctattgtgatttgtgaccaacgagcgagtaatccaatcctattatcgtacattgattgcatttgctatatggatttaagatttcattggttatacagttttagttattttaccgtttagtattaaacactttggtaagaagaataaaaagttgtatggattatattcaagaatagtttgattgatgatattcactggtttcaaatagtattaacatttttagttaaatagtacctatttatgttaaacaaaagaaatatttttgtatgatacttataatgtgatgtgatagtatacgagctaaattaatgttggctatttataattttttttttttttggaaaacaatatgtggattatgcagatttacatccgaattaagacgtatcgaccaccttgccacaaactagtagcagaatacatgtcatgatcgatttatctatatttatagtttattgaataaacataattaattaacttagctaggtctactttgaaatttaaaatgtggtctaagttgaaacttaaaatgtcgaaatcaatataagttcgttttaacttggtttggtgtctctagacttctgaaaacgtttttctttctggtatattttactatatagtacaattaggttcctatcaaattaagtaaattgacctatcactatataccattttcaactgatcaaatcacatgcagttacatatgcattcaagactcaatctaacttgttgttttgactttaggcattgttatttttaatacagtacttaactaattgacacaccggaagtgctgataacaagcataaatggtcaaatcttttgaataattgttcgacaatctttttaaaccccttgattttttaattctttttgataaaataaaaccccttgaatttccaaagctttttaggaacagacgacatatataagattttgaacgagtctttagtccctaatagtgttggacaaaaatagcagccaattcaaagtttttgatttacaactgaaacaaatagcaaaccccaacttgaagaaagaaatccaaaaacgacataactgaggaaaacagtaactgaatacaagatgtatgctacatatcaaactttacataacataccaggcccgaccatgagtgtattactgggtctaaaaaaacaaaacaaataacaaaaacataattgtaagaaagaaaaagtcaattgatggcaaaaaaaaaaaaaaaaaaaagaaagaaaaagtcaaaaaaaaaatttgtaaaatttgagaccataaaaactaaaagagtagtaactactaaacattcaaaagaattttactaaaaaatgttttgtcttcaattttaaatacattttgaggtttattagtttgatgggttttaggcatgtacctgacttgttacacacatgatacacccaatcgaaaaaaatcaacaaatagaacggaaccggaaaacgatatcacatagtataagactacatagcttagttttggttttaaagaaaactctgataaaaaaaaaccggtagttcgacttctttgcatgtgaaactaaacttccttagtaataatacttagcttgttcaacttttgttatggtcattaattaattatctctttacttagaaaacaaaaagtcctatagtctgtaattaggttggtgccaagctgttcctctttaggaagatggaacttgaagttgaaattatcgtacctataaaaattattactttgaaagacatattacctaggtttgcctaatacagctccactaaatcagactcgattacgcaaaataaacataaacttcgaaaatacaaattttcttctgttgctaattcatatcaaattatgtattaagatctcaaatataacgaacgatccataaacatataatttaaaaggtcctcttctttgtctctttatatatatatacacgtaaatatgggtgaccttacatgttttgatcttcatattcatctaccttcggcgaaggaagacatcgaaatggagttcctcgagtactcctcaacgatgctatcatcatgtccagccgctccacgtccactacttcttctactcttaaaactgtttggttcgcttccgtttaatccaaaagttcttgaaccggctcctgtaccggtcccggtacttgtatagccgcctcctctacgaccttggagtccaggccgacccggtttaggcaatcgtctctgttgtgatgttgattggtaggtagtcctctcttgtgatgttgattagtagcttaaatgtaaaaccaaacaattttcgtgggtcaataaaagcaaaaatgaaaaaaaatattcgatctcttagtccggcccatgatcagtttcaggcccaattcaatccgtcgcattattaaaaatctctgaaatcgacttttaacttgtgaaaccgtcacagtcgccgggaaaaaatcacagatttcttcgacgccgccgatg

SEQ ID NO: 10807 - DNA, 3000 bp, Unknown
  misc_feature (1)..( 3000): cDNA_ID_2714219_gDNA_ID_2214450_Annot_ID_182446 3000 nt of promoter + ATG
atcgaaaaaaatcaacaaatagaacggaaccggaaaacgatatcacatagtataagactacatagcttagttttggttttaaagaaaactctgataaaaaaaaaccggtagttcgacttctttgcatgtgaaactaaacttccttagtaataatacttagcttgttcaacttttgttatggtcattaattaattatctctttacttagaaaacaaaaagtcctatagtctgtaattaggttggtgccaagctgttcctctttaggaagatggaacttgaagttgaaattatcgtacctataaaaattattactttgaaagacatattacctaggtttgcctaatacagctccactaaatcagactcgattacgcaaaataaacataaacttcgaaaatacaaattttcttctgttgctaattcatatcaaattatgtattaagatctcaaatataacgaacgatccataaacatataatttaaaaggtcctcttctttgtctctttatatatatatacacgtaaatatgggtgaccttacatgttttgatcttcatattcatctaccttcggcgaaggaagacatcgaaatggagttcctcgagtactcctcaacgatgctatcatcatgtccagccgctccacgtccactacttcttctactcttaaaactgtttggttcgcttccgtttaatccaaaagttcttgaaccggctcctgtaccggtcccggtacttgtatagccgcctcctctacgaccttggagtccaggccgacccggtttaggcaatcgtctctgttgtgatgttgattggtaggtagtcctctcttgtgatgttgattagtagcttaaatgtaaaaccaaacaattttcgtgggtcaataaaagcaaaaatgaaaaaaaatattcgatctcttagtccggcccatgatcagtttcaggcccaattcaatccgtcgcattattaaaaatctctgaaatcgacttttaacttgtgaaaccgtcacagtcgccgggaaaaaatcacagatttcttcgacgccgccgatgaggttccggtacgcaatggtttgttcgtcgaatcagaaccggagcatggaagctcacgctcttcttaagagacaaggactcgacgttgcttcgtacgggactgggtcacatgtaaaactacctggaccatctctgagagagccaaacgtttacgactttggaactccttacaagcagatgttcgatgagctcaggcgcaaagatcctgaactgtatcctcttaatccgttcctttcttttgttgcttacggatcatgatttttcgaatccctaagtttgctttggtcactgaatcagtctcagtctccttctaattcgataatttgcttactttcttagtctccttgaaattgtttcctaattcacatttaagtttcttggtttgatttaaggtattgattctgggaaaaagtatgttttcttctctccaaatgactgaagaaaaagtgtgtgcgttttagtaaatatacgaaatttcttgcttgtagctattgtgaagcatgttcattgggttgtatagggagatttgtaagcttgaagtttgatgcacttaactgttttcatcagatacaagcggaatggtattttgcagatgattaagaggaatttatccgtgaaacttgctcctcaaagatggcaagataatgctggtgatggtgtgtttgatgtggttatgacttttgaagaaaaggttttcgattcagtccttgaaggtaattgaaaaatcctccctattttacagttagatactttgtttgaaaattgcttcatcctgattgctcactacgtacatattgatcacaaactcttataacattggaagaaaaaaatcctggtatcagtagatttgttcatcaacttatcccatttgaagaaaatcgaaatgttgacactttgatcttctacatgcattgtttccgaacaatcttctcatttggtaaattatgttaaactagttaggttagatgtttacatatgtgaattgatgaagtctaagtcatgtgaaactcaaaagttctgcttagtgattgccgtttcctgtaacttagtttacttttttaccttgctgtaattgttagctgaaaacccgattgcaatcatggtttgatagaactgtcggttttcttgctgcgtgaaacattcctgtgtcttaatatctttatctcatcaagttagatttgtccccaatctgcagatctcaacaacagagaacaatcacttacgaaaacaatacttgtgatgaacttggaggttaaagataaccacgaagaagcagctataggtggccgacttgccttggaactctgtcaagagattgaagggaatgaaacatgggaagatacgatcgatgacattgttgcgggttttgaaaaacaacacaggcggaaactggtctacagcatctcattctactgaagataccatcatcagtcgcattaacggtcagattatgtagagtgttcttctgtgaccccagtcttgagatgttgaacaaattatttttagttcatcggttttatatgttttagggttaaatacttgagagtgtagaagaaattgcatgttagaaactgagaattcgtcttccaaacacattctcttgtgttgtttctcattacttgaaagttgaaacagagccttgtcaaaaaaagtaataaaaatataaaagataggtgacacacgacatgtcttaaccaagcattacttcatgtttaatgtcacaatctaagttaacgtgtttatataaaacccaagtcgtgtaccaattgaattaaccctacccctaaaatcctgtacaagtcaattcaatgtttctagttaaatccaaagcccgtgagatcagatatttaaagacacccaatgacgaaaagtctctttaaaattcataaccttgactatataacgtcccacggttctaattgttagtttcagcagactcacaaaataatg

SEQ ID NO: 10808 - DNA, 3000 bp, Unknown
  misc_feature (1)..( 3000): cDNA_ID_3033063_gDNA_ID_2214450_Annot_ID_182445 3000 nt of promoter + ATG
atgtatttaattacgatctcttaagagaggcccatttccgttttaacaaaatcttcttcatccctgatagtgagaatttcaatttcaatgtcgccgatcatgtcgacggtaaatccctgcatctttcttcaagacgcttctcatagttccctattttctcgccattttatgatgaatgatttcatatagtcacctagatctctttgaaaaacctttttttaagacctcgtatgaatctgatagactttatagatcttcgtacatgaatccgatagacatagatcattgttttaattttgaacagtagattttgttctctctttgtgcaacatcacaaaatttaagtttgaaccctagaaaatttaggaagctatatttgttaatagtggttagttatcatacatgtattattgaattaataaagttagagagattaatacaaataataaaggaaagtggtataacttgcaatatataaaattcctaaatacaaggaatctttaatacttttgcaacactaaacacaaattgctagactgcatattatgagcaacctagtttctataatttttcttttatagtaatatacttttctcattgtttgacgaatacttttttgggaactgtgaatttttatatgtttttcttaaaatttatagatttataataaaattttaaaacattaaactatatattttactatatttattatatataatttatctatatattaaaccatattgttttgcctatgacatcatttttttgcacggctctgtatttaagtgatgttaattagagaatgtcagttatatgattggctcgttgagagtggtcagattgctatgaaaatttcgaaatttcgttttgcggctctaaagatcggcttactgtcagcgtcactatttcatatgaaagtcctcatggtgggtttttataggtggataagactttcatgttttctaaataaattttattttgtaaatatatagagttaccaaaatatatgatttgacagcttattagtttttacggtttgtttttcgttgtttgattaggtgattcgttgttcacttacgtgactaatatgattgtttattgataagatttggagatgactcgagctcatataaactaagccattgatgtcgaaaaactgtttaaaaaatttagtcgctaatgtatactcacgcggctgtattgtcccgtacgcggccacttttattttgtattgaagtactaacttacgttttaaaaattagactgaaactcaaactaaaatctgttttgtcccgtacgcggccatttttattttgtattaatgttctaaattacattttaaaaattagactcaaactccaactaaaatctccagccagcatatatatatagaatgttgcttagtcaatagtaacaaaataattgcaaatgtaaaggctgcttccaagaaaaaaaaggcagtcctatatcttttaacttgatatcttacaaagttataaaatggattactcacatcatagtctttgaaaaactaaaattattatgaaaaggtacatattaacacacccaaaaataaaaaaaaataaacgttcttgagttggcaacccctaaaagtggatggcaattcagaaatgggcttttaatgtttagattccataaaaagtgaatagatggttcttattctgtgtatgtgagatatcaatatcatcgtgacaaagactatgtgacaattaccatacaatttatcatggaggcaaagcattacaattataatgctaccaaaaatattttgaagttaaaacaaaaaaaacttattaaagttaattaaaagcaagattttcgacagagactaaacagagtcgattgaagctaaaagcacgacaagttttgagaggatgattgagatttgtaactcacccgacaagaaattacccgaaaaggacaaaccaattcaatgaaccttcgtcgaaatcattcacttgaccctttatatagtatagtttatattaacacataagaacttggataattttagtttcctttaacgcatgacatttctatattaaataaaaactattgttgttttttgttctcctgcttaacttaaaatgacagctattaaattatcaggatatttttggaaaccgatgtaaaccgaaaaaaggttattataagactttctttccttctttcttatttgcttaaaagatatatagttcaattttttgttttcttgcttaaagaaaagatagttcaataaaattgtatctatataaaagggattgctaaatagacatacaccgtatttatcggacgagaccaagaagttcaggttattgcaaactttgcctttttgacataaactttagaaaacaaatctgaacctgtctttttctctgattttcataatttttactaattaggttagagaggaacaaacatgaatccgaattatatagacaatcaatttttcataattaagtatgttgatatgatgatatcaatagtgttaatattcttacaagataaagaaaggaacaaaaattcttcgaagaacggaccggatcgatcgtatactcgtagtgctctctctacaagaagtaatcatgtggcatatggatcacgctttatactagcagttagatctaaaacccaatcgggtgggaagatcggaaccgtccatttgtcaacaaaggaagctttctaaattggagttgacgtcaaaagtctccctatttatgacgccataaatagattattcgcgtggatcagacttcggacttctttggatattgccaggttgtttcctttgtcgttcttcgaactttctttatttttttttatttttttttggtttttgtgagactaaagactaaaactatataaatatcatcgccgtataagattatgtcaaaacattacaaaacctagttttgatctaagcgctctctctctaactctccctctctttctctcacaactcaccagaacaattccatg

SEQ ID NO: 10809 - DNA, 3000 bp, Unknown
  misc_feature (1)..( 3000): cDNA_ID_3033067_gDNA_ID_2214450_Annot_ID_182440 3000 nt of promoter + ATG
aggaaaaaaagttaactgatgaattagaaagttgcagcatcattgggaccagttttgcatttacggccaagagctacccacacgaccaccactacgattttcatgtactgctagtattgatttattagtagtttaatacagctcatttagtcacttgttaaaaaatattatactaatcttagtatgttaatctacacttaacgtgccttcaatacaataaaaagaatataattggataccaaaaattagagaaatggacccagtggctattaacttctcacactggagagagagtgacatcaaactacaaaccaattttattttattttttttccaaaacggaactgaaagttgtttgaaaatccctcattggctcttcttctacatttatatttcttttactatacaatatcttagctctctgatacaactattaaatgcttaatatatgaataatacgtggtttagagtaactaacaaacgtaaataaaataacaatatttctccctactcgtggcaacataagctgaacagagccaagtacaaacaagttgactttctgctacaaactttgactatcccgacaagaaaaaaccttaagattgatcaggaaggatctcatcggttcttctatcttgtctctgaccattcttcttcttcttcttctcaacaacacttctgataatttaacattgcatctcctactcattctcatcgtcttcgtcttcaatcttctacacgaatgtcgcagtgaaattttttgactctttcagcttcttctcgccatctctaatggcgatcccttccttcctctctccaaatttacacttttacccttctaccaaactcgttccgagtcgactcactctttcctcatcctccttcgtttgttgtttatcagtagaccgccaaattaaccattcctccgtctccaacgaaacctccggcttacgagttgtcatatccgccggaggcaccgccggacacatctcttcagccttagcgatcggagacgagctaaaatcagccgacccacttgctcgaatcctcttcatcggattcccaaacagtatggagagcacgacggttccatccgccggattcgatttctcaacaatctccaccgtcggatcatcatcgtcccgaccattcctctgtttcacctctttcctcaaattccctctccgcttgatccaatccaccttcgaatcctacaaaatcctccgcgaactaaaaccacaaatcgtcatcggcaccggaggacacgcctcttttccggtctgtttcgccgccgtgatctcaagaactaaattcgtaatccaagaacaagattcaatccctggaaccactaactggattctgtctttcttcgccgatacaatcttcgctcctttcaactgtacagtcactaacctccccaaacgagtcgccgcgaagtgtgtcgtctacgggaacccgataagacaaacgcttagacgatactcgtcgaaaggagcggcgcgtgtgagcttcttcggacagtgggctggagctgtgtcggaaccgaaagttgtgcttttgcttggtgggtctttaggagccaatgccattaacatagctttgcttaactgttactcgcagttgttgtctgaacatgagaactggttctttgtttggcaaactggtgttgaagcttttgatgaaatggatagtcttgttagaagtcatcctcgtctctttctatctccgtgagttatacaacaacatttttaactgtttagctgcttttgtattgactaataactcaaaatgtgttttattatgtggtataaggtttttgaggtcgataggtgtggcgtatgcggctgcagatttggttatctcgagagctggtgcaatgacttgctcagagattatggctttaggcaaaccttctattctggtatttgaaatctataagctgattcatcgaatttgctaatggagtgtgttgtttcttgttttaaaacattgaatgttcttttgttttgttttttaagataccatcaccgcatagcgatgaaggggatcaagtaaggaatgcttctttaatggcggacattgttggatcaaagttaataacagaagaggagctagatacgatcactcttagagctgccatggaagatattctaggtgactaaaaactctacaaagtagaaaacactcacaaatttcaactctcattatctcattgagttggttccaaatgatagggaatgaagaactgatgatggaaatgagcgagcgggcattcaaagctgcgaaagcggacgctgcatcagatgttgctaaacacattatttctattatcaaatccaaagataagtaggtatgttgtatgaaccgtgttacagattacactagtgttgtgaaacaaagtatgtgtatgattgatgagcctcttagtagattttgaggaaacattcttgattgtgttggctaatttggcctagcaatagagagtgaataaaaaaaaatccttatatttggaaatagttgcgtttcttcttcctgttatctttactacttgtatatgaatcaaaactgatcctttgcatcttcttcttaactcaattatctatccgagtccggaaccttctcagctacgcagagtctctcttgagaatgtaactggatcagtgtatgtaaatgaagttaagctattttaacacctagatcaacaacccaaacattgcgtataagttatctatttcgtggacagttatataaacaaaatgttagttaagtacacgctttggaatcgtaaagatattttatattttggataaaattgcaccgacattttatccaatttcactaatttaagtcattttttctccattttgaaattgaaaatcttaaaccacaaaaattagaaatggagcggaaagcgactgagtaagatctttcaccttctatataaaccttagttctgctccggcgacatcgtcgggataccgctagtgattaacggtggtt

SEQ ID NO: 10810 - DNA, 3000 bp, Unknown
  misc_feature (1)..( 3000): cDNA_ID_2714241_gDNA_ID_2214450_Annot_ID_182439 3000 nt of promoter + ATG
atcatgaggttttcggtaaggaggactctggcttttaggcagaccgagtttcacccaccattcttcattccccgttggccaccaaggcggaggcgtccctttctccaacggatacttcctttgaggaggatcacaatgttgcatcaaagaagataacaaagaccctaaagtagcatcttgcaaatcctggagaacaaactgtgaattcctattcccatcagatttcccaaacgctaaacactcctcttcgtatttagcaatagcagcaggaccgttcttatcaaacttcactttctctttccaccaagctcttatattgtcagaggaaccactcacaggcttgcccttttccggtattataccatagacaaacccgcgaactttgcagacttccataagcttcaacatgtacttaaggataccatcttgagctctagacattttcttcctctgagcttgatcagagattttcttaggtgtctccttcgtttgagctccttgagagccagctttttgtcgctctttgattcttttaagcctgacacgatctttccacatccgtctctcaaggtcgtcagcatcaatctcttcatcactcacatcaatctcagcaacattatcactagctaaatcatcaggctcattctccatcctatccacaataagcaaactctcaaaaattaacagctttctaaagtttttgatttgataaacaaaacaaaatccatatatatcattatcttatgttgtcaatacagaggaaaacccaagtattcattgattcatcagctgattgagattgaactaatgattcatataaaccctaaattcacaagcatgaaagggaaattaatgaaattgaatcaaatgttcttcacctgatgtctgctacggacatagcaagatcgcccatttaaacaaaatcaatcaaaaacctttaacaacgataatctgaagcgccgaaattaaagaaatttagggtttttattctttctcctgtcgttctcaggggaagaagagagtaaaaaatggctgcgaattgtggagaggcaaagttttgatttagtcggaccaaagccaaagtattgttgtggcaataacccaacccccaaaggccaaatttttttttttttttttgttgttgcaaaaaccaagttgttttcttcggtttctgtttttttttttctttaatgtaaaaaaatattttgttactttatatctgttgtcgagtcaatctctctttctgtctctcgttttttttttctcaacacggatttttattggctcaacaaatagaataatagtatttattttgagtaattagttacgaggaataccaatgaagtttattgtatttaactgtccggattagtaaaaaaaactcaattttgccattaacctattcttttccccataaattaaagtcttttgggttttaatttggctttaaataaaaagcacattttcttaacttttttgggtttaaaatttgcataatgctaaatgctaacgtataccactcaatagcaaattgttgtcctacatagtgctaaatgctataactcaagcaaactgttcatcaagtcacttgacttctatcaaaacatgatgcatatggcagatagcacataggtaaacataattaaaattattttgaataaatttctattctaaacttttaattagacacacatttatatttttgtaatgttttttatgtttattttacaaacacactattcattttgaatgttttaatccaattattgtaagcaatctcaaaacaagaatagtttcatgctcattaagagattaagagaaatataaagataaaatttgatagctcatgaatgagttttattgtccaaggaaagaaaagaactttagattgtcaccaaaattagtaagactttgatgcaatcataaaatgggaaaaaaaggagagtagcctctttgacaactctctgagttaatcacattaattcacactataaatataagagattacttgtttagataacctaattacatgggcttctagacaatgataagcctttgaactataaaccatatgaattaaaccttttttatggaccctctaataattattacgttcaactttactcatttatcctagtcattttccacatccgatccaacttaaaaataatggtatcatttttctgaaccaccagtgtataaaggagaaggaaaaaaagttaactgatgaattagaaagttgcagcatcattgggaccagttttgcatttacggccaagagctacccacacgaccaccactacgattttcatgtactgctagtattgatttattagtagtttaatacagctcatttagtcacttgttaaaaaatattatactaatcttagtatgttaatctacacttaacgtgccttcaatacaataaaaagaatataattggataccaaaaattagagaaatggacccagtggctattaacttctcacactggagagagagtgacatcaaactacaaaccaattttattttattttttttccaaaacggaactgaaagttgtttgaaaatccctcattggctcttcttctacatttatatttcttttactatacaatatcttagctctctgatacaactattaaatgcttaatatatgaataatacgtggtttagagtaactaacaaacgtaaataaaataacaatatttctccctactcgtggcaacataagctgaacagagccaagtacaaacaagttgactttctgctacaaactttgactatcccgacaagaaaaaaccttaagattgatcaggaaggatctcatcggttcttctatcttgtctctgaccattcttcttcttcttcttctcaacaacacttctgataatttaacattgcatctcctactcattctcatcgtcttcgtcttcaatcttctacacgaatgtcgcagtgaaattttttgactctttcagcttcttctcgccatctcta

SEQ ID NO: 10811 - DNA, 3000 bp, Unknown
  misc_feature (1)..( 3000): cDNA_ID_3033071_gDNA_ID_2214450_Annot_ID_182438 3000 nt of promoter + ATG
ttctaacaagactatccatttcatcaaaagcttcaacaccagtttgccaaacaaagaaccagttctcatgttcagacaacaactgcgagtaacagttaagcaaagctatgttaatggcattggctcctaaagacccaccaagcaaaagcacaactttcggttccgacacagctccagcccactgtccgaagaagctcacacgcgccgctcctttcgacgagtatcgtctaagcgtttgtcttatcgggttcccgtagacgacacacttcgcggcgactcgtttggggaggttagtgactgtacagttgaaaggagcgaagattgtatcggcgaagaaagacagaatccagttagtggttccagggattgaatcttgttcttggattacgaatttagttcttgagatcacggcggcgaaacagaccggaaaagaggcgtgtcctccggtgccgatgacgatttgtggttttagttcgcggaggattttgtaggattcgaaggtggattggatcaagcggagagggaatttgaggaaagaggtgaaacagaggaatggtcgggacgatgatgatccgacggtggagattgttgagaaatcgaatccggcggatggaaccgtcgtgctctccatactgtttgggaatccgatgaagaggattcgagcaagtgggtcggctgattttagctcgtctccgatcgctaaggctgaagagatgtgtccggcggtgcctccggcggatatgacaactcgtaagccggaggtttcgttggagacggaggaatggttaatttggcggtctactgataaacaacaaacgaaggaggatgaggaaagagtgagtcgactcggaacgagtttggtagaagggtaaaagtgtaaatttggagagaggaaggaagggatcgccattagagatggcgagaagaagctgaaagagtcaaaaaatttcactgcgacattcgtgtagaagattgaagacgaagacgatgagaatgagtaggagatgcaatgttaaattatcagaagtgttgttgagaagaagaagaagaagaatggtcagagacaagatagaagaaccgatgagatccttcctgatcaatcttaaggttttttcttgtcgggatagtcaaagtttgtagcagaaagtcaacttgtttgtacttggctctgttcagcttatgttgccacgagtagggagaaatattgttattttatttacgtttgttagttactctaaaccacgtattattcatatattaagcatttaatagttgtatcagagagctaagatattgtatagtaaaagaaatataaatgtagaagaagagccaatgagggattttcaaacaactttcagttccgttttggaaaaaaaataaaataaaattggtttgtagtttgatgtcactctctctccagtgtgagaagttaatagccactgggtccatttctctaatttttggtatccaattatattctttttattgtattgaaggcacgttaagtgtagattaacatactaagattagtataatattttttaacaagtgactaaatgagctgtattaaactactaataaatcaatactagcagtacatgaaaatcgtagtggtggtcgtgtgggtagctcttggccgtaaatgcaaaactggtcccaatgatgctgcaactttctaattcatcagttaactttttttccttctcctttatacactggtggttcagaaaaatgataccattatttttaagttggatcggatgtggaaaatgactaggataaatgagtaaagttgaacgtaataattattagagggtccataaaaaaggtttaattcatatggtttatagttcaaaggcttatcattgtctagaagcccatgtaattaggttatctaaacaagtaatctcttatatttatagtgtgaattaatgtgattaactcagagagttgtcaaagaggctactctcctttttttcccattttatgattgcatcaaagtcttactaattttggtgacaatctaaagttcttttctttccttggacaataaaactcattcatgagctatcaaattttatctttatatttctcttaatctcttaatgagcatgaaactattcttgttttgagattgcttacaataattggattaaaacattcaaaatgaatagtgtgtttgtaaaataaacataaaaaacattacaaaaatataaatgtgtgtctaattaaaagtttagaatagaaatttattcaaaataattttaattatgtttacctatgtgctatctgccatatgcatcatgttttgatagaagtcaagtgacttgatgaacagtttgcttgagttatagcatttagcactatgtaggacaacaatttgctattgagtggtatacgttagcatttagcattatgcaaattttaaacccaaaaaagttaagaaaatgtgctttttatttaaagccaaattaaaacccaaaagactttaatttatggggaaaagaataggttaatggcaaaattgagttttttttactaatccggacagttaaatacaataaacttcattggtattcctcgtaactaattactcaaaataaatactattattctatttgttgagccaataaaaatccgtgttgagaaaaaaaaaacgagagacagaaagagagattgactcgacaacagatataaagtaacaaaatatttttttacattaaagaaaaaaaaaaacagaaaccgaagaaaacaacttggtttttgcaacaacaaaaaaaaaaaaaaaaatttggcctttgggggttgggttattgccacaacaatactttggctttggtccgactaaatcaaaactttgcctctccacaattcgcagccattttttactctcttcttcccctgagaacgacaggagaaagaataaaaaccctaaatttctttaatttcggcgcttcagattatcgttgttaaaggtttttgattgattttgtttaaatg

SEQ ID NO: 10812 - DNA, 3000 bp, Unknown; identical to SEQ ID NO: 10804
  misc_feature (1)..( 3000): cDNA_ID_2714260_gDNA_ID_2214450_Annot_ID_182432 3000 nt of promoter + ATG

SEQ ID NO: 10813 - DNA, 3000 bp, Unknown; identical to SEQ ID NO: 10803
  misc_feature (1)..( 3000): cDNA_ID_2714264_gDNA_ID_2214450_Annot_ID_182431 3000 nt of promoter + ATG

SEQ ID NO: 10814 - DNA, 3000 bp, Unknown; identical to SEQ ID NO: 10801
  misc_feature (1)..( 3000): cDNA_ID_3433799_gDNA_ID_2214450_Annot_ID_182429 3000 nt of promoter + ATG

SEQ ID NO: 10815 - DNA, 3000 bp, Unknown; identical to SEQ ID NO: 10800
  misc_feature (1)..( 3000): cDNA_ID_4266342_gDNA_ID_2214450_Annot_ID_182425 3000 nt of promoter + ATG

SEQ ID NO: 10816 - DNA, 3000 bp, Unknown
  misc_feature (1)..( 3000): cDNA_ID_2714279_gDNA_ID_2214450_Annot_ID_182424 3000 nt of promoter + ATG
tagcgtttgtagttgcagacggtagtggttggcaaaaaacatttttttatccaaatcttttatttactactaaaatatacataaacaacaaatatattaaaaaatagtatcaaaccctctatatattaacattaattctcaaaatcctaatatttttctccatcaaaatcatatagtcaattcatcaacaatggcaagatacaaactaagtattgtaataatactattgatccaaaagttttgaagtaattcgaaacataatttatttattttgtaattttgtcatattacttgatgttggtttttatgaaccaaaatgcatgaagtaataagcatttaactgataaatttattcgttttgaataattgtgtacagttttatatggtttttattataaattatatttatattattttttattttatcataataatataaacttttcaatcaaatatgaaatatgtatatatatatatatatatatatatatatatattcttttctataaatatgtttacaagtaaaagattcatatttttttctaaaaaataaaaagatataaaatcaaatatatatatatatatatatatatatatatatcttactataaaacgtcgaattatatatatatatatatatatatatatatatacgttctataatatatttacaagtaagagtatcatatacttttctattcataaaagatttataaaatcaaacagatctcctttctataaatccgtatgtgcaatgcatgacacctctataaatcttctttctgtagtctcttaatttttcacgttaatcaatattcactattcagtatacgagtaactaaatttaagagaaaagaaaaaaagaaacaaaaatggccaaggcaacttcttcacttgtcgtccccatcatctttcttgtgatatttgctttaggtatgcatttatctttaatttaatcatagagtaatgagttggcatatgtatccaatattgtagacttgtcattcacgtaactctactgtcatttttagtttcggctagattcattggcaatatatcatattgtatatatctttgttcagtgtattgataactcctaaatcttaatatagcttttgttatctgagtataaacgaaattaattaattttgtttgatatagttgagcagaatacgggatgttttgattatgatgtttaccaaccgtgcgatcattgtcgagaaagatgcctcaaatattatccagttacaagaaaggccatttgtcggaaaaatcattgtgtttgcattggcccttgtccggatgataaagcgattccagatgttaaactcttcaaaaatgtaaaagaacaaatcctaagttgaatgtcaaaatcataatatatctaaaaaactattttcagttgaagctttgattataataaaatttatagaacacaaaatttccagacatatgtttgttattgatgtggtgagcccacaaattttctcacaatttttatttatttaattctactactatcggtattcttaatattctaaaacaataaccaaacagagtattaaatctacttatcataaatatatatttcaaatttttaaatattgtcttatatataaagaagttttctgtaataaatgcattgaattcatgtattggaatattgttctgtcatcaactagattaaaaagctaaaacttataaaatatatgacttacacaacttatttaatttttcttctattgttctaaaaagcggtttagacgctaggtgctcaagctaaacataataaaatatatattagtatattatcccaatttttaaatatgttttattttcatagacatagttataaacatttatttatattttaatataaattattctttagttttggtttacaattttatattgtaattttctaatagatattttatgtaatttttatgtataatatcatacttttagtgttttataattataaataattgaatcacttaaaccgcttatatcacttaaacatcggttaaacgttctcgacgctaggcattggatcaccgcatatataacgccttgcgctttcttttttgaacattgcctataactaaaagatttacattgtgtcgttgttcaacataaattttttcttcatatgagtttttttataccttctatctaacttttttcatttgactcattcaacaaaaagagtgacaacgaattaccaattccatatctaattccatttggatacactttcaataccctacacaagtaatacacacccttcacattaaacccaaagtgagccctcttggtgaagtagagggtctaacattaaacccattttttcaaaactcgaaaataagaatttattttgaaaagacacttttaaaactcacataattaagggtataatagtttcaattaatataaatcatagttggacaattctaataaacaaagatatatatggacaaatcacaaaaaaaaataaaaaaaattcaatgttccccaaaaatacccacaaaaaaggaatatacagaccaaatataaaaaagagggaaaatacagaccaaatataaaaaagaggaaaactacagaccatatacaaaaccaaatacaaaaaaaaaggataaatacagaccaactgccataaaagaagaagagaaaagaagaccaaatacatatccattgcttgactagaggagagagattagctttctcatttacattcatactttaaattcgtgctaattactatataaattcgttgaattgcatttttctccataactagaatacagtgataacatttatgaacaatcaatccagtgaatatgatgaatatttgatatctttgaaagttatcttgtaattataaacctgtataaatacctactctttccctaagatcagatatatcttgtatcaactttcatcttctgatattcaccaaaacttctatccaaaaccaagttcaaaaatatgaattgcctc

SEQ ID NO: 10817 - DNA, 2306 bp, Unknown
  misc_feature (1)..( 2306): cDNA_ID_3033101_gDNA_ID_2214450_Annot_ID_182421 3000 nt of promoter + ATG
gaattcgtatgaactctctttggttagctgtaaatgcattggagcttatgtgagaaacaaaaagaaccagaaccaggtaattggcctcttcatcttttagccaccctttgatggtatctcttataatgtttggactcatatttttcgaaaatttcagatatgctggctttggcagaaagtcagttcggataatgataggggcttccaacgcttcttggacaatgtccagtataagtctagtggtatcttacgctatgagcgtgtctttggagaagggtttgttagcacagggggactcggtatgctctttagtcatcgagtttgtatcaactttgcagtattgatggttctgtttttgaatttaagttatacagaaccattaagtgaagctatcttttcttcttattatacttgtttcttttgatatagagacaacaaaggaattcgtggatatgctggatctgaaacctggccaaaaagttctagacgttgggtgcggaataggaggaggggacttctacatggctgagaactttgacgtggatgttgtgggcattgatctatctgtaaacatgatctcttttgcgcttgaacacgcaataggactcaaatgctctgtagaattcgaagtagctgattgcaccaagaaggagtatcctgataacacctttgatgttatttatagcagagacaccattctacatatccaagtataagcttccgctatttcttcttcccttatgactttaatttggtatccattttgtaatccctggtcttactctcaggacaagccagcattgttcagaagattctacaaatggttgaagccgggagggaaagttctcatcactgattactgcagaagccccaaaaccccatctccagactttgcaatctacatcaagaaacgaggttatgatcttcatgatgtacaagcatacggtcaggtatacagagatagaacccgtctcctcctatacttatttaaaaatcaccaaaagtcatctaaactcatatgattcaacagatgctgagagatgctggtttcgaggaggtaatcgcggaggatagaaccgatcaggtaagaaacgattttctttcgagaatgactcatatgctttaaaaaagatgttgaaaccaatttgctgtttgccttttaatcatcagttcatgaaagtcctgaaacgggaactggatgcagtggagaaggagaaggaagaattcatcagtgacttctcgaaagaggattacgaggatattataggcgggtggaagtcaaagctacttaggagctcaagtggtgagcagaagtggggtttgttcatcgccaagagaaactgattatggcatttactataagttggaaataaatttgggtatgtatgtagatcatcaaaacccagtaccctgctattatctctacaagctatatatatgtggctgtgaggttcctttaatgtctccattttacagcatatccagtttggtatttaatatatgtgatattttgaaatcggtttgatcaagttatacatagaaaagctcgagctcgatcaccattattgaatagaaacaaaaacaatgagccaaagtgatagccctgttattttactagtcgtcagcaactgcgacttgttatattgttcttgatagtcgatgtgttgttgttttggtaatagcttgctacatatttttttatttttttatttgtatgttattcttttttcatttttttttcatgttattacctagttattctataaatcttcttttattgtcttttaatgtttcaatcaaatataaatatatatatatatatatacatacatgtatgtaaaaatattcgtaaacttaaataaataaaatgtacatgtgcatgccaatattacctaggtattattctataaatatttttatttagtctctcaacttttcaataaaatatatatattctactagaaaaacgaattaatttatcaaatatcatatacttttctataaataaaacgatttataaaatcaactataaatattttactataaaaagaattaagttataaaattatatatagagtttctataaaatatatttacaagtaagaaattcatatactattctataaataaaagatttataaaatcaaacagatctcgtttctataagtccgtgtgttcatgacacatctagttattctataaatctcctttctgtagtctcttaatttttcacgtttaccaatatattcactatttagtatacgagtaacgaaatttaagagaaaagaaaaaaagaaaaaaaaatg

SEQ ID NO: 10818 - DNA, 3000 bp, Unknown; identical to SEQ ID NO: 10811
  misc_feature (1)..( 3000): cDNA_ID_2714244_gDNA_ID_2214450_Annot_ID_132920 3000 nt of promoter + ATG

SEQ ID NO: 10819 - DNA, 3000 bp, Unknown; identical to SEQ ID NO: 10810
  misc_feature (1)..( 3000): cDNA_ID_2714241_gDNA_ID_2214450_Annot_ID_132921 3000 nt of promoter + ATG

SEQ ID NO: 10820 - DNA, 3000 bp, Unknown; identical to SEQ ID NO: 10809
  misc_feature (1)..( 3000): cDNA_ID_2714237_gDNA_ID_2214450_Annot_ID_132922 3000 nt of promoter + ATG

SEQ ID NO: 10821 - DNA, 3000 bp, Unknown; identical to SEQ ID NO: 10808
  misc_feature (1)..( 3000): cDNA_ID_2714223_gDNA_ID_2214450_Annot_ID_132927 3000 nt of promoter + ATG

SEQ ID NO: 10822 - DNA, 3000 bp, Unknown; identical to SEQ ID NO: 10807
  misc_feature (1)..( 3000): cDNA_ID_2714219_gDNA_ID_2214450_Annot_ID_132928 3000 nt of promoter + ATG

SEQ ID NO: 10823 - DNA, 3000 bp, Unknown; identical to SEQ ID NO: 10806
  misc_feature (1)..( 3000): cDNA_ID_2714215_gDNA_ID_2214450_Annot_ID_132929 3000 nt of promoter + ATG

SEQ ID NO: 10824 - DNA, 3000 bp, Unknown
  misc_feature (1)..( 3000): cDNA_ID_2714203_gDNA_ID_2214450_Annot_ID_132932 3000 nt of promoter + ATG
atgagtaatgttcgagctctctgattggccagccatccaagaaggacctctgtcttgagccatcagacctgctaattggttattgttgtagtctccacgatattgacctcctccctgaaacaataaacaagattacaagcagtgagacccaaaagcaaaaccaaaaagatgtagagtttccatttagatgatttattaatctaaagcagaacatgattttaacggaatcagaactagaagtctagaaatatgatgatagcttgacaatgaaaaaagatgagaagaattattgccagaagaaatcatttctcatatctgattaagaataacaatgatagatgtttgagagaattctcattaaagggtaatctctactcgttgaaggtgtagtgctcggaagaaagcacatagataaagcaacataatttcatactcagtctgcaaaacatcaaacatatcgcctaaaggtcaaaaagtaagagtatcaatacctgatatgttggctgactaggcagatgtggctgtccctgcgggaattgaggtccaccggaagcagggggtctgttgcctgactgcaaaattggctcaaataacgagttctagtcagtcaaaaacttcataattcacaatgagggaaataaaaggaaaccgacaatagctactcataagtcataactctgactcacatgatacatgggttgagaaagatgctgagtaggtgcgccatggtgctgaaatccagtgtttggaccagtttgagcttgtccatattgatgatgatatggtctagactgttgctgtgccacatgaggacctccaccagagtgcattggttgttgttgcaactgagtggaggaagctggtatatcaagatgatgaaaaggaggttgctgggatgttggatgatgggaagccggaggaggcgcgttttgaacttgagaagactgtggatgagacatagaagtgacagcaggattcagatgtccctgacgctggggatgcgaaaaacgaggctgtgattgagcactatttgcagaaacagaaggcggtggtggaggcataggcattggttgtggtgttgggtgttttcgaatcggggcttgtggctgcatcgtattggctggctcatgtacactgccaccgccttggaaagaagacatatgagcttgaacgtttggctttggcgggatagattgatgagattgttgaggttgttgtacagcttgtggctcaactttcggagtctaatagaaacagatttttgtaaaatttaagatgcttgaaatgaaatctattaacaaaatgacttaagaggacgcaagtacataccacttgaggaggctgaaccattccgagcatgatttgtgcctggcatttcaacaaacatagcatcatcatcaccatatacaaattctgaaatctatttgtaaatagaggcataaacctaaagattgttcatatctggaaactaacacaaaaccctaattgttaacctacctgcttcttcaacaatactaaacccaaactagtccaatcaatttactcaagtaagaagctccaaatcagaattcctcattgcttataagaccacacggattgcagatttagaagatggaaaagattagcgaagtgaagaagaacctggaaaagagccttcgtcaaaagagggttccgaatcagaatctccctcgcttgttgatggttttgatcaatcaacgtctgcacaattagattcgactgatcaaaaaaacagaattcgaaaaaaagaagaagaaatcaattgttctctattcaaatccgtaaaggatagtgttatagctgataatcggaaaagtatagaaaagaaagaagagagaaccttcatttgagacataatatcatagagctgacttttagtcattccggcgagatttgccggtaaacctccgtctccgccgatctgcttacccgccatggttctcgtcggtaatcgctaccgagcttaacctgtgtgttaaagacgcaacacaagagtacttgtgaacaaacctgggccaagtataatacgggcccaattagtataattccggcccatttaaaattctagacttattagtctatggcgcctgtagatcaactctttttttggtcaaaaatttaccatttttctcaaaacaaaacacaacaataaaatatagagatgcattagatatgtacgttaaatatatttatatgaaattattaatatgtttctttacatgtaccatgttaattgtacacgtaacatgcatgtatattgtataatatgtcttttggaaaagcaaaagcttataaacacaagtttacattagagagaagcgtgtgacacggttttggcctcttcactttcttgttgctccagaaatcttctttttatcttgtctccatccataattttcatacgaagatagttttctttatttcatccataatattcaatatatattggattcttgcctttggtaagtcggtaaacatcatcaactttatttttattctttcaggtaaaaatagagtcttccactacattcatcttccacaagttttgctaattttaagttttgggtaagaataactaacccatgtatatttcacaattcattcataacaaatcaaatgattatgagatatacttatgggttatatatctcaagggattcagtgatctttaaacttggcacttggtataatttcagcatgccctttaaagaatgagtaggcgtataatcttgtctcaagaaaattataagaagtccaaatttataaacatgtattgagacaattaaaagattagaattaaaaaaaagaaaaaaaaaagaaaaagagacgcactcaactcaactttctattttttatttttgtaaaactacaaactttgcttttgattttgtagccgaggtagtctctctctctccatttgataggaagaagaagaaagatacaaaaagataaaagaaagagagaaaaagagttttaattaaa

SEQ ID NO: 10825 - DNA, 2016 bp, Unknown
  misc_feature (1)..( 2016): cDNA_ID_2714199_gDNA_ID_2214450_Annot_ID_132933 3000 nt of promoter + ATG
ttctagtcctttaaagaaaggaattgattgtggtgatatagcgacgtgacaatatatacaaatcaagaggttgtgacttcatcgaatttttggcaattttgcagtttacgccaaaagaaacaaggaaacaaacaattttacgccacatgacccacgaacaattgaacatctctctatcataggactcgttcctctgctttacaccaccattttatttatattactttatatggaatttacgcaagttatgtgacatgatatacaaaccttaattatatcaccattcaccaccaagttgaaatctgcacatttttgtgatacatgtgtagaattaataatataacctattgacgaacgagtgaatttcggaagtggaggcacaataggccttgattgatatgagagaccacttgctaacatagatgcgggaaatctttttgctttcatacgtccgattgctctgcgttgaagtgtgatagatcggtacttgaaacagttaaaattatcccaacactaattaataagtattaagtaacaacaataaaaacaaatattcctatattaaagctcgatatgataaataaatgtatcactacaacgttttccttaaatctgaagtattttcttgtctattttgaacgaaattaaagatcaatttaccactactatatttttggttttgttttcataacctatggttttaagtataaagtatgctaactctataatattgtagacggtggaagtaaagtaccacaacacgacgtgtgcccaaatcatacatgatacatattaaaatgttccgttggtcgtcgtaccccaattatatgttacaagttaatcgtttcttaatccaatttataatctgttaaaatactcgttaattttaggcaaggatttgccacgtgtaataaacccgtataaacgattggagaagccaaaaaagacttgttaattactgcgcgtcctcctacattcgcgctctctccctccgtacaacaaacaaaccccaattttttttttcctactctgtatagataatttttaatcattagagaaaaattaatcgtttaattagtttactattatccgctaataataatcaaaagatcaaatcaacccacattcccatcacgtctattttctccgtctctctgttttcttctctcaggttttagacctcctcaacgctcgtttccaagctttcccgataaaaacatcgtcttgattttctaaggtaatgagaacaaagatcgcatctttttttctttctcctcatatctttgttgccatgttgcgattttgctgatcgcgactttgagctatgttttgacttggtttttcaatgttgaatttttttttctcttgttgcaccaatgtacccttctggtaggttcgtctttagttttgtttccttctggctagttttgttttatcaagttttgttcgattgtctcacgttgctgtttttgtcttaatccctcaattcataatgctgtataacggttaaatcatgtgaatttatactgggaactagaaaaaatctcatctttgaatccctagattaatgaaattaatggaaatgtgattgttaggatttagtatcggctttaaatatggaaatatgagaaatttccttataataaattaagaattctcaaattcatcacagtaatccctgactctggttactatgttttattgtcagctaagattttttattacagagtaaagctgattacaatgatgactctgagatagttatgtctagcagtgccatttgatcatgttcttgcacgtctttgcatgtaggaaaagacaaaaagaactaggctttggttttcttttcatctagattgctcttctatgtgtgtgtgtgtgttcttatgaattttgtctaatgctcattttctttccctcaatcaactatgtttcaggagtttttgctaaagaatgcagcagttttggggtttccaggtgtttccataagtttgctttggacctcgaggcgtgatg

SEQ ID NO: 10826 - DNA, 3000 bp, Unknown
  misc_feature (1)..( 3000): cDNA_ID_3038118_gDNA_ID_2214451_Annot_ID_182559 3000 nt of promoter + ATG
tcacatctaaaccctaatggttttttaatgcaaccactatcacaaccgcagtgctcacaagaggacttaaaatgagttctcttgctgcccaggtgtccacaacgggaacagtgaggagatctttttttcatctctgagcggaattcttcaccatcatccccggatttgattccaccaggaactgcaggttgcaacccatttccaatgtcctgtagtctgcacgaaaatatatatcccaacacattcaagaaaatgacaagtcaccaaaaagcagagacaaaaagcttatggattataacctttcaagtacttggtcttcagaaaactcacgaacaatgcgcagtgctttatccacaccaatcccaagaacaccgcctgaatcataatcgtttcccaccaatagagaaatagcaatcaagtgtttccgcttcaaaccgaggccagactcgatatgtgacatatggtagcattcaaaaggttcctgcacacaaggaaattaagatggtaaagagacgataagtgagtcagggtaatactcagttacaaatgaatacttactcttgaattaggcttgatgtctttgatcacgcacatagcaccaaaaaggaaagcatcactatcaggagtaatgcaagcatccacaaaaccttggctgtttaactgtgcacagagagcttcagcctcaccattagctttcagcaccggaataccgagcaattcgagtagctcctagagaaccaaaaaaagtcataagaaaacaatgtgaaacaaaacaagcataaaggtttgaagggaaagccatcttaccacacattccctaacccattcagaaaacagcttgtttctctcaaccgagacaccatctttaatcacaggtagattacaagtatcaattccagaagaacggaaaaacctggagattctcgcctgagatttcaaaggtgatggtgttccatcaaccacaaaaaccgggtacgctccaaactgcaaaaccctaaaccgcattacaatcatctccatagaaaaaaatcaagatttttcaatcaagcgaaaacctaaaaaattcaaaaaaacccgtaatccacagaaaaaaggaacttttttagccaatgccaaaaaaggattaaaggagacgaaattgggaaattcagtagaagcataacaagagagaagaagcgcgcagcaataaaaaaaaaaaaaatgggacctttgagaagaggttgatagtacggaagaaagtgagtcggaggtgaggtttaaggacgaaacccttaacagcggtttcatgctgaacgatccagaaggagagatcaacagcgactcgtttgtttctgagaaaatcaaagccttgttgctgagcatatggtctcagcaaatcccagaaattgcctcccacacccattcaatcaaaatgccgtaatagcctagcggagcggagcggaagatcacaaaccgaaaagcctaaaccagcaaaaggcgaattaaaagaaaaggaagccgaaggatagaatcaatttctgaccgttatgcgagtcttgttggactcgcttgtgttgtgcctatctatttatggcatcgtcacatcacccgccacggttatgggcccaacaattagcccggatgatatctctgtagcccattaagtctattaagaaaaaataaaataaaaaactatttatacagatcgcccaccgtggggctcgaacccacgaccacaaggttaagagccttgcgctctaccaactgagctagacgggctttgttggttaagtattactctattcaattgtctagtagaaaaccagaaaagcattatccaaaaatgtgcaagtatggaccttaattggtgtctcgctgaggcctgcgggtaaaatagtgaaacacacgataaaccatttctagactgtagttatccttttttaaaagggtattgaattaaatgagaagatacgatgaatatctccgaatttcataggagtgaggacatcaaagaaaaaaaaaaaaaaatgtaagtcgtcggcttacgtgttcatacttggcttgaaagccagtacacaaagggattatgagtgaagtgtgaacaagcaatgatttgaatcataggaaatatagaagaaaacttggttatatggtatgagtaatatattaagtcacgccccaattattgttgcgtttgtcccctccctctccatttaatgtccacctacccctaccggcggtggaagctgcctgcattcctcgtccttcttctaaactactacccgttttcttttctttttttcctatttaaaactttcacggcttttttttctttttctttgtatagagtaaagattattgcaaaattcccacgtcttagatgaaaatttgcacctcataagactagacttgttcattacgtgttccatattctggtaggcaaatatttttatcattcaaactcttctataagtgatattaataaaaagcttgtatttgtttgtttttattggtaaatatataaatgaacccacgtcccctaaaggctaaagcaacattcagtaacagacggtcccgcacaagaacctcacaacagcgacagttacaaaacatatcatatatttcatttaaccttttcgtatatattactctttctagtcacattttcctcagctcccactgctcacagtattcacacgtcacatatatatatcttttatgtgttatatacccacagagaccagtcctaagaatcacatgtagatgcatcgctttcttttaatgctcttatttccctttagcgacaaccgtcccatgatgttcttcagatcattcatcgttttcttctttcttatctttttcgcatcaaatgtttcttcccgtaaacaaacctacgtgatccacactgtcacaaccagtaccaaacacatcgtaacttcactttttaattcactccaaacagagaatatcaacgacgatgatttttctctcccggagattcactatatttacgagaatgcc

SEQ ID NO: 10827 - DNA, 3000 bp, Unknown
  misc_feature (1)..( 3000): cDNA_ID_4370972_gDNA_ID_2214451_Annot_ID_182563 3000 nt of promoter + ATG
tccgtctttctgcagcggctgctctcttttccctctgtgctgccattgctctcctcacttcctcctattacaacaagatttacaccaaagacaaagcaaatgttgacatggcttctccttaaatatcagactgagatcagattatacaaattggggtttgtgaagctaaccactttagaaattggcttctccttctccgcctgcgcagcttcggcctgcaaacacagggagggttagataacaagtctctactaatccgagttttgtttgaaaaatagaccctgattcaaaacgttacctgagccttcttttctcgggctttgcgtagtttcttcaactcctttgttcttgctttctgcttggcgtctttttctgcctgaacaacaatcaccgtcacgaatcaagttagtctgatgatggattcagactcccatatgcaaccacatgtctccgaaaatcatataccaaatcatgccagaacaaatatatacgacaccaattaatatagtatttggcagtcatcggattctaacacatgaccacacatacatcattaactccgggatagagctcaacctaaaatcccaatgcgcaatgaaaggactaactgcactagtcctattttgcctcatgcggaatccttaaccaaacttctaaattcaacaaataacaaaccaatgcaagtacctgcttggcagcttgagattcctccatctcttttgtgagcgggctgggtactttagcatcatgccaattccatttttcaaggtttaacgccataaaccgtctgaaagtgtttctcacttccttctcatttgcaagcatgtatggcgttctgcctctttcatccttagcacaaggatccataccctcctccaagaactccataactctttcacaatcacccgatttggcagcttcatgtaaggcagttgacgtaccagtaactccatcctcgatatcctcttctatacgatttggttcctctaagattatgttgctagaagaagtttcatcgggctcttcctttcttgaggttttgccagaatcctcattgtgggtctgcaccactgtattagctttggtgacttctggtcgattaacaaaaatctcctcagttacatgtgcaatctgagtcaactgattatatatacgctgtgattccttgaaggttggccgacggatcgtaaatggaacgtttcgtacagcgcagttttggctgctaaagtacggtttgcctccattgaaaagtaattgcctactgcttgagggagcatggacaaaaacacaagcagcaccatcaaaataaggtttccagctagcaagtagctcttgaatatcctaacaatagagagaaaaatgacaaaaattacacttcaaggctatgaattatctttcctagaggtaaaaaaatatataaacattttttctttatgttttccttcctatgatcctgatcccggttgataatcatcgaggaggcggccaatgtttccacccgtttaagagacctaaatcatgtttacaaaactatacaccacacttccgagttcagaattgcctttacaaatggacagagccgcatatattattataaaaaatcaacgaccttttgtaatctcagctgaaaagagaaggaaacagtagcaaaacatgtccagagacaaaccttttttaaagcaagttcattgtaacgacgaagtgaggctccggcagagtgtatacttctcccgcttgcatcttttgtggactgctttttaccagccttggctcttacaacatatctacacatagggaaagggaattagaggacaaaaagaggcaaaggactgtgaataaagttttatgaactgagaggaaatgagaagagaagtacctgtggaatgtcttatgagccacaaccgactttccattaaagacagtaccggcaaagtggccaccacttgcaagcaacacgacacgcatttgcctatcatccttattctctcgaatcaaatttctcaacctctcagtaacttcattctcgaccaagctaccacaacagtcaacagaaactcctctgtcattctcgaacgaaacactttcagcgtcgtccatgattaagcatttccagatagaaactttgtcaccactttgaagacggaaaaatagtttctttttatcaatacccttttgagcatcaaagtggaaagagggtggtctagtctcagcttcgtcctctgaacctgatatgctagacacgtcatagtcttggaccgactcagatgtcaactcatcaacatcttcctcttttaatatagccttgccagcaacactcagcttgatctacaaatcacagcaaccacattaaggcattggaaaacgaaattgtgacactttttttttccatataattgctcgaataatttagtcggaagagagaaatttgtacgttaaggcgatgaatatcggacttgaagtggtagcgttgatcttgaagagacaggaactcaattttacaagtattacaggtccatctgtccaaaatcacgccgtccttggaactcttatcctcctccgcctcctctggatcgaaagttttgggtggtccgaatgccgattgagtctccgaaggattcgacaaccgacacgagtcaaagaaatccgccgtcaagtcaaatatcgatcgaggctgtttatattctggattaccaatctcggtggtggccgccgcgccggtggtcgccattaattatgaattggacggattgattttcctaacaccggtaccgataccgataagtgtggatttgaaagctttgtgagataaacgattccgttttgttattttcttaaatggatccataatgtcattaaagtggcccatataaggcccaataatacaaggcggcgatgcagaaagatctcgaacgaacaaaagcgccaaaagcatcctagacgcgactgagaaaataaatatagaagaaagcctctctgctcgttttgcgtttccgagcaaca

SEQ ID NO: 10828 - DNA, 3000 bp, Unknown
  misc_feature (1)..( 3000): cDNA_ID_3038102_gDNA_ID_2214451_Annot_ID_182564 3000 nt of promoter + ATG
aattgctcgaataatttagtcggaagagagaaatttgtacgttaaggcgatgaatatcggacttgaagtggtagcgttgatcttgaagagacaggaactcaattttacaagtattacaggtccatctgtccaaaatcacgccgtccttggaactcttatcctcctccgcctcctctggatcgaaagttttgggtggtccgaatgccgattgagtctccgaaggattcgacaaccgacacgagtcaaagaaatccgccgtcaagtcaaatatcgatcgaggctgtttatattctggattaccaatctcggtggtggccgccgcgccggtggtcgccattaattatgaattggacggattgattttcctaacaccggtaccgataccgataagtgtggatttgaaagctttgtgagataaacgattccgttttgttattttcttaaatggatccataatgtcattaaagtggcccatataaggcccaataatacaaggcggcgatgcagaaagatctcgaacgaacaaaagcgccaaaagcatcctagacgcgactgagaaaataaatatagaagaaagcctctctgctcgttttgcgtttccgagcaacaatggtgagtcgtttgtccattgttcgttcgtttgtcctttgttcgttctagtcagttttttttttaatatagttctggcgatatttgtatttatatgttcgagtttcctggttttgattattgcagtcggtaactttgcacacgaacctgggtgacatcaagtgcgaaatcttctgtgacgaggttcccaagagtgctgaggttagttattcactcagctcatgtttctcggtttcgatttgagctgttttctttgaattgtttacaaaatcagtccagttgaggcaaataacaaaacaatattcactaggttatctagtgtccaattagctattacctggtgctgggttcttgtattgtatggatgatttttcttctccttctctggattgtttttaatctttaggcgaaattagggttatatgaatgtcatgattggggaaattatttttccctcaacagtgttggtgtataggttcattatttttcaatgcgtattcattggatcactgagctatttctctctgacaattttcgcaagtttttccatgtatgaagcaccttgacctttagctttgatctttcatattggtgcagaactttttggcgttgtgtgctagtggctactacgatggtactatctttcatagaaatatcaaagggttcatgattcaaggaggagaccccaaggggaccggaaaaggaggaactagcatctggggcaagaaattcaatgatgagatccgagactcccttaaggtatctctattctcatctctgcttatactttccctttatccttcaaactgcatcttcaatgtaatgcaactgtctcatggcctgttggtgtgttacctcttattcagtgtcttcataatccatgttagcatccatccataattatagacttcttttagctcagaaccattattagtcttagaaaaccaaagtggctgagtacactatcctgatctgttccttctgactgtaaggtaaggtatcaatgtgttttagccaggtagtcatatgcatgccattaccctactcataaccgctagtgcaatccctcttgcatttaattccagggaagtagatagatttgagtctgttgcgaatggtcttatctatctctctagttgttcttgataatttaccagattccattctcttatgcagcacaatgcaagagggatgctgtcaatggcaaacagcggtccaaacaccaacggaagccagttcttcataacctatgcaaaacaaccacatctcaatggattatacaccatctttggcaaagtcattcatggcttcgaagtgcttgacattatggaaaaggtaaaccaacctcttaccctcttaaatcacctcgtctttctaagaagagtttgaactcttatgttttcttccttactgtgactgttgttagcctaaatcaagtgtgttaaagaagaatgcttgttagttgttggtgatatgaagcctggaacaggatttattgatctgaattttgtttttagaaaactcatctaatgatatgattgtggcctgttgcagactcaaacaggaccaggagataggccgcttgctgagataaggctaaaccgtgtgacgatccacgccaatccacttgctggttaagtctaatgtggcagaaccgagccaagccaaaagtgttgttctctttatttgtttcgatagagctgacatgtacactcagaaactgaactaagaccactgtttcacccaattaaaaagtttgtactggaggatttaccaattactgtcttcaaaggtgttttgtattatttaaagacaaaaataattttttttgcccaatacttgacgccgtattgcaatctcgccaacaagatttcaaatacacaataatctatctgctgagtgtgtaataataactaataagattcaacgtgggccatcaaattcgaaccaaatcatgtaaatgggctcagccaaacccgacccggatcgaataaaaacggatcccttccactaagccgacccgttcggcgcaattaaagcggccactacctctggctagtagggaccgaaccacactgcgcagtcagcacaaacctgaataagggtaaaaaggtaaaatacggtactctcttttgacaaaatgggacccgttgtaacgcaacgactgtctctgtcttcattcaaatactaaacgcgtgtgggcccgccaacctcctcctcctccatcactgttttttgtttaaacaaaaaaaaaacacaaaatgttaaaagaaaaaaatataacccaaaaattgacgaaacaaaattgagaaacaatacaacaccactctcttcttcttcgtttgaatttgttcttctcttttttgcatagagaagactattgattagaaa

SEQ ID NO: 10829 - DNA, 3000 bp, Unknown
  misc_feature (1)..( 3000): cDNA_ID_3038106_gDNA_ID_2214451_Annot_ID_182562 3000 nt of promoter + ATG
aataaaagtgaagaatcgtctcctaagaagcaattaaagggaaagggatcagcaccccagcaataggaagagagttgcttaactaatacaaagctaaaattgataaattcacggaatcgacagtcagtgaaaactcaaatcagtgataaagaaatgaaaacggacctccattgtctgcggctccgatagaagcagaggagctccgacggggagcaggcgccgaggaaggaatcctggatttgaaagaagacgatctgagattggatgaattagctccagagactggtctcatggatcctctaaccgcaccatttctcgaagaagccatagccattttctaatcaatagtcttctctatgcaaaaaagagaagaacaaattcaaacgaagaagaagagagtggtgttgtattgtttctcaattttgtttcgtcaatttttgggttatatttttttcttttaacattttgtgttttttttttgtttaaacaaaaaacagtgatggaggaggaggaggttggcgggcccacacgcgtttagtatttgaatgaagacagagacagtcgttgcgttacaacgggtcccattttgtcaaaagagagtaccgtattttacctttttacccttattcaggtttgtgctgactgcgcagtgtggttcggtccctactagccagaggtagtggccgctttaattgcgccgaacgggtcggcttagtggaagggatccgtttttattcgatccgggtcgggtttggctgagcccatttacatgatttggttcgaatttgatggcccacgttgaatcttattagttattattacacactcagcagatagattattgtgtatttgaaatcttgttggcgagattgcaatacggcgtcaagtattgggcaaaaaaaattatttttgtctttaaataatacaaaacacctttgaagacagtaattggtaaatcctccagtacaaactttttaattgggtgaaacagtggtcttagttcagtttctgagtgtacatgtcagctctatcgaaacaaataaagagaacaacacttttggcttggctcggttctgccacattagacttaaccagcaagtggattggcgtggatcgtcacacggtttagccttatctcagcaagcggcctatctcctggtcctgtttgagtctgcaacaggccacaatcatatcattagatgagttttctaaaaacaaaattcagatcaataaatcctgttccaggcttcatatcaccaacaactaacaagcattcttctttaacacacttgatttaggctaacaacagtcacagtaaggaagaaaacataagagttcaaactcttcttagaaagacgaggtgatttaagagggtaagaggttggtttaccttttccataatgtcaagcacttcgaagccatgaatgactttgccaaagatggtgtataatccattgagatgtggttgttttgcataggttatgaagaactggcttccgttggtgtttggaccgctgtttgccattgacagcatccctcttgcattgtgctgcataagagaatggaatctggtaaattatcaagaacaactagagagatagataagaccattcgcaacagactcaaatctatctacttccctggaattaaatgcaagagggattgcactagcggttatgagtagggtaatggcatgcatatgactacctggctaaaacacattgataccttaccttacagtcagaaggaacagatcaggatagtgtactcagccactttggttttctaagactaataatggttctgagctaaaagaagtctataattatggatggatgctaacatggattatgaagacactgaataagaggtaacacaccaacaggccatgagacagttgcattacattgaagatgcagtttgaaggataaagggaaagtataagcagagatgagaatagagataccttaagggagtctcggatctcatcattgaatttcttgccccagatgctagttcctccttttccggtccccttggggtctcctccttgaatcatgaaccctttgatatttctatgaaagatagtaccatcgtagtagccactagcacacaacgccaaaaagttctgcaccaatatgaaagatcaaagctaaaggtcaaggtgcttcatacatggaaaaacttgcgaaaattgtcagagagaaatagctcagtgatccaatgaatacgcattgaaaaataatgaacctatacaccaacactgttgagggaaaaataatttccccaatcatgacattcatataaccctaatttcgcctaaagattaaaaacaatccagagaaggagaagaaaaatcatccatacaatacaagaacccagcaccaggtaatagctaattggacactagataacctagtgaatattgttttgttatttgcctcaactggactgattttgtaaacaattcaaagaaaacagctcaaatcgaaaccgagaaacatgagctgagtgaataactaacctcagcactcttgggaacctcgtcacagaagatttcgcacttgatgtcacccaggttcgtgtgcaaagttaccgactgcaataatcaaaaccaggaaactcgaacatataaatacaaatatcgccagaactatattaaaaaaaaaactgactagaacgaacaaaggacaaacgaacgaacaatggacaaacgactcaccattgttgctcggaaacgcaaaacgagcagagaggctttcttctatatttattttctcagtcgcgtctaggatgcttttggcgcttttgttcgttcgagatctttctgcatcgccgccttgtattattgggccttatatgggccactttaatgacattatggatccatttaagaaaataacaaaacggaatcgtttatctcacaaagctttcaaatccacacttatcggtatcggtaccggtgttaggaaaatcaatccgtccaattcataattaatg

SEQ ID NO: 10830 - DNA, 3000 bp, Unknown
  misc_feature (1)..( 3000): cDNA_ID_3038110_gDNA_ID_2214451_Annot_ID_182561 3000 nt of promoter + ATG
atcatagcattcgcttgtcacagatacccttcaacttaatatataaaaagctgattaagtcgtaaaacaacgatttcttggtagatatgagtctatgtagtcatgattattacaaatataaaaacaaatccaatgcataacaataaaacaacgcaaaagaagattctgcttgatcttctttcctgtcctataaagagttgttgctagatgaagaactagagagaaaaagattcagttttaattttccacctataaattgttcaaaacataaacaacaataaacccaaatgacaacgcagatccagaagacccccatgtagaaagcaagtgagttccaagaatatggcgaggaaagaaacttacaattaaagggaagaacagagccttatctttagccactcttgacccgttcgagttcttcttcagctgtttttaactgcaaacgcaatgtgtgtactttcctctccagctcctctacattgctcctgctagtggtaggatggtacggcgtcaagaacttatgtgaaaacgcctttaaggcttcaacccctgtcacctgtgatccaaacatccacaacaagtgtaaatctcaggatgtatattatataaggctttagtttcattttcgtcttgatcatgttccttctcatctatattgaatgtcatgcgttcttacctcttccggaagcagaggaagctttgtgatattaaagtcatcgtatagcatataaaactgatcaagatacttctgttgcatccgcatccttgctctgagcaacttggactccacatctacagaagacaagtgtagataattcgtcaaatttgtatgtaaaacaagttcaaaacgagaagatagacacgacagcaaataaataggcaccttcgtcgtcgtatagtacttggttgatgataatgttatgcgtgtcaatctcaaacttggcgagttcctgaacaagtctctctgtttcatagagagacaagaactcggggatgcagacacaaacgaacgtagtcatatcctacgtaatggagccaaatgtgtcaatttcttatcttaaaatgcagagtttgttagatatgtatcagaattttcactaatgcaaatgaatgctgtcaaaccgtatgctacagaacaatgtgaagaatctaaaactaaacttcacgaacagagttaagaaaacagtcaatgagtactgaaaatagcaaagaacttaaacaattgaaaaaatgttaccgggtctttgaattgccgatttacttgctcaatcacatctttcaagccctcaagtcttcccagcaaagcatcctctccgaactcatcctccatgccaaacatacggctcatctgcattaccaatcagttccatgaaaaatcagccaaagaagaaaccaaagagcaatatctgttgccaagcaaactgaatttgacaagcttaaagacatgcctgagtcatcaagccaccaaatctactcttcaatgacatcaacttcgaaagtcccttttctagtgtggccggaaactgtaacaggcggagagtatgtccagtaggagcagtgtcaaacacaatagtagcataatccattgtttgcaccaacctaaggaaacataaacatatcaaaatttgactgtgataatacatggataaaggcagatgattactagaagaactaaatggctatttacttcaacatctcagcaaaactcatagcctcatcgattccaggaatcgcatttgccaaatcagagaataaaccatccatcccgtctgtaccagccatgtcatcagtttcaacggtaggatctacctcctgagaaaagcaaacaagattcactcactatcaagagggaaggagtgtgaatcgtaaccatttgcttatagtatgtgtatatatatacatatacacacagacacaactaagagcttcaagcttagaagagtagccataaagtcatcatcaagcctgtctattagaggcgacccagaaccacaaaaaacaacttttttttttttttttgaatttggcataactagccatgaattttaactacaatagacaaaaattcgatttgatttggggacatcaaatcttcttcacaatccccttccgtatcaagaatacaaattggcgtccaaattccaaacctaatccccaaaatcagagtgggcatatgataagaaaggcacaaatcaaccgtatttatgcaagtactaaatctgacttcaaaatcaaaattgatccatcaatctgcggtttgaaattcgtgaatcagagaaccctaattcccaatgagattaaaatccaggagcgaaactaccaaattccctctaaaatctagcacgatctagaacaaaatcggagaaagcttaccatggcaaagagattagagaaaccttgaaccaaagtgggagatttagtgaagcgttgctgaaaggcatcactaagattgtgagcaggatcggtggagatgatgagaacggaggatcgaacactggcgagacaaattgcgagaattgaactgcatgtcgtcttcccaacacctcctttacctccgacgaaaacccatttaagagactcttggtccagaatgttctgtactgtcgcctccggcaaatccgccgccattgctaattccttgctcgtctctcttccactagtctcaatctaaagagctccttgttagatatttggcgtacggaagagtttaactgcggcgagagacttttaacgccgcccggttcaatattttggttctcggttttgggatatcacagcagtcttggtttgatttttttggttatcgtttttcacttgttcaatttttctttttttgttaaaaatttaaatttggtgtgtttaagttcataaacgctaaataagcccatacaaaagcccacatagatgaagccattacgacagcgtattgtgagttacgattgaaaacccctctctactcggttaaacccgtcgccggcatattgatcttcgccggaggat

SEQ ID NO: 10831 - DNA, 3000 bp, Unknown
  misc_feature (1)..( 3000): cDNA_ID_3038098_gDNA_ID_2214451_Annot_ID_182565 3000 nt of promoter + ATG
acacgtatctcaactacagggatcttgatatcgggatcaacagccatggcccaaacagttacagagaagctgaggtttacgggagaaagtatttcggagagaattttgatcggttggtcaaagtcaaaacagccgtggatccagaaaactttttcagagatgaacaaagtatacctaccttgcctaccaagccatcctcgagttaggtttggtagcaagagtggggagatcttctcttgctttttttttctttggcaaatgaccaaaatagttttaaatcccaggctgccttgggatcatttttttcctagctaatttattcagaacaaccaagtcagaaaatttgactgcacaaattgcaagaaatacaagaactggcatgcatctatataaaacaagattatacacaacacaacacgtaattttccgtgtttagttttgaataagtctagtcttacaattgcaatttgattcggttcgttctaattaagttggatctaagtatcagcaaattttttggcaatgaaatctgtatacattaaagttcagaacatttaggagtaatatatacgtacaaaatgcaaataagaaaatcagtgctgttttggcggacagaaaaaacaatacgcactgcaagaaagaggcttcaagcatgatgaaaaaagcccacaatgttagaggggttgagactggctagatgaaaactccctaagaagtaattcaacttcttcaacaacaccaagcttcttaaaccactgagccaacacagcagaagcttctttccctaacattatagagtctttctcaagctctaccaagaatcctaacgcttcatttagcttttcttccttctcatatgcagccaatacaagagccacacacttatcagtagctttgattcccgcttttctcatattctcaaacgccaaacgagcattctggctctgacccgagacactgtatgcgtttatgagcagtccacatagctttacatcaggagtaatacctgcaatttgaactgcatcaaaaacccgcttagctccttccgcgtctccgcccatagagtaatctctcaacaatgccttgtaaacctctcttcccgcacatatctcttgggagtccatttctctaagtagagactctcctttctcggggacaccagctctgatgtaggccataatcattgaaccataggatcggtagtctagtggttccccaagcaatttgatctcgttgaaagtttcttcagccaatttatgacagcctgccttgctgtacaactgaaccattgcagtaagggtcacctgatcaataagaaagcctcgatttttcatggaaagaagagttctttcagcgtcttctacttggtttagcttcccataataatggatgatcttggtataatcacgggcattcgcttcaaaggaatcttggagcagcgaaaattcagccacctaaggagatgcaggtaacaagactgaatgatttaaacgtaatcaagaaggtgacaatagataaactcggatagcaaattagcatgagttagatacatatgaaagatcaatcgagcatggaaggaggaaagcaagtaccttgatataaaacggagagtcaagattcttcaactctttaagaatagaaagccagtcagctctaatggggttcatcctcctaagccaagcacccaacaaatcgcaaaagcttcccttttcgggggagaagcaaataatttgccgcataagcgcttgacaacgttttgacatcttaataggaatccgagtgattgcctcgtcttgttcttctgtcagattcagaccaacatcagcccaattaaaactacggctttgctctgcatcttccttctccacaacttcgccaatggccagactcgcattacatttgcaactacagagcctattaagatgggattctacaagtaatgggtttcgtctaaacatgcgatggtaaagcctatgccttgcaataactaatggacatttcaagccgaagctcaacactgcgctgcagctataaattcccattgtatacctcaagaactaaaagagaaaaacctaaatttggcggccgtatgatttcacatgaacctaatctctagaaaacaagtcatgaattcaaaggcctaattgaggatcatacaagtacagaattgagcttctctgatgattacttacaaaaagcagagctcaggagaaactggagataaaggagatgagccaagcaaagttcatagacagagctggtgtggatagattagaatttagagcggtggagatgactctgttagctttctttgctctgctctacttctgtctggcggattagacaacactagagaccacttcactatgggccttttattaatattgggcctccgttacaattatggcccattattccgcaaatgaaattcaatggcgataatgaaattcaaaaactattgttgaaggtgtttttctctttactcgcaaaacaaatttacatatttgttgggaattaatcatgggtgtttttcgatatcactactattaccaaaagcaatttatttaggataaataagctagaaagctcatgaccgggggagtccaccgggacggtcaacagatacagaattcgtcattttgaaaataccaactatgccctcaaatccggagacattaccgccactattcaaggatatataagtcatttcatatagaggagaggacggcgatccaaatctggttctctcggatttttattatattggttacttcactcaagctcaccatttttttttttgtctcgtctgcttcatcttcgtagatgtctgtaattcactgactccctgataagaatactgctttgattggatcgcagaggaggaggcgttgctcttgttgttgttatccgttctctctgggctacatagatagatactcactctcctcttatagatctaaattggtgattcgttgaagtcacggctaccaatctggaatg

SEQ ID NO: 10832 - DNA, 3000 bp, Unknown
  misc_feature (1)..( 3000): cDNA_ID_3038094_gDNA_ID_2214451_Annot_ID_182566 3000 nt of promoter + ATG
cattttctactggatgacttccttcttcaagatttctatcaacaatttccagcatttttgccgaataaggatctggaagacgcaactgcttattcacccagtctcccatagaccttaaaacagcaactaagcatttcatggcttcaagcttcatggctgcttcctgaggtggcaacaaggtagtaactgtaccaggaggcactccttgagcagtcttaaggagaccattgaccatcctaaaaacaaggtcaagaaaaccaatacagaaatgaatgctacttcaaatagttcgcactagttaatgatcgcagctctgataccacaaaataaatagattcagggcgtaaagataagccacaacaagatattagatcatacctctcaaatatattggatgagttgacatcgcaatcatagttgatgaagatatctaccaaaatctgtgaatcaacgcagagcttgtccaagaaccgaagcactatcatcttctgttggaaatcaggttgagcaacattctctaatactcttagaacaatcatagggaagaacaccccaatctctgccttcagcccagcacgaaacctcgaaaccaagctaagtaaaatcgagcaggaaagctggaaaatgatcataagatttgaagcactgttcttcagcaaggagagacacagatactgcttgatggcgcctaagaacctgttccataatgagttgatgccaaattttcagaagaaacaccaaaagctaaattacattctgtccaagcaactatcaagcagaatgttgaaagctgagggaaaaaagactgaatctagagatatgatagtttaatctacctaacgtgggttataataatgcaagaagataaacaaaacaaacctatcgctggttctaaagacagcaccggcattctcaagcagaatcttcaataactcgagagccacaatcttccctctcatcaactctggatcttccttgggaggcgtcttcatggacagcttgcaaagtgccctgaaaaccaagaaggcgtctcttctcagcttattcccaatctgaacttcagaatcatcgtctttctccacttctccatcggccagctctccttttcttccctcgagggccgacttatacatactgatctcccagtacttggcatccaacatatccttatcagtagaatccaacaaatcagtaggattggcagtgccaggcaatgaagtctcgaaggccccgtcatggccgccgaatgtgcccttggcgttagctgaattgaagactccgtcaatgtcctgcataatcttggtaatgaaaccttgaacagactgcgtcgtagatgggtctgattcggatttgtccatgggctccatcagctcggccacgacgatgggctgaatggggacggtggatgaatctgcctccattcttctgaacacgataacagacatctgcacgagcgaggctttagcagtcgcctgattaaccacgtttctgcttcccaagtagataccataacaagtcctgacgatctgtagcaaagaatctccatggatcctcagggaaattgaagttaccgcagtcaagagcgtcttcagcacgagcaactcgagcccttcgtcgtctagctcgtgacatttgcagatggtttcaatgagcttggaaaggagtagcgcctcaggtccgccggtgggatcagcctcaccgcgaacgtagccatgagcaataagcttctggatgcaatcaacggcgggatcgacaatcttgagaacgccggtggaggaggcgttgatgagagggctgaggatgatctcggactcggcgagagagtattcggcggctcctccgtcgtgaagtggtccaggaatggaggatccagattcagagtcggcaacaggagaggaattttcaggggatctaaggcgttcgatgacggatttgcactcgtgggcgagcttggagtgcttacgccaggaggcgttcttaatgaccttgtccaaagcagggataacaactcgacctaagcgggaatcgacttccgtagaagccattccagattggtagccgtgacttcaacgaatcaccaatttagatctataagaggagagtgagtatctatctatgtagcccagagagaacggataacaacaacaagagcaacgcctcctcctctgcgatccaatcaaagcagtattcttatcagggagtcagtgaattacagacatctacgaagatgaagcagacgagacaaaaaaaaaaatggtgagcttgagtgaagtaaccaatataataaaaatccgagagaaccagatttggatcgccgtcctctcctctatatgaaatgacttatatatccttgaatagtggcggtaatgtctccggatttgagggcatagttggtattttcaaaatgacgaattctgtatctgttgaccgtcccggtggactcccccggtcatgagctttctagcttatttatcctaaataaattgcttttggtaatagtagtgatatcgaaaaacacccatgattaattcccaacaaatatgtaaatttgttttgcgagtaaagagaaaaacaccttcaacaatagtttttgaatttcattatcgccattgaatttcatttgcggaataatgggccataattgtaacggaggcccaatattaataaaaggcccatagtgaagtggtctctagtgttgtctaatccgccagacagaagtagagcagagcaaagaaagctaacagagtcatctccaccgctctaaattctaatctatccacaccagctctgtctatgaactttgcttggctcatctcctttatctccagtttctcctgagctctgctttttgtaagtaatcatcagagaagctcaattctgtacttgtatgatcctcaattaggcctttgaattcatgacttgttttctagagattaggttcatgtgaaatcatacggccgccaaatttaggtttttctcttttagttcttgaggtataca

SEQ ID NO: 10833 - DNA, 3 bp, Unknown
  misc_feature (1)..( 3): cDNA_ID_3445881_gDNA_ID_2214452_Annot_ID_182576 3000 nt of promoter + ATG
gaa

SEQ ID NO: 10834 - DNA, 3000 bp, Unknown
  misc_feature (1)..( 3000): cDNA_ID_3038211_gDNA_ID_2214452_Annot_ID_182579 3000 nt of promoter + ATG
cctttttgtgagaacgttcattagagaacatcagtgatttttcaaggatagttggggatgggtgtattattttgtaacaacaaacaagaaagagcatctctaatggtgaaatattcaccaagtgtctcttatcaatattataatattatttaaatataattttgttatttaactaaattttaagtgataaataaaaatgaacaaatcatattaagacattatactaagatatgtggtatttgggattttaaataagattttatatactttaaaataagaaccattcttattctcttgccttttctattattatttttgattaattaatattaaaaactcaccattgaagatgctctaaaacatagtcaacttggttttaaaaaaagaaactaaaaaaaaagataaatgtttatctgttgttgcttgttgtttgatacaacatgtctcctctgatatgagttacttttaatatgcaggaacaagaggattggtagaacgttatatgaaacaagaggtatgaatattatattttcacttttctcactcactacttttctcgtatttcatttattgttttttttgtatgactagaaagtcggaattccaaattaataacatggttttttcaaatgatttgactataccgtaaagcaactcaagtttcaaccatttgttcgaacttgttctcaaaactagtttcaccccgaaaaataatggtttgtaaagatatgggcagagaaagaaaattgaacttggaaagaaattggattagacatcacttaaaaatagtaaatttgtgctaaaagaaatttactgaaaacattgcttaactttcttatttacataacatcctagcattcttcaactaatgataactatccctttatagagaaagaaaataggcaacattatcacaacattgacataacctcatagggtcacggcttcactgctttcacggcttcaaatggattttaaagcctttgtagtattttttttgccaatcagacttttttcactttattttttttggaagtttttaaagcttttttttttctttttcctttatttttctttttgaaagtcacgtaaatgaggcttttaaaacaaattaaaagcttttcgttttcttctctaaacataattaaaagttctctacaaattacatatttcttttttcaaaacgtttttgattaataattattatcaagttactaatttttttttaagatccatttcactaataataattttattttttatcatcaacactaataaagttagatgtcatttcattatcattaataaatttgttgattttatgataagtcaaaaaaatcattcaaaacagttttgagaaaaaaatttagccataagaatcattcaagatgagtattttaattattaatgtgtttggatattaagtgtttggatattaagtgcatgaaacaataaatataaataatgcaatgtttggtcttttaaaaatgaatgaataatatatatttttaaaaatcagtaataaagttttattgttactaataaaaaataacagtcacagcttctacaactttgttttaccaatctgattttaacagccaaagtctttacagctaaattctttgtacctcaaatttttaaagtcaaaccttctaaagccaaaaataacggtcgttaccaatctgttaaaaaaatttaccttctgaattagcataaactgatttcggtataccatgtttcaatttcttctgactgaaaatagaagagatgatattgttattacacatttcacgctgaagagatactaaaaacagttagaaaggcaaaaagagttatgttcgatcgactaattttaaattatgcaagattgggcccaatacaggctagaatttcggtccataattttccaagacatcaagaaactggttcacaagatttgttggcccatttttaattatctactatctttagcctctattatccttgactgaggtatgaagttgcaacataacgatttcgaaacttcttaaaacttttctcataacgcaagctagaaaaggttttttaaaaagtcccccatgtttttagtttcatgcattacatcacatattcacatgtatgtggagagatagataaccaaattgttagataactgcatgttatttaaaattttatgtgttcttttagaaaaagagcaccattttatattttttgcaaattaatcaaaaactttacaacttcttagctattttcataaatttgcatggtcattcaatggtatttactaataataattaaatatgtctgaacgaacatatttttttttgacagttactacagctatttcatattttatcctttttatacaaaaatcacttcactttctaatttaccttgcagaaaatttactacagtacatactaataattttaacaaattttcttaaataaaacatcactacacttacactgattcttgtttttctaatctcattagtaattactcctcattagtctgaatacggttatatatttttgagcacaaatacttttgcccaataaaataaaataaaatggtaagatatttcccaacgcatattttatacaagtgtgtgacccacaacaagacacactacagtgtaaatccaacggctgagatttctcaaattaccatcaaagcttttagggtttggtgaaaccttccatatataaacactgaaacctccaagttgtctttcctctttgcagttttttttcatttgagcttctctctgataaggtcacttcctctgacccttttatctaagctcaacgctgcaactctcgccgtcggttacttccccattttccttccttcttccgattcaaagactcaatttttattctccggcgttgaggattcatctcctaaaaatctctgctttatcttttgatttgagctgatttggagaggagaagaagatagatagataggtaattcggattgatatctcgaaaaatg

SEQ ID NO: 10835 - DNA, 3000 bp, Unknown
  misc_feature (1)..( 3000): cDNA_ID_3038177_gDNA_ID_2214452_Annot_ID_182590 3000 nt of promoter + ATG
ggtacattgggtcggatctcaatgggccgggttcggcttgggctctttactggcctgcccattccaagtcgggagttgagatatcttctgagcgaaggttcggagccaatatctctttagagcggaggagaccgcgtgaggctggtttcacagagcagcgtccaccttccgttctcgacggtggaaggataacgggcccgttgtcttccgagcccactatgacccattaggccgactccaactgagccatcacttttttttggatcatcagggctacaaggtacacaatttacttactcttaagaggaaaaaatctataactcttgtatttacatattcgttttttcagcttggaagtcggaactactaggttatttggatatgaaatcagttaaagactcattgatgtactacgccttcaatacattgttaataatgctattagttttcacatatattggtggctcatttgtacgacaatcataagagagcttcaaaacagaggagaagtgggagaagagataagatcaggtaccaattttctttcaattgttgtttttaagattgaaagttttgcttataagggatcaatggttgctagaatctgttacataaacattgaactatcacgcatacgaatcgttaagtaacttgacttatgttatgtctttgagtgattcctttttataatttacatcaatggcagattcggaggatgatgactagggtttgctagaggtcatggtgaaaaatggttttcagatacctcagaattaatgacactttaagcattgctattactcagatatgtcttctcttttgctctaggttaatgagtaatatatagcaaagaaatctatttttattgtaaatgaaaattaaaccccttttgtatgggtaatgggttaatgtaatttagttgagagtccctgaaaaagaagattgtcttctgtgtgcgtgtgtgtgtttaaactcttttgtactttgagaagaagattaaccaaagtctgagtggattgatcaaaaaccatcaaaccacaataaaaaatcgattaaaccaaattgttgcttgagttgagagttacttttatagtgtctcacatatggcaaatctgaaaatggaaaaaaaaaaaaaaaaacaaagaaacgcgccaggtaggggtcgaacctacgaccttctgcttaggaaacagacgctctatccactgagctacaggcgcttttttgaacaatagttattgttgataatatttaatcgtatgcgactttaggcgcagttgagaaaataaagacataatgtgtgtcacacattcttttacactgtaaccaaattagtacaaagaaacgtattctgtagacaaaaaaaatggcgtggtgcgatattcttgtagtttttagtttgaccgtatcttacaagttcatgtagttttagactttaaaattaaggtaataataatttcattagttaaataacagcctagaaaaagaagataatcaaaaaacaaaaagaagaaaagaatcttctattagattttgggttggctgattttcgagtcataaattatttcgattctcagctttcacccccggacttttgggcccttaaatttccaccatcaattttcatattcctcaaaattacatcatctactttcgaattcatgcttaaacatacatttccaattgaaccattcatttaaccgggattaaccacaaatccgcgtttactgtaccgcgattgtgattaacccgactaatacccagacccgttaagaaaacgacgtcgttttcatttcgtttaactcatcaaaaagagaaagaaaacgacgtcgttttcattcttcttctttaactctcaaatcgatttggtagtcctcttcttttgactttcatctctgtctccatcgtcttctagattgacgtctccatcagacgctatgtcaccatcgtcttctctattctcctctccatcagaagctctgtctccatctatcccgacgtcgtctccctcgattctggtggcttcgtcctcctcgactccgctatcaccactatcacttccatcgtcggcttcaatgtcactctctggaggttcgaaatcggggtcatctggatcgctttggtaaatcaatccttcctcccaccaattcttcatttctccctattcgaaacccaaatcgagacccaaaaattcgaaccgaagaagaaaaccccaaatctccttttgtctttctctctcaagaaccctaatttcacagtgtcgagattaaagaagaacgactaaatcgatttgagagttaaagaagaagaatgaaaacgacgtcgttttctttctctttttgatgagttaaacgaaatgaaacgacgtcgttttcttaacgggtctgggtattagtcgggttaatcgcaatcgcggtacagtaaacgcggatttgtggttaatcccggttaaatgaatggttcaattggaaatgtatgtttaagcatgaatccgaaagtagatgatgtaattttgggaatatgaaagttgatggtggaaatttaagggcccaaaagtccgggggtgaaagctgagaatcgaaatagtttatggctcgaaaatcagccaacccttagattttatgtcgtaataaaagcattatttgaagaaaaaaatcatatcttttggtttttaaaccccttatatagttattagtatgcttctaaggtaagaattgattttttcctatccatcctagagtaagagttgatttcttgttcaatagctagccgttccgttaaaaacaatggaatgaccggtttgggtaaggactaaccgggtttggcaaaccaaatgccgtaattattgcagacgtgtcacaatggaacactcagtggcttcttgattatatttttcgagtttcgaggatcaaacaattcaatcatcatcttctacctctgctccaatttctctgaaaacaagaaaaccttaatcaatcgaaatctcagtgtaactaatca

SEQ ID NO: 10836 - DNA, 3000 bp, Unknown
  misc_feature (1)..( 3000): cDNA_ID_3038163_gDNA_ID_2214452_Annot_ID_182594 3000 nt of promoter + ATG
gttgcatttgttcacactcttcatctgaaatcatctccgagcatcctccgttcgtcagggtttacaaagacggtcgtatcgaacgtctttccggcaccgaaacagtcccggcttctctaaacccacgaaacgacgtcgtttcaaaagacgttgtctactcaccggggcataacctctccgttcgtctctttctccctcacaaatcaacacaactcgccgccggtaacaaactccctctacttatctacttccacggcggagcttggataaacgaatcccctttctccccaatctaccacaatttcctcacggaggtagttaaatccgctaactgcctcgccgtctcggttcaataccgccgtgcaccggaagatccggttccggctgcctatgaagatacatggtctgctattcaatggattttctcacattcctgtggatctggtgaagaagattggattaacaaatacgctgatttcgaaagagtttttctcgccggagatagtgccggtggtaatatatctcatcacatggctatgagagctggtaaagagaagcttaagcctagaatcaaagggactgtgattgtgcatccagcgatttgggggaaagatccggtcgatgagcacgatgtgcaagatagagagatcagagacggagttgcagaagtttgggagaaaattgtgagtccgaatagtgttgatggagcggatgatccgtggtttaatgtggttggatccgggtcgaatttttccgggatgggatgtgacaaggttttggttgaggtggctgggaaagatgtgttttggcggcaaggattagcttacgcggcgaagctaaagaagagtgggtggaaaggagaggtggaggtgattgaggaagaagatgaagagcattgcttccatctcttaaatccaagttctgaaaatgctcccagcttcatgaagagatttgtggagtttatcactggttaacattgttctttgtgtgacacgaataaattttgatgtaacctttgaatttgatttggttctctatataattatggttaaggaattaaatacaggaatgactcggttgtgactatatgagatttgtggtctaatattttattttattttttgttgctgacaaatagtaacacaatttagtttcaaatacgttttatgcatatacatgtatcataacaaacctcaaattgtcattgaattgggttcaaaggaatagatgtacagtttgacaaaaaaaaaaagaaaaggaatagatgtacaatgttattgatctaatttgtggctattagttattacaggctcagaatcaagaaggtaacgactggtgcatgcatatgtatacaagtactcacaagatggattgaggtcgggttattgtctggatacatttgtaataagagtttttggttatacaccatcgggtccacctctagtctgattaatatccaaatatggaaagcaatattggttaagcaacttgtgattttatcattttgctaaaaataactaatgatttgttagcaaaagtaacttatgatcatatcaaatttaaccaaaccagttcatatcaagctgtgtacttgtcagggtttgattggatgaatcagtgtatactcatacatatagtaaactcacatacatattactctgtttctgttcttcactctcttttccaaagaagatggaatctgatctaaccacagagcatcatctaccattcatccgaattcataagaacggccgagtcgagcggcttagcggcaacgacatcaaaccaacgtctttaaacccacaaaacgatgtcgtttcgaaagacgtcatgtactcatcggaccacaacctctccgtccgtatgtttctccccaacaaatctagaaaactcgacaccgccggtaacaaaatacctctactcatctactttcacggcggagcttacatcatacaatctcctttctctccggtttaccataactacctcacggaggttgttataaccgctaactgcctagccgtgtcggttcagtaccgtcttgcgccagagcatccggttccggcggcttacgacgattcatggtctgcgattcagtggatcttttctcattctgatgattggattaatgaatacgctgatttcgacagagtttttatcgccggagatagtgccggagccaatatatcgcatcacatgggaataagagctggtaaggagaagcttagccctacaatcaaagggattgttatggtgcatccaggtttttgggggaaagaaccgatcgacgaacacgatgtacaagacggagaagtcagaaacaagatcgcatatatttgggaaaatatcgttagcccgaatagtgttgatggagtgaatgatccgtggtttaatgttgttggatccggatcggatgtttccgagatgggatgtgaaaaggttttggttgcggttgccggaaaagatgtgttttggcggcaaggattggcttatgcggcgaagctggagaagagtcagtggaaaggaagtgttgaggtgattgaggaagaagaggaaggacactgcttccatctccataaccataattctcaaaatgcttcgaaattgatgcagaagtttttggagtttatcataagttgaatcttgatgctcaagtatggtattagatgacataatccttttatataatcatattgttaactttaataataatttatgattttaatcgtcaaatttcggagagttgaacatacaaataacttatgattttaatctctaattgctgtgaatttgtgtatcaaactcctgtatattcgataaatcattcgtataagattgttcggccatatcaataaccggttaggtccatacacatagatttcgaaatttgcacctccggtttaaattttcgaaccgaaccgctttaaaactcctcgcggtcggattaaactattcgcatccttaagcacagtctttgccggagaaaatattccggtagcc

SEQ ID NO: 10837 - DNA, 3000 bp, Unknown
  misc_feature (1)..( 3000): cDNA_ID_3038195_gDNA_ID_2214452_Annot_ID_182585 3000 nt of promoter + ATG
aattaattaatttcgtctcagataacaaaagctatattaagatttaggagttatcaatacactgaactaagatatatactatatgatatattgccaatgaatgtagccgaaactaaaaatgacagtagagttacgtgaatgacaagtctacaatattggatacatatgccaacttattactgtatgaatatattaaagataaatgcatacctaaagcaaatatcacaagaaagatgatggggacgacaagtgaagaagttgccttggccatttttttttctttcttttcttttctcttaaatttagttactcgtatactgaatagtgaatatagataaacgtgaaaaattaagagactacagaaaggagatttatagaggtgtgtcatgcattgcacatacggatttatagaaaggagatctgtttgattttataaatcttttatgtatagaagagtatatgatactcttacttgtaaatatattatagaacgtatatatatatgataaattaattcgtattatagtaaaatatatatttcattttatatatctttttttttatagaaaagtatatgaatcttttacttgtaaacatatttatagaaaagaatatataatatatatatatatatatatttcatatttgattaaaattttatattattatgataaaataaaataatataaatataatttataataaaaaccatataaaagtttacacaattattcaaaacaaataaatttatcagttaaatgcttattatttcatgcatttggttcataaaaaaccaacatcaagtaatatgacaaaattacaaaaacaatttatgtttcgaattacttcaaaacgttcacattaatagtattattacaatacttagtttgtatcttgccattgttgatgaattgactctatgattttgatggagaaaaatattaggattttagtttatggataaactttttttgaaaaaaaacacaacccgaatctcaaaaatagttttgtcaaaaatcttgagaaaaacgatgagattcgggttcagattttttcaaaaatagttttattcgtgaaagatttaaattcgagcggagattgttccgcccactttaaaaaatattttattttctctaaataattttaaaataaaataattataataaaaatgaaaatttgaaatttttagacaccataaactaatatgttaataaaattattttatccaaaattagaaaattaatgtcatataatctaaaaaattaatagttaattgagatgataagggtaaaattaaaattttatttttgttgtcagatcgtgagtatgaaaataacaatatttaattgtttgaatatttaaattgcacagttttattatttcatgtatttttcatgtatttttcttcttagaaaaaacaattgggtattaaacgtttaaataaaaattagttaaggtttttttttggatttttacccattagaaaactcttccttttcatttatttttacttctagtagtagaggtaatttttcttttttgattaacaaagtcgtgaggtttgttagtagagactagaaagttgttgaatgggtaattgatatgttttgctccacaagaaagcggaagtttttaaaaaaaaagaaacaaaattagcattacaataccaatgattacatatgtaaacaatatttcccggaattagctcgtatgaatctaaattaatattgacaaaaaaaaaaataccaatgatcacatatatgacaaaaagaaagaatgaaggagaactctatcatggtttgatgctcattctatacgctggcccaacggtgacacgaaagtagacaattcttttaaataagttatcaaattataaagaagtagaaatcatcaacataccatttaccaagtgaggagagggcaaaatttccaaatttggaagtgaattgtattaaactcgacgcaaatcttcttaaaagtcttcttcttttgggttgcttggatataatgattattgcttgatgtcaaaattcgcacaccattgggatgatgggacccaaaaagaatcactacccacttctgccgttgtttcaacatcattcatgtataataatcacagtttatcaagcacacaaaatatcttacatgagtaacaacaatatgatattaaaattaatttggcacataatttaatcatttggtgttccgaccgacatgatactatactataattttattcccatttcatttcttatttttttatatgcatagaaaattatttaaatgcaaaataaaattttaaccaaaaacctctagtctagtagtttgttcgattgtatatagagtattttgtcatgtgcatagattaccaccatctacgaacattgttgtggtttgattttctctttgatcgcggtaaacaccaacaatatatgactagacattcataaacttcagatgagttaggatttgattttttagaattttggttttgaaaaaaaattagccaactaaaaatcaaacaaaaatttactgcggttcataagtaaaaaaaaaatcaatttcctttttagtaattttcttggagtcgaattgaagtaaaattgtgcagtttacaacacagaattcgatatttaaaaaatttctgttggcgaattaaaattgaaatactataattatccaaactttcttcggttagttaattaagatcagaaataatgtctaaatggcaaggttaatatggatatttgtatcagatctaatcccatttttaaagaaaacaaacaaggcaaaggacacaatcagcgactaaagctctcacacgttacagcttcttattggttaaaaatgaacgtggttgtcagctaaattaagtgactatgtttaataatcattaaaacgggatatttattagtttattaccaaaaaatgaaagcaaaatatctaaacaataaataaaataaaaaaccataagaggaaaaagcttaaccccttaaaatg

SEQ ID NO: 10838 - DNA, 3000 bp, Unknown
  misc_feature (1)..( 3000): cDNA_ID_3038207_gDNA_ID_2214452_Annot_ID_182582 3000 nt of promoter + ATG
aaaagttttaagaagtttcgaaatcgttatgttgcaacttcatacctcagtcaaggataatagaggctaaagatagtagataattaaaaatgggccaacaaatcttgtgaaccagtttcttgatgtcttggaaaattatggaccgaaattctagcctgtattgggcccaatcttgcataatttaaaattagtcgatcgaacataactctttttgcctttctaactgtttttagtatctcttcagcgtgaaatgtgtaataacaatatcatctcttctattttcagtcagaagaaattgaaacatggtataccgaaatcagtttatgctaattcagaaggtaaatttttttaacagattggtaacgaccgttatttttggctttagaaggtttgactttaaaaatttgaggtacaaagaatttagctgtaaagactttggctgttaaaatcagattggtaaaacaaagttgtagaagctgtgactgttattttttattagtaacaataaaactttattactgatttttaaaaatatatattattcattcatttttaaaagaccaaacattgcattatttatatttattgtttcatgcacttaatatccaaacacttaatatccaaacacattaataattaaaatactcatcttgaatgattcttatggctaaatttttttctcaaaactgttttgaatgatttttttgacttatcataaaatcaacaaatttattaatgataatgaaatgacatctaactttattagtgttgatgataaaaaataaaattattattagtgaaatggatcttaaaaaaaaattagtaacttgataataattattaatcaaaaacgttttgaaaaaagaaatatgtaatttgtagagaacttttaattatgtttagagaagaaaacgaaaagcttttaatttgttttaaaagcctcatttacgtgactttcaaaaagaaaaataaaggaaaaagaaaaaaaaaagctttaaaaacttccaaaaaaaataaagtgaaaaaagtctgattggcaaaaaaaatactacaaaggctttaaaatccatttgaagccgtgaaagcagtgaagccgtgaccctatgaggttatgtcaatgttgtgataatgttgcctattttctttctctataaagggatagttatcattagttgaagaatgctaggatgttatgtaaataagaaagttaagcaatgttttcagtaaatttcttttagcacaaatttactatttttaagtgatgtctaatccaatttctttccaagttcaattttctttctctgcccatatctttacaaaccattatttttcggggtgaaactagttttgagaacaagttcgaacaaatggttgaaacttgagttgctttacggtatagtcaaatcatttgaaaaaaccatgttattaatttggaattccgactttctagtcatacaaaaaaaacaataaatgaaatacgagaaaagtagtgagtgagaaaagtgaaaatataatattcatacctcttgtttcatataacgttctaccaatcctcttgttcctgcatattaaaagtaactcatatcagaggagacatgttgtatcaaacaacaagcaacaacagataaacatttatctttttttttagtttctttttttaaaaccaagttgactatgttttagagcatcttcaatggtgagtttttaatattaattaatcaaaaataataatagaaaaggcaagagaataagaatggttcttattttaaagtatataaaatcttatttaaaatcccaaataccacatatcttagtataatgtcttaatatgatttgttcatttttatttatcacttaaaatttagttaaataacaaaattatatttaaataatattataatattgataagagacacttggtgaatatttcaccattagagatgctctttcttgtttgttgttacaaaataatacacccatccccaactatccttgaaaaatcactgatgttctctaatgaacgttctcacaaaaaggtaaatcatccgtaaatggccaaaaactccacactgataatcattattgataaacttttgctccgttcaattctcttttctaaatatgttatattatatattagtatttatttattaggaggttttgtcggcaacaaaaaaatagacaactctcgtaaataacaaaaataagttttcttatcaaatttagcacacaatcttcaaacttccaaaaataacatgaaattaatattaaaaagactaatataagcatttgattgataattcacacgatttgtgatttaaaatcataattaattttatatatttagataaaaataaattagttattatgtaaaattactaatgctaattttggaaatttgtgaagtttgtgttataattgtccataataaattttttcatgttattttaaagtatttctctataaaaagtaaaggttgggccaggtaaatgtacttattggactcaataaacaactcaaagatgattaaattcatatattttactatgaaatatgttttactataaaaaacagctcaaaatgctacatttcattattcctttctccatttcatttttaaaattcatactactcataaaagttcatagtatgactataagtttatgactagtttaactttcaactatctagctttcatatgattccctagttcaaagttatactactcataaatttagatactcatactatgaaatttttatatagcaaaaaaaaaattacatctcagtttgatatcaataactaaacatacctatgtaaaaacttacatagtctactacccaaaatatcaataattattgtagctcccactacccaaaagacaatgtccattgacttcacaagcttcttagtcttctctatttctatgctctaaaatctccttatatacatagtccccatacttatcctcaaaactcaccacaaaatctcatcaactca

SEQ ID NO: 10839 - DNA, 3000 bp, Unknown
  misc_feature (1)..( 3000): cDNA_ID_3038160_gDNA_ID_2214452_Annot_ID_182595 3000 nt of promoter + ATG
tttgagaaatgaagctatagtaataccaacccaggtaaataaaatgaaaacccttctatatattttgtgtcctttggcgtgtatttctcttcacccgtcttctacttactccacaattctattcttgcctttttgacaggtgaactatgtgggaaaagcgggaaatatatacagcagtggctacaaacttgatgggagttcatatgttatatcaaagcatattagtaacacatggttatgggatcgtgttcgtgtaagtggtggtgcatatggaggttcctgtgattttgattcacattcgggtaaactgtttttcttttccattttgattttgatctgacagagtcttccccaagttgcaaattctgcgtcagacctgacctttggattttctcttgcacaggagtattttcgttcttatcttaccgtgatcccaacctattaaagactctagacatatatgatggaactggggatttcttacgtggcctcgatgtcgatgaagacacccttaccaaagcaattattgggacaattggcgatgtcgattcataccaactccctgatgccaaaggttataccaggtatgatgtttatttatgggttcttctctggtctttgttggctttttttcaaggaatgtaatgaatttcaatctaatttcccatctctatcaacagtttgttgaggcatttacttaatgtaaccgacgaagagaggcaaataaggcgtgaagagatattatctacaaggttaacagcattctctcatttttgctttagcgtatatacaaatcaatttatacaactttttcactttccacataatggtatgccgcggatatcctgtggggatttatgaaatccttggggacaatgttgtgatctgagttttgtagtgttaggagtttaacgacttctttgaatattaccaaatagccagttgcaattcttcgacatagttattatcaaacagataagaaaagtaacttccattttatcctttttcagtttgaaggacttcaaggaattcgcagaggcaatagactctgttagtgataaaggcgttgcagtggccgtggcatcacaagaagacattgatgcagcaaacagagaacgctcaaattttttcgaggtgaagaaagcagctctctgagtctgagaccctcttagaaagtagcttgtcacaatgaggaatgactcttcttaggttcacggtacgacgcatcaaatctctaagctcgtacttatttgtgttttacttcactgtgttttgtatagttatatatgccaacatcatgacttatcacagttgaaatttagcatttttacctgaaaacacaggctttagctactgttgcatttgagttgttacttttttggacaatttttctttcgttttagcctttgctctttaagaactaagaatcctagttctatttatattccattatcgtatcaagataagctctcgaggattttcctgtaccttttaggttataaaaccagtttcgtttgattcacattttgttgaaaatgatgagtcaaaatagacattatattcatcattggctgggatcggatcgaacagtgcctgttcttgttaaaacaaatggctctcagtcatacaaaagatgcatctattattcatcatgtgtcgtgatcttgttattgtcatactatctaatgtgactactcatgcttcatttgtttttgtttgtgtttttgaagtaggtcgtaggtcttaaacatttccaagtgaaattgaaacgcttattcttttaggacattggcatcaagatctctatgttacttttataagtgaattagtctttaaagttactttttattaacattgattcataaagataacttttgtaaattagcccataaacaaagatacttgtattgatgaatcttcttcgtctcatccttttaccattatccttgaaaattctgattacatcattattatggatgaaaattaacgaagagtcttcttttttttcttgtgataaattttaaaattattgaagaagcagaatcggacaattgaagcctagattattttttatttattttttgcaaaatgaagcctagattctaatatttcatattttcgatattgtacatgtgtaactttaaaaaaaaaaaaaaaaaaatcccaagtaaatgcttgttagcacaattattatgtaacggtcaattattgctcattatttcactgccaaaaaataacgaaaatggtcccattttattagaaggaaataaacatgttgtatgtgtaaaattcttaacccatttttggacatgtacagattccatgtaaaagctggattttaagttggttttttgttgttgtcatttaataagtactatttaattgattgtatttatagttctgtctccatgtgaagctgctcataagaaagtgaatgctttagactctaatctatgtgcctagttatatccttaagaagttgatatttagagcttatgatagaaattatgaatcagcaaccatcagaattattttttttgttttgacaaatgtatttacgtgtaaaagaatataagtttaagaaatctatagtagaaagtagattaattaacaaaaattactgtcacaactcacatttctacagcttataggacgacgttttagttttgggttgctttaaaaggaagctaaaaacggcaaaaaagacgcgtcgtttagaatcccgacggcgtctacgctccgtaacgacgccgttacctgcttccccgtgaacgggactcagtttaaaggaccccactcaaaaccggcacaacaacggcccatccgctataggcaaggcccaataattaaatctcagccgttgaattaatcaacggctctagatccttcatcttcctctcccccaaatacccaaaacccttcctctgtttttattaaccagagaaaccccaactttttcataaactctctccagagaaaactataatgagcttgagagaa

SEQ ID NO: 10840 - DNA, 3000 bp, Unknown
  misc_feature (1)..( 3000): cDNA_ID_3038148_gDNA_ID_2214452_Annot_ID_182598 3000 nt of promoter + ATG
ggaagaggaagtagggcttgacaaaagatttggtttttctaaagagtttcacagtagagtagagttaggggaagaaattggacgaggacattttgggtacacttgctctgctaagttcaagaaaggagagctcaaaggtcaagtggttgctgtcaaaatcatcccaaaatcgaaggtaacaaaacttgagtttagtttcttgatcttgatgattgcatactctccattgtagtgttagctgatagaattgaatgtgttttgattcttttttggcagatgacaactgcaattgctatagaagatgtgagaagggaagtgaaaattctacaggctttatctggacataagaatctggtacaattctatgatgcatttgaggacaatgcaaacgtctacattgcaatggagtaagatcattattttatcataaccttaaccatttccttgtttgatgttgaatttagttaggttttagttatgaatttggtaaaaagaacctattgtttcataattggatttaagtagtttgaatttgcaggctatgtgaaggtggtgagcttcttgacagaatactagcaaggtgtgtgtctgtgtgctactaaagagttatcgatacttatggccagagattgttcttattttataaaaagattcatcgtttttttctacaggggagggaaatactcagagaatgacgcaaaaccagtgattatacaaattctgaatgtggtagctttctgtcatttccaaggagttgttcatcgagaccttaaaccagaggtgaggcacaattttgaactggaaagaagattatgttttacttttatgtgtagaatgttttctgatcgctgcttcatcatcagaacttcttgtacacttccaaggaggagaattctcagcttaaagcgatagactttggcttatcagactttgtcagaccaggttcatcatcacacattttactatgtcactatttctccagttctttttcttctggttagtaaactaaaaatggtattttgtgcccctttttttgaaagatgagagactaaacgatatagtgggaagtgcatactatgtagctcccgaagttctacacagatcatatacaacagaagcggatgtgtggagcatcggagtcatagcatacattctactatgtggtagccgtccgttttgggcaagaactgaatccggaatttttagagctgttcttaaagctgacccgagtttcgatgaacctccttggcccttcttgtcttctgacgctaaagactttgttaagcggttattgtttaaggatccccggcgaagaatgtcagcctcccaagccttgagtcagtcatttttaatttcacagctctttatagttttatgtctcctgtcttttggtagtcataaatcaccaaattcagttcctatttacttttttcagtgcatccttggatccgagcttataatacggacatgaatatccctttcgatatcttgatctttaggcagatgaaggcgtacttgcgatcttcttcattacgcaaagctgctttgagggtatgttttaggcattcttttaaagtgtcgaaaagagcattgaagattactttctcactattatgtgctttcttttcacaggcgctatcgaagacgttaatcaaggatgaaattctttacctgaaaactcaattttctcttctcgcaccaaacaaagatggcctaatcacaatggataccattagaatggtttgtgacactataacttcttttatattccttcctcttgagaaaaaaagagaaacaccgtagtaatctaatctgtattgcattttttgtttctgtttaaacaggcacttgcaagcaatgcaacagaagcaatgaaagaatctcggatcccagagtttcttgctttggtaaatgactgtgttctctcggattttgataaatgctttaacaatttggtgttaatgatccttcattgactggctttttacagctaaatggacttcaatacagaggaatggattttgaagagttttgtgcagctgctataaacgttcatcagcacgagtcgcttgattgttgggaacagagcattcgacatgcttatgagcttttcgacaagaatggaaaccgagctattgtcatcgaagaacttgcctctgtaagttaaagcatctgtcttcagcttaaatacaaaaatatcgaaaaacagatcctctaaaacgacatgcttttgaattgcaggaacttggtgttggaccatctataccggtacattcagttctacatgattggatcagacacactgatggaaagcttagcttcttcgggtttgttaaactgttacatggagtctctgttcgagcctcggggaaaactacccggtgaagataacgaaaacaaacatgacctaagcgaaatcgtaaaagaagatgtcaaaacctttactctaaatcttggattggtattggaaatgtaatagttggtcaaagactgtacaacaaatgaaaagtttcttacaagagcaattctaaaaaaaagattgttgtaataatatagtaaccacagatactttgatactctatgtgaagtcaagaaaatgaaaaagaaaattccaaaaagatttgatttttgtctctctttcttcccaatgattatggaatcagcgaaatcttggttatttccggtttgttactgtgctttaatttgtgagatctgagtcggtgtaaccagtgaaaaccggttctagtgatggaaataaattagaatttagaaaacaaaccaaaccgattttcttctcccccaattttatattttgcttctcctctcgagtttgggattcgagtttaaggaattagggtttctaatctctctctctttctctcgagatttttcttcacttagttcttgattctgattaaaagttgatcttatagttccggtaacttcgttttctgggtttaattttcgattcaatcttcatctccttgatccacagccatg

SEQ ID NO: 10841 - DNA, 3000 bp, Unknown
  misc_feature (1)..( 3000): cDNA_ID_3038152_gDNA_ID_2214452_Annot_ID_182597 3000 nt of promoter + ATG
gtgagagtcctcaagcattgcctcgaagatgtagactcaataagctctttgcctgatgtgatcctccaagaaaacctctccttaattccgaccaaattcgccataagaacatcggtcttgtccaaacgatggaggcatgtttggtccgaaacaccttccctcgacttcgatgattgctataaactagatgttgattttatagacaaaaccctagctctctacagggctcgcaagattatgacttttgacctctggatcaccaacggaatcaatcttccttacattgatggatggatcaagttcgccatgtcccgaaacgtggagaatctgtttctgagtttcgattttcggttatatgatgttcctgattacttgtacatcaattcctctgtcaagcaactcgtccttgggacagaatcttctgaattgaatcccagatgctctgtttcttggagttccctcacgaagctttctttatttctctgatgagtccattgctaagattctttctggttgtccgattatcgaaagcttaacattgcatttttgtgatcaactgatggttcttgatctcaccaaatcaccgagtttgaaaatattggaaatccatggtagcatttggggttcggggccaaagcacattgtggcaccgcatatccattctctcacattgaaaacctctcaattctttatctacttttgttgatatctcgtctttaaccgaagctaaagtagacatttgcttttgctcacttaaagagataaaggctaatttccttctcgacacggtgctcaagtgtctttacaagttgcagaatgtagacaagcttacctttggggcaaactttcttaaggtatgtttttcatgttttcaagtgtcatttttcttattgagatttgtttcaaaaaaaaactaattgtctgtactatttgtaagattttatctctggccgagggccgcggtcttccttttccgatgttcaaggctaaagctttgactctcgagacaacgatctctaaatacgttattcctggtatattaagagtgctacaaaattcacctgaactaaagaagctaaccctacacacaatggatcgcgaggctagaactatgtcctttcactttgagtttgtagaatctgagatattgacaatctgtttttacattaacgaaattcttttttgttctagtacagggtgagtatgatcccacgtacttgcgttgcatgaagctggatcattgctcgatctttgcaaagatttcccgtcggaatgtagagtcaaagcatgtggcttcgttcatggaacttatgattaaaaccacaaagaaattagagaagatggtcgtaaggttggaaagttatcttgatggaagaggtttcgaagaattgcttgagatggttccaatgctttctcaaaacaacaatgtctccattgtgcttagctcaaccaagccgagacagagtctttagtcttgaattttattggatattttacataatctcattttaaaacaatagtaggtaaaaacattcaggacatttcttggaaaaactttttttgtttgaattattttcttaaagttaattttaaacttaatatgaggaagaggtagttaagtaatattctagttattaatcctaatccatcaaatattaattcataaggtttgttttcaagtttcaacagatagtttgatatagcattaattatcgcttaacaatgaatgccattacaatatttttgataatcttattttgagtaagagtgtctctcaaattttatttgtttaatattctatctcattcttcaccttagttcctcaagacatgaaacttttcatagattttatgaaatatcaatgatattattttttacttaaaatctaacatttacctccggtgtaaatggttatccattagatgaatgttatgaaaataaattggaggaaaaaatagagatgaaaatgctatagagtggatgaaaacttttcttaaatttctcttctttgttcatcttattaaagatgaaagagattaatactaacagattttaaactttcaatccaaatggtaacattttagatgagtctttttttcatccagttttttcctcgtaatatgtctacaatttcaagaaagcttatcaaacgtttagaatttggcaataatataatttaataattattcctaaacttttcataacatttcttaaatgttgtttacagccaacaaagagtaccttttaaaggtgtcttatgttcatgtttcgggtagattgtatcccaacaaagcttcaaaattgatccgacaaagatggcatcaatttgtttctagccaactctccaaactatcacaaaaatttatagttttcacatctttttaccattgattccttttgcatttaaggatcattataacaccaatcacaaattgttttaatgaaaaaaacagtttatgtcacaagttcccctcttcatagaccacaatgcattgaaacatatggattcactagctaaaagtctcatcatcatatgtctctctattggtttcaatatccatttataatcccaagaaatttatttacccgatttgggaacttaaatcattcatcaactgtcaaaagttgatgtcaacccctaaaaatacggtcgaatcagaaccgtcggatctaaaagtacataacatggcttcacttacgtaactgggccccacgttcccaccacttctctctcagacctaaaagcgaaaccaaagaacaaaaaaaaaaaaaagccttaaaccctccgaatctacacaacacaacactactctcttctctctctctccgcctccatattatcctccaaagaaaccataaaccaaatctaatcctctctctctcggtctcctccattacctaaacaaaccctttccaacacatacatatcgagagagagagagaccgaagtttccgagtctcgtaaccagatcggatccgaaagttccatactttaaaaag

SEQ ID NO: 10842 - DNA, 3000 bp, Unknown; identical to SEQ ID NO: 5784
  misc_feature (1)..( 3000): cDNA_ID_3078455_gDNA_ID_2214452_Annot_ID_182603 3000 nt of promoter + ATG

SEQ ID NO: 10843 - DNA, 3000 bp, Unknown
  misc_feature (1)..( 3000): cDNA_ID_2992296_gDNA_ID_2214452_Annot_ID_182600 3000 nt of promoter + ATG
atcaccataaatctcaagaaaccaaactcttgatcacggttttgttattttggattcattactatatctattagtagtgaatgagaacaataattatagaaaggtttatagatatatatatagagaaaaagagagagtgaggatggttcaaattatttgcagagattatacttagccttgtttttgtaaacggctttttttggttgggtttttatttttcttgaggcattatccaatattcaagtaataattttgatgtttttgtttcataattttgtgtgtttagtttacaaaaagagcataataataggagggacataagcatgtgtttggtcatttattcagattcatagtagagatgctttgaattttttgttcataagctttgaaataatgttcttcaacgctcacctaatcattcggtcgttcgttcaattgactaaaaggtctttagctttgaccgacagatgcgtattacatatggtattattttaaattatgttttttttgggtgaatttataataacaaaaaaaatcaacaagcagaaaagtttgggcattttgggtatatatatatatatatgcctcatgctacccagccggcccacctcatgttttcagcccaatgatacatatgagcaagaaaaaccctgcatagcaaatgattttcatttgcacaaaaaaaaaaaaaaagcaaatgattttcaattttatttttgaaatgaatttgaaaggtttgagactatcgtgaatatatataaaattaaaaaacaacttaaatgaataatcttggaactggaaaacagattaataatgagtttttagtttgaaactacacaaaatagataccttggacttggacagtaaaatatctgatttttttacaaacttcatgacattttccgataattttaccaatattttgccacataattaaaaagacttgtctcaattcgtatcatcagtttttttaaacaactgcacatgtatatcgtttgctacaaattcatagtaatggttcacaaaaatttatagaaatttcagtacttttgttatagatataaattttgaaacgacaaaatgttttgctactttctaccgcaatactgttatctaattgtaattaattatttctaactttgacctaagttataactcaacgacgatactatagtacaagcttattactaaactacaaatttaaacaggggtgtgactctagctagctagtttataataaatgagacgcaatgatggatatgcagctacaagtgggttcataaaatattacatatccactttggttgtggaaactggaaagttatgtaaattttggccaaccaaaggaagcaaagactttgcttctcaactcttcgagtacacttccgagtaagcttccaacatgggcacgtagtggaatatgttgcgcaatcctcttgatgtcataaacataatggacaaaaataatttaaaatttacgtacacatgtttcttaaaactccaaattttatccggaaaaatgaatgttttgaaaagtctaagaacaagtgcgatattatgtgacaaacagaacaaatacaagaacaagagttagatcgtaagtataagttacattttccatcatttggttgtggtttggatgaaatgttctaccgagcataatggcagcgcttgtctaaaggtttcccccaaaatccaaatatcattttaaatcgagagggatcggagtatcatgatcacagttgaatactccttcttttatcaattagacctcgagtaaattataaattccaccatccataagaaggtgataccatctttgggatcgatattatcgacctttagaatccgtttcaagtttggcatatatgatatatagttaaattccaaagtatatttgcaacggaccatctaatgaaatcctcgtttatactatgaagaagttggaaacattacttaacatatgtatgtagacgagagcaataaatttcatcaaagcctacttttctattttggagacaaatttggctgataatctattaatttggcctttgaagtgtttctactttctacgtataagcaaatttcttttaacctccctaaactttctggaagacttaaagtaactaatatcccattcctccttctttggatatttacaaaaatttctttagttcgtctaatttaggattctagacttgtatttgaacaaacccgtagataatttattatttaggatttgaatattgatccgaagccaccccctataaatgatgagtcttgcatgagaactagttcacattgactttgatcagcttggtacgtacctaataacttaaaaagcttgctaattaccttataacttacatccattgaagagataaagggagattgatggcggaatttagaccgatattttctccaatagatcattataaaccggattacatttttgctgtacataggctgcgctaaacaccccaaatgcgcacaacgttatcaataaaaatgaaaaagtaagggcatgagatgattagtttagattatttacatgcactaattctcccactattcaaaacttatgagtatacatttaacatttactaggttttggtttttatttgaatgtttgtatgacgtttacaaggaaaagttcgtatgacttggtataatatatggcattttaattctagataaaatcacatgctcacatgggtaataacaaatcatttattttgccaagtgactgaactatctgacaaaaacctaatattacaaaaacctcaaaatttatcccactatattatcttatttatagtggcattcccactttcttaattatgcatgcatctccgaggcgcacccttgttaaggcaaatatctattttttaaaaatacaccttgtttttggtgtataaatacaagctaaaatcatcatagcaatacactatcaatctacgatcatatatctttcatttcatcatcatggaccacaaaatg

SEQ ID NO: 10844 - DNA, 3000 bp, Unknown
  misc_feature (1)..( 3000): cDNA_ID_3038144_gDNA_ID_2214452_Annot_ID_182599 3000 nt of promoter + ATG
tcgagggatttcgcagtttcaatggttaaaatggggaatatcggagttatgaccggaagtgatggagtaattcgaggaaaatgtggatttccaggttaagttatatatagactcttcacaaaatccaaatcagtctattatatatctagagctaatctagctttaatgaggaatcaaataaaccaaagtctatgaataaaatatgttttatatatatggtgtaaaagcgtccttatgtatcaatatatatatatatggatcccataaacaaaaatacttggacttgtatgtgtgttacgtttgtgtgtaatggaaaatgtatttgtctttgtatttttatattccaaaattaagtcgaactccctcacttgaacgaatataaatattcttagttcttgattggggtttaactaatgatcataattttacatcttcttccgaaaatcatggttctttttgttgatataacatacattttcttaaagtattgaatatactaagtctacataaatatacactatctatcaaaagtcaaaacaaacaaacatcttagcgtgaaaaaagaaaacatcttcgaaatagttaaagtcttaaaaattgcaacaattcttaaatacactaactttttgtttaaaaaaataaaagaagatcttaattcttaatgatgaaaatacatagttgaaagagaaatgatgaaaatacatccatcaagcccaaatacaagcaaaccccatttcatatatttccactttaaattcagacttgatgcatatatttgttaattagaaaaatacgtttgaacatatatacatttatttaaattttgcgaaaaagaagcaaataagcattgaatgatgatatacatccatcaaatccaaatggaagcaaccaactttgtaggtattgtgtttgttgattactgattggaagacataaattttaaaccattaaagtttctccaacgacttcaagaaattatcaagattagagttagtggaagaatgagaaatacttcatactataagctattttaatctattatacatatatagtctaaatacaaaatagtagttaggttacgtacaccatcatgttaaatgcaaaacacaaacagccaatagagaaatatcatataattcatgcaaataaactaaacattatctattccacaaatgagattaattttttatttaaaatatatacatataacaactcgaggtttagttttaagcgaaacgtatatgtgtgaaaattagttaatgaaccttattttttcttcttttatagctggttatttcttaatattcgtgttaataacattagtaaaaacacagtaaagatttttttgtctaatatgataagtaataattaattaacgttacatgtccgagacgaccgcaaatttggggcatacctcttggagcattcgtcattgtctcgttgatgtgttttcatataacgtttggataattttcaatttaatgtcaagacaattttgaatgctagttattctgatctcaaaagaagatgctgaccaagatgtttatctctgatgtcatgccttgcacaatttcaaaccaacctactcctctttctatatatacgtggagccaagtttgtcaatcttatgatttggtggtaccatagagtcgagttggctggttctcgcaaggagtttcaaagagaatttcaacacatggacggttggtgtttcacgatgaactagctcaagtgatcaaatgtgtggttagagtcacactcaaacttgtcttctttttgcataactaaacgagacataagataacttattctttgaactctctcgattgagattggcataacactcattttctaacggcttcttcttttgataatatcaaatacattcttcttcaactatctttccaaacttccagttgaccgaatataacaggaaaggaatgaacgaacacagactcaagcataccacattattgacgtctaatcgacgtaaagattcaccacataattcactccttctcagattctgacacttctcacctttaaaacattatgcaaacatagtttggggattgtcgttagttgactcttagttatttagtatgtcaatttttgtttgttccaaactttcaagaaaaaaaaaatgaatttgatttattttttctatcaaagatattcgtaaataaaacagatatttcttcttctttgtggtaacatattttttgcaaaaaacttttacgaaagaaacttgtaaactctagaagcatataaataaaataaagtatatattggttagaacctaattactaggctaaaaactacaattcattatgatattttttaattccaaatctatacaaaattatttcttacataaatatatatgtagacatgtattcaataattttcatgataaaacataggagtattttttacaactagaaggttacatgtacttaattatccttaattgtacccaccaactgtcaactatatatacatactctattttttttacagcagctataattttctttatttaaattttgtaaaggttctgttacttcattaaattcaatttacacaaacttgtacaaaaaaaaaatgatctcacaaccgttgaaaaaatgacctcatttaaaaaatataacaaaaataaaatatgggacatgaatgacaaacataacagatcggaaatatatttaaaagactgcaataaattaaggtcattaatacgtggccggaagcaactaatttactaaccaatgcacacatctacttgcttcgtcttcttcttccttcttctttctaccaccattttcagattcaaaattcaattctaacagtttcacttcccctgctcctctctctctctctctctcgctctctttctcatgtgatctctctcgctctctctttcttctctaaaagccaaaacttcgatggcattactgtgattttcctcataaagtaagctcctttttttcgccggagattatg

SEQ ID NO: 10845 - DNA, 3000 bp, Unknown; identical to SEQ ID NO: 10515
  misc_feature (1)..( 3000): cDNA_ID_3038276_gDNA_ID_2214454_Annot_ID_182612 3000 nt of promoter + ATG

SEQ ID NO: 10846 - DNA, 3000 bp, Unknown; identical to SEQ ID NO: 10514
  misc_feature (1)..( 3000): cDNA_ID_3036999_gDNA_ID_2214454_Annot_ID_182614 3000 nt of promoter + ATG

SEQ ID NO: 10847 - DNA, 3000 bp, Unknown; identical to SEQ ID NO: 10513
  misc_feature (1)..( 3000): cDNA_ID_3036991_gDNA_ID_2214454_Annot_ID_182616 3000 nt of promoter + ATG

SEQ ID NO: 10848 - DNA, 3000 bp, Unknown; identical to SEQ ID NO: 10512
  misc_feature (1)..( 3000): cDNA_ID_3036987_gDNA_ID_2214454_Annot_ID_182617 3000 nt of promoter + ATG

SEQ ID NO: 10849 - DNA, 3000 bp, Unknown
  misc_feature (1)..( 3000): cDNA_ID_3038268_gDNA_ID_2214454_Annot_ID_182620 3000 nt of promoter + ATG
ttccatcctcatgaatagtgttcaacccgttctctctggtatgtatattagctagttggcgcgagatggttattattacagtatcgaatataaaccgatatttgaaatattatgtgtcttggatcggttttaaccttaacaggagttgccgtcggagctggatggcaaggatatgttacttacgttaaccttgcttgctattaccttgtcggaattcctattggtattatccttggttatgtcgttggtttgcaagtgaaagtaagttttattttctttataattttctccttctttataacggtcttgaaaacaaaaatgtgtgaaagtaaaaaaattaacataaaaaaagttattctctaaattttcttagggcgtatggatcggaatgctctttggaatattcgttcagacttgtgtgcttaccgtcatgactctgagaacagattgggatcaacaggttataaatcgattactatgttttctaatttgttcctagcaagctatgtttttggtgcttattcttataccgtttgttgccaaatatattaggtgtcaacgtcgttgagacgtttaaatcggtgggttgtaccagaatctagagacgtaaaccaagtatcatcagaggaataaattggattctagattgtctttagcaccgtcacattttattcttaaaagctaaaatgtaacttttaggctatgttccaagattgtgaagacaagaatatgacaaatttgggtcgatttgatgtcctcgcaactaacttgtaataagattctaatgtttaaccaaaaaacgaaaacgagatcctaatttttggattaacactagatagtgttacatttagctatgattcatcaaacacaaaattattttggggtttataaccaaaaaaataaaaataaaaataaaaaatttactatttatgtgaaaagaataacaaaaattaaaatatttgggtgaccttctcaaatagtatagaaaatcacaccaattttattttgtactatttgagatattcatggtaagaaaccatagagcgatgctctaaagtctaaatagtgacagtttggttttaaaacatttaaaacaaatttgttgactaatagaactgaatttttttttgtctcatttaacaactgcaattgtaacatatatatatttttaatagaaataaattaacaaactttttttgatgatttatgaaaactatttaatgatataaatgtttggatactaaacttgaattatttctccgtcggctttgtttgaaaatatatagaaaaaacaattaacgggccatgtgcttgttgcaaataatctatttatttttcattttaggaattttgtttctcggcacgagttgggctgattttgataagcccacatgacattgttttagggtttctgtttttcttctttatactttttaaaacgcggccagtgaataattttctaaggtttatgctttaatcaatgagatcagttagagagagagatagagagttttgtacagaaaaactccatagtggttcatattcacaactttatccttcaagtccaaaaaatacaaaataatcttatgaagtccaaaataatacgcaatataatctttttttcactattgtcaaatttaaattttttgataaataatataccaaatcaaagatctctagataaggagttcaactttatcttcagaattctcaaaaactaatgtatgagatcgtgaaaacattctaatatatgtaaaattaaaaaatggactatattgcgtattattttgtatttttaggacgtataggataaaattataaaaatagacgattttaaggttttttttcataaaaccttttttttaatacaagttaaataatttttttgtaaataattttttgttggaatgtcaaatttattcaacaaaagaaaatgattacaaagagttttgaaagctaaaaaatagagaaaataaacgtgaaaagtagaaacaaaaataatggaattggcgccacttacatcattacagaaagttcaaaaggcctaattctgacacaatattattaacgggccatgggcttaatgacaataataaacttttctcacttttgagttttaataagcccacatttgctttagggtttctgcgtctctacctttaaattgcttccgacgattcataaactagggtttctgcctttagccgtcgtgagagagagagcaaatcgaagagagagcaaagagaaaataatatgttgtttgcgtttggtacggtgactcgatctgtggctaattcagtggtggtttgctacggctttctttcgacaatggtgttttctttcgacctaaacttgatagaccgaaccaaactgaaccaatttttatatatatttactcaattaaatcctaaactcctctatttgatctgaacccgatcaacccgaatacataaatatctaatcttatccatctgaaaggatactaaactctctaattcgaattacccgaatccagaaaaagccgaatagcatgcattctattggtacttgattatattaattggcatatatatgacctgttattgccaataatatattttgggtgtttcctgggcttcagttttattgggctaggaatgggtgtacttttaaacccacttctgattagtctcttagtaaaacccacttttaaacccacttctgacccacttctgacgccgtcatttttcttgagaaggagagagagcaccacttccgtcattccagcccaatatttttaacgggccatgggcttattgtaaataatgtatttttctcatttttggttttctttatgggcacgattttagtgggctgaattttgataaaggcccacatatgaaagatatttagggttttttctcttgataccttttaaaacgccgtcgagaaatctccctctagggtttctttgatcaaaccagagagccgtcagggagagcaaaacaaagatcggagaag

SEQ ID NO: 10850 - DNA, 3000 bp, Unknown
  misc_feature (1)..( 3000): cDNA_ID_3038272_gDNA_ID_2214454_Annot_ID_182619 3000 nt of promoter + ATG
tttttttctacaattatttattaaaatttaaatgccaaattggtatcaaccactaatttgggtttaaaaacaaatacatatctttgttggatcagaagaatagttgtggtattgaaccgttggattgaaccagaatgtaaagattaaacgagacttcacaaacagaacaaataatatttgttcgggagaattctctaatctatataacaatatcttaaataatttaatttcttaagtctttctaccaatttttttttttacaaccatatttcattaagaaagttcaaaggactactacagagggaagcccaattactacaatgaaaatacaacctaagttttaagaaaacctagatgctgacacgtgttgaagtcttctgcttcatcaagccacgcatcagttgatcgagcgctgccgtgtttttctcgccaaacatcaccgccttagatcagccaccgtcgatccgtcgtggagcgatgggtggttgcctcctgtctgacgatctcgaacccaagccgtaaacgccgagaacctccagatctatcatatggtatgcttcaagagttctccgagcaaatccaactcctgggaagttccatcacagacaacacctttactgatgcagtcgaaacattgctccaaattcacgaacaaagaaagataatgaagatattactcctcgagatgattgggaggatcggatgaacctcgaggggcagttggacaagagattagtctcgccgtcgcgagaaaacaaaaaccggactactctagtagactgacatccgactagaagtcgaaaacttatttaaatctaatataaatctatatctactaaatcaacagtcactttatcacaaactgcaacattctcctgtttacacgtaagcaaagtcttaatttattgagttttgatttttctgaagcgtaaaacaataattcttttctcattaacataaattattaaagagatttaatccataatttatttctttctttctcgccatcttcatcactatcttccccattccccatatcttgcaacagttattgctaatttatgttgtttcatcttctatgcaattttctaattacgaatctcaaatttttcacattcggatcagttattttcttttccgcctgctttacaccatgacgccatggcagattaacaatccttacattttttttgctgcttgccattctcaaaccaaaattcatctcactctcccttctcattcgaggtcagttatggctgaagaagaggtcaaccacaacgactgtatattcaattaaggtatcaaatttgtaaaatttctgaattattataattttcagttttccatatattgttttggctttcagttttaacatcattttctttatactttgtgaattattacaattttcatctaatcacatctcattgttggctattaatgttgtcaagagaaagtgtttgagaatctgactttaagacgacatgggtttcgttttcaggatcccgtgtgaaacattttcagaaaaataaaactcttacacgatcatgagtcatgactaacccaatgacatgctaaggttatcaattctcaattagttcttcctttattttttatttaaaaaaatagttgatcttatatttttaaactcaaatatagtgctagacaaattgactttttgattttgtgaaatcacagtaaaacaaaaaacgaagccatacaagcacaagatgtactgatatacactagagaaaaccaaaattttttcagttttaaaatggtgatatagatgaacacaagagtcatatatctgaaaagctgagactatacgacaaaggaaaacagaaacagaagaaaaagatatccataaggttgtaaaacatgttttctcatgcaattgaatcttcaatagaattggattgattacaaatttatggaccattggatttttgttatgctagaatctttagaactttggaaatttcgagttatgaggtttagaagttaggcattattgaaattgtacgacgaatagactatatagagaatatatattttattttttattttttgggcaaaaaagaatatgcttttacctgtttttctaaaaaaaagttatcttacacaggacacactaaagataacgctttcaaacaaaagaatttattttttatcaaattatttttgtcccgaacgtagtccaggcttcatactagtaatatttataagtccgaataaatccgaaaataaacccagacgatatagagcctcttctctctgaaaaattagaagagataaaagaaaagaaactctcttgtattttgcaagattttattttcggtttaacggaaatcgcctgctccccaaaaaaaaaagagtttttttaactgaaataagtctttctaccaatcttgttagcagaaaaatgtgacaatagtagtagttcgatacgctcgtgacttgattcttgtctttttatggtttatggtgtagcaaaattaaataattgttagtttttctattttattatataaaacaatatagaatgatttaattattttatttcttagaatgttttataagtttcaactttcaatacatgactatttgtattttataattggttgaatcaaatatcaaataataaatttgtttactaaaacattattatatattttctatattatgaaacataggtaggtttgttagtcaaaataaatggtctataaaatgcaagatatcttagctaggtgtctataaaccactcactgctacttgctgcttggcgtagacggcttttcgtttcccaataaaaatgacgatttttaagcaaacaaaaaaacattaatctataaagacaacaaaaaaaacagagttgttctcataaaccaattcatacacaaacactctagtctcctctctttttctctgccttctctcttttatttattccctccttccctctggtcctccatcagatacaacaacagagactccaag

SEQ ID NO: 10851 - DNA, 3000 bp, Unknown
  misc_feature (1)..( 3000): cDNA_ID_3038253_gDNA_ID_2214454_Annot_ID_182628 3000 nt of promoter + ATG
gagaaacgagtgtaatgtgtacaacaacaaatctttaccagtgaaacctatccatctgtgtgttaagtaagaatggttttgttttgttttttccatatctactacattggcaatcttgatatagccacataaatatttgtgggttaaatatattaaagaagaatatatccactagtagagggtgaggtaagtggtccataggattgtggatttagtgcggatttaaggaaaggtctttggttggatagatttttaagatgtgtgtgtgtgttctaaaactaagggtttaaaatcaagagtgttgtggtgtgagttgacttgtcatgaactctctgacacactggcaaagtgagcccaggttttgctagttgttttgtcgtaagccttgaaattgacattatgatgcatcatggcttctatttaaagggggtcatatagttaatgcaatgatcaaaatagccccgagttagatttttggtgagttagtagtgtaagtaaattctttggattttgactttgtgaggtatttatttatttggctgccactgaaattgtagatatatttgtgagaggaggaatatggattttacgtgggtgtgaaaattcatggaattacaaaaaaaaatatcgctggaccattttaactataaatttgttttgtgaccccgtcaaaatgatgttgactcgttatctttggtaagtcctcgtatgacacaagttgggaaagtaatgagtttgacaacttgttgtgtcctaataagattagatttattggtagagagagacgttgcttttgtgtgtttaagattagtgtgttaatcaaagtcttaatcaaaactccctcatgagatctagatctcttatgtaaaaagagagattcattcagtcagaaatcaaggaaggaaactccgtgagcatgttcttaccacctcgtataattatattcttattatacttgtactaatattaaagttgtataattaggaaaaaaaagaacatatcacatgtaataagtaataaatatagtgaaaaaggagaggcatgtgaaagtggggggaagaagaagagaagacagctgtgtatccgccgctctctctctttctttccccttcaagaaagttctccacttccaccgcccaccttcttcttcttcttcaccttcttctctaaccattattattaattagcatctttcattttgttgttagaaggaaatagtttgttttccttttttgtgtataactagaaatgagcggtgtgtttttgtgtagagtgtgatttggtaatgaaaatgagttttttttttattttgtgtatgtttgtgtaggtgagaggtattaaagagttgtataatgtgatagtatgagtgtctgcatcgatgtcttgagtttgcaactaattttagatatgaggctattcaatttttgattgatcacttatgtctatcttcaccacagctttactatctcaaaaaatgtacttattttcattatttttcacctaattgttataaggtttctttattagtttgttatcttgtacttttgtcgaaaattctggttaccaccaatacataaaatcatcatcttgacttttgttttgattcacatatatatgtgcaaaggaaattaacagtttcatttttaattaaaaaccaaacgagttactaaaaaaaaaagcgatgtcaagctatcaacatttaactaaacgaatgtcttattttttggagaaaaaaataaattcaaagaacatatcaaagatcacttgacgtcacgtttgtttatttatgggattttgcagaccatgcatgttcttgattccaaattatgccaacatacaagaatcacttgtaaaattgtagcgtccaaatgagtctagcaactttgttatcgtgaccaagccatcatatcaattcatgtatgctaaattcgctgcaaattcagtaaaaagtatgtttaaaatgacataaacgaaatctgttatagtgttggtagtgagtgggtttggctttggcttcgcataaactaatgcatgggtcaggttatcgatccgacctgccaagatagttccgagtttaaaattacatggttatgttaattaattatgcactatgtatgattcataaaataatttcactggctttggacttactatttttttcttttcttgacatcactaaaacactattgtttgatatgtttctataaatgtattatttacacaataacaaaaaaaaagagagaaagaaactgttgaattggagaggaaagagagtggggggaaagatgtcaaggctggtccagctcaaatcgggtaaaaactattatcaaattccaattctgtccctccctttccccaaaaatctgattgtcacataccctaccaatcagacaacgccacgtggacaccttagacatgatggtgggagaggacaacaacatgggaggcacatgattttgtgtttattatatttctccaaaacacaatttttacccaaaaacaatttaatcggatcactgagcaatgagatgtttgcggatccaaatttaacttttaaagccttccttactctttgctttataacaataataataatacacataaaattggatttaattaaatagatgtggacctttttttctaaataatataaaagaaggaagaaaataaaataaataaagaaaaagagagagtgaagaaaagtgggtttaacaataatttgctgcaaagttagaagaggcttcagctttattaacttcttgtttgctttcattctctttctctctatctatcatcatcatcctcgtaatcctctcctttctccttcagacccctcctagttgctgtttaaacaaacaaaaaaagactgcttctctttcttatttctctcatcatcatcatcaatggttttatgagatttatatcaaaaaacattgaggagctagagagaaagagagagtgtgtgtgtagaaaaagattgaaacatcatcaagattgatg

SEQ ID NO: 10852 - DNA, 3000 bp, Unknown
  misc_feature (1)..( 3000): cDNA_ID_2994134_gDNA_ID_2214454_Annot_ID_182624 3000 nt of promoter + ATG
aagcttttcagcattgtgtatgaaagtgtttttttggttgatgtttgagtttaggatcacatttttgcatagtgaaatcaaaaggatcatttcagtgattgatttacgtgttcaagtctttgttgtaatcttttatgttgtgattgttgtgcagaaatgtcacgtgaagaagaaggatatcaggaagtttcttgatggtatctatgttagcgagaaaagcaagatcgtagaggaagaatgaatgcccatatcatcgtcttagctcctatttcttgtcttttgaatgttagtttcgttttatggaccaaatccaccggtgttgcaaaactctggctatcccttgttccctttttgtgttcgagattttatttacttatgcacaagttttggagacgagctatcattttcacctttgcttaattaaatcatatcgtgtgaatttgggattgttctggatttggcattgtgggttgtgcattcaaaattgatacttcagtcactaaactaaaatcaatttctcgcaacgctgtgatcaaacataaagataacttgagacaacgaaagcgagctttgcaatttgagaaaagctacgagacgccctgatggtcaggtgatcaatattagtgcagaatgattctgctttccagaagtcctctttcaaccatcgtttatcatattggaagcaccgaggattcatgagacaacttataatttaatcatgaaatgtgatttcgacatcagaaaggactagtatgttaacattgtgctcagtggcggatcaaccatgtttccaggaattgctgatcggataaccaaagagatcacggggttggcacctagcagcaggtggttgcaccacctgagaagaatattggaggatccatcttggcttctcttagcacattccaacaggtaccgtaaactctttaaccgtgtgatgatgattcaagttattcacacaaagtactgatgtttggtgtggatatcaaaggcagattacgagggatcagggccagccatttttcacagaaaatgcttttagacaacctctttatgtagcttgttgattgatgaaattggcttaagattaatatttttagtctttagtcgtggcttgttttaagttttgttcctttatgtttcttcatatgtttgagaaaagcggagatgggtgtgtaactttatccaaatgttcgtcaagttcaagaacagtataattttgaagatttgatataatggttgaaaaggagacttgaagaacaaggtcaaatgtgttttggtaatggttatgttttatatgttttgatcctcagtatcctctctgatcgacacttcaaacattttgtacttattttatctctttgtttattttttatggatcgtcagctaatagagaaccaaagtttgaaaccaaaggtattagagaacaaaccaaaagccaaaaagagagcaaactagagataaatactaaatgtgtcgttattcttcaaaacaaagatggtttcacaagtcttgcagccatacctcattaaggctgacggtatccgaattgtgatggacatgctcgtattcaactaagatttgtgaaaaagtcagattacacaacagttttctaaaaagtgttggactccaccatagtataaccactgtgcaaatcaccatctaccgtcaacaatttcaatgtcttattcactctgaaacgagtagagtttatatagagtgagtgagagagaggtcaatgtagtgtcacttgaaaactgcaatttttactctcgtttttttaccggttttacttgtcttttttactttttatatattatcttctatttattacccattttgatgttgccttattcatggtcaaataatgcacaaccacgagtaataccatcacagtctctttggttttgttacgaattactagtagtatctaatccgtatgtcaatgggttagaagtgataaattccattatgtatatatagtaaatactaaatacaacaatatcactttaaaaaatccaaaactatatatttaaaacggaattctcttgaggaaaaaaataaatggaattctcttttagtgtttgatatatacaaattaataggattggtaataatcccccttgatatgaatacaacagaaaagactaacaatcagtttatcaaactattgtacatttcctctaccaaccaccaaacaagaaggaatcgattcaaaagcagagtaactcatgtcacttagccactaaggtcaccgacgtttcccctcgaaggaatggtaaacaatgcttatcaaacacccacaaaccatctctctagatattcacgtatgtttagataaaagtatctcttgatacatgaatatgtatgtcacgtgtgaagaattcttatgctcagtcgacaaatctagcattggtccggtgggacatgaaaaccctgacattatgctcgacttgtctagaatactatgccccatttattatccttttacatagtactgtatcaattacaaaaatggggataggacaagatcctaattatcaattcctcgagtccaaagttatgggtaccacgtgaattattttacgaattttctttattatcttgacttctttacctgattttttatattttcaactacatggagacatggcaaaacgaaaaatgaggctattcaatctccaactttatctcaaaattttatttttccctctctttaagaccacttctaataataagtgtggttcttggctttttggtaaagaatagacaccaattgtccttttttattacaataaattcggacaaatttgatttcttgtgatggtggatccctttttctcgtgcttcgagctccaataaacttttcttacatttttaatccatttttacgttgatatttttttataaaatttccaccaccttacaaaagattttagctttttgtgttactaattaaaatcagaacaaaagttgcaagtctttcatctctatgcacaa

SEQ ID NO: 10853 - DNA, 3000 bp, Unknown
  misc_feature (1)..( 3000): cDNA_ID_4254732_gDNA_ID_2214454_Annot_ID_182622 3000 nt of promoter + ATG
tacaaatctactatctacgttacaactaaaaaacgtatctatgagtacattaagcctatcagtttcaatccaatcatattttactactgaaatatgttctatgaacacctacaaaatgtatatatgaacacattaagccaattatattcttattttgtttatgtccaactatatgtctcttcatttacacttttgcatagtttcttcaaccactaaatgttttgactcaacaaatattttgaacaaaaaaatatatcatatagcaataattgatgatgtatttacaagaaaactaaattaagtaaaaaaactacttgattagaatgcgtttatgaccaaccaataaactaaaggttgagaaattaaaagaaattaatttgacgtaactaaaaaaataatataaatgagtcttagataattcaaagatagaaatataaatgaaagtaacaatctaaaatacgaccactaaattaaaagtaaatagacaaagaaaaatcatatatcgatcttaccatatacaaattacaaatttgtttcaaatcaacacatatttctaattaaaaaaaaacaaattgaaatatataatgtaaaattttacattaaatcatgacacatgtagtagtctaatttttttagtacaatgatatatgataattaagttttatataattcaaatacaaaaaatcaatacaaataatcttgaaaacaaaaattaaattataaattttaggaagacgatgatttataaatctttaataattcaatgcatgccacgataatgtgataactttgtagctgtgtataagcacacctagagatggagataacacctagagatggagatagagagagagaaagcttcaggaggagatgaagaagatgagaggaggtgcagatttggggatgtttttttctttttttttcggtccaatttttttttttctggatggattgatcaactttacaaaatctctggcaaatatttggtagatttttattttattttcattgctttaacttatgaataaatctatattttgaaaaataaaaagcttgtgtacttctcgaatgtttatggtcttaatattgctgcttgcttcgttttggtcgcatgattttaaatttactaggttataaatccacgcgtaatttttttatcaaaattgattcttaactctattgatttttataatttttaatatggtatatttaaaataaaatgtttactttattagaaattttaatactataatcaataatatatacttttcaccaaattatattacgcgtgggttcaaaaccaagtgttaattactttgaaaagcaaattttatataataaaattttaaagtatgatatactcataacttgatttttttttttttgccggctactcataacttgatttggtgctatttatgacaatttctctaatttattcgacttttgttattttgttctttaaagcaatgataaattattatttggtctggcccggaacggactgctttcaaatggaccgggccgccagcccacatactaactcatttagatataagtttcttctaacctctctttctctaaaaagctgtcggcgagtgggagaagcgcagagagagcaaacaaagagcaaacttgaattatttctccgttggctttgtttgaaaatatataaaaaaaacaattaacgggccatgagcttgttgcaaataatctatttatttttcattttaggatttttgtttctcgacacgagttgagctgattttgataagcccacatgacattgttttagagtttctgtttttcttctttatactttttaaaatgcggccagtgaataattttctaaggtttatgctttaatacaagttaaataatttttttgtaaataattttttgttggaatgtcaaatttattcaacaaaagaaaatgattacaaagagttttgaaaggtaaaaaatggagaaaataaacgtgaaaagtagaaacaaaaatgatgaaattggcgccacttacatcattatagaaagttcaaaaggcctaattctgacacaatattattaacgggtcatgggcttaatgacaataataaacttttctcacttttgagttttaataagcccacatttgctttagggtttctgcgtctctatctttaaattgcttccgacgattcataaactagggtttctgcctttagccgtcgtgagagagagagcaaatcgaagagagagcaaagagaaaataatatgttgtttgcgtttggtacggtgactcgatctgtggctaattcagtggtggtttgctacggctttctttcgacaatggtgttttctttcgacctaaacttgatagaccgaaccaaactgaaccaatttttatatatatttactcaattaaatcctaaactcctctatttgatctgaacccgatcaacccgaatacataaatatctaatcttatccatctgaaaggatactaaactctctaattcgaattacccgaatccagaaaaagccgaatagcatgcattctattggtacttgattatattaattggcatatatatgacctgttattgccaataatatattttgggtgtttcctgggcttcagttttattgggctaggaatgggtgtacttttaaacccacttctgattagtctcttagtaaaacccacttttaaacccacttctgacccacttctgacgccgtcatttttcttgagaaggagagagagcaccacttccgtcattccagcccaatatttttaacgggccatgggcttattgtaaataatgtatttttctcatttttggttttctttatgggcacgattttagtgggctgaattttgataaaggcccacatatgaaagatatttagggttttttctcttgataccttttaaaacgccgtcgagaaatctccctctagggtttctttgatcaaaccagagagccgtcagggagagcaaaacaaagatcggagaag

SEQ ID NO: 10854 - DNA, 3000 bp, Unknown
  misc_feature (1)..( 3000): cDNA_ID_2716702_gDNA_ID_2214456_Annot_ID_132935 3000 nt of promoter + ATG
cacctcttgacgcaagccctgcaccaaaaagcagaagattaactacaatttatcttagctctatttattttatacatcgttataatataatagttagtttgactatgtatacacttagaatgaacaaaggtcaaatttcgtatatatataaagataaaatgaacatacttaagaaaaaaaatgattgacctgagtatcttcaagcgtatcattgtccaaaagattgtctttacagcgatagtacctctcaatggttctgccaactctacagtttataaaacaaaagaaaccacaagatattttaattaataatctgaatttgcttaaattcaaaaccaaagaacgaaaaccttaagttctgtgttaacttttaatgcatgtctaaaggaaattctaattacacaaaaatctctgggaagatatatctgcgtaatggattatagatctacggctacccatgataaaccctaattaatttctctaattagaattagaaagacatatctatttaaagaggcaaaacgtatatatgaggtttcatggatcttaaggacatacacatatcaaagctggtgataacaattaaaacccaaaataaaacaaagaagttttctttcaaaagatttaccggatctaaaagctaaactgacccatatgtccgatggatcctgagagatcgatggatggtgatcaaccttaactagttagggttagaataaaaagacataacctttttcagatacccacaagacagaatttggtttcttgatcttaagaacagacacaaatcaaacatggatgatcttaatcatattacccatgaaaacctaggttttcatcattaggaaaaccgaattaatgatcttgaatgaatggatatacgtacccgacattgctgaactcgtagagcttgccaccggtggagaagattatgagagaaacctctgcatcacaaagaacagagagttcgtaggctttcttgagcaaaccactttttcttttggagaaggttacttgtctagtgatcttgttctcaattctcttcacttccactttgcctcttcccatctctcactcgctctctctcttctttctacgttgtttcttgtctttaatatctctcaatgttggaagtttacatgtacatatcaatcaaaatgaattactttagttctattgctggatatacgtaaaaaaaaaaagcgtatttattaaccctatagtttctctttttcttatcaacctatttcaaccctacatacatagtggaaccgagttttatctcaataggacaatatctcatcataaattacaaagttctcatttcaattaccatgcaagaagaattcactttccgtttattaattatagctagagtgtaaaatggtaatgatcttactgttgtttgacccaaatgaaaattcttttggtatataaaaaattaattgataggaacaaaacgaaaactttctcctacctagaattagaagtatggaaatacagttggaccactggaaaaatcatcattatttcttttaatatcagtatttgatgacatattgttcaaagttcaaactggcactcaagaaaaattgatattcttttttgatatgcaacagttggaccaaacctttttacttaataaagtttacatctattgtgattcttcaaactaacacttatataaaactgttttttttttgttcaatggctatgatttcgtcaaggttaatttgtacatgtaaacaattaaacgttcatccactaaatgttgttcaacctgaaccgatgtggagtcagtaaaaaacatataagacatcgaccctaatgacaaaaaacagagtgtaactatattacgtgtgtgaagtttattactagttcgggaagttttaattggtcaaaaggcgcaggaaggttcatcatttgttgttgaaaagttgcattccttttcaaaagaaaaaaaagtaaggtttttatgaaaaagcctttcaagagaaaacaaattttggttatatcttatttatatggtttgacaactgaatcaaacatttaccaaggttgtatttgatcattattactaaaaataaaatcagctaaaaaaaaaccattactaggtctagttacagtgttacactgtattgtaaatcatttagtaataaaccaaacaaattactatcatcatttttaatttgtgtagtcattacatacatgcaaaattgtaaattaaattataaaatcatgccatactatactgctagatgaaaattgaattgtcatatcaaattaaaaattaatgtattttcatgaaaactggaaaaaaaaaactattaaattagaaaggcgaaattcaacgtgacgcatctatctatataggcttgggcttataatatatacaaaagcccagttaattattaatgggtcgaagtcgaaacttgaaagcaagcagtgtcatcgttctatttatcatcagcccaaaaaaggaagaaaaaacaaatcaattttatgttcgtttggtataatatcgattttaattttaaccaagtaaaccggataggaggagattcgtaaattgtaatcgataaaagagatctgtgtcaaaagtacgcgtgaggttctctcttctctgcaaacaaaaatcctggcgttgatagcgattggttaattgtcggtgaatcaacgtttttctgttacacatatcaatcaatcatcatcctcttcatactctcttcttcttcttcatcgtaatcattagcttcaattccgagttttctcttcgtcgccgttgtgctagagttttgtcagatctcgccgggaaattagcaatggcgttttagtctgtttacctgtgaagcttttgcgtaaacgctggattcttctcaaatctctctcacctgatctcttattagattccgagtatgatttgtttctctccttcattatattcgggttgcttccacgatttcgttgcttgatttagttttttttttgaatttgataggg

SEQ ID NO: 10855 - DNA, 3000 bp, Unknown
  misc_feature (1)..( 3000): cDNA_ID_2716698_gDNA_ID_2214456_Annot_ID_132936 3000 nt of promoter + ATG
atagttttcatcttttgctgtacttgaggcagaatccagcaactcctgatgtcaaatctaataacctgaatgaaaaacgtgacagcatttcaaaaggtagtggcttttaatttaagtggcatctctgatttgacgttttccatctctgattcttctatatattgctgatgcagatagtatccatcagaaagttgagacacctacaaagattcacagaagggtaactattatttattaaagttcaatgtcatgatgcatcaaatactctttagggacttcttgtgtctttagtatttcattatcaacattttttttatccatcttgacatttcagcaactaagagagaaaaggcgtgagatgcgggcaaatgagttagttcagcacaatgatgacacgattttgaaactcgaaaatgctgccattgaacgctctaagtctgttgattctgcagtccttggtaaatacagtatttggagaagagaaaatgagaatgacaactctgattcaaatatacgcttgatgcgggatcaagtaataatggctagagtctatagtgggattgcaaaattgaaaaacaagaacgatttgttacaagaactccaggcccgacttaaggacagccaacgggttttgggggaagcaacatctgatgctgatcttcctcggaggtaaattactccttttggtttctactacttgccttttttcgactgcttgtgtacttcttaaagtaacatgctctctaaattacttttcatatagtgcgcatgagaaactcagagccatgggtcaagtcttggctaaagctaagatgcagttatatgactgcaagctggttactggaaagctgagagcaatgcttcagactgccgacgaacaagtgaggagcttaaagaagcagagtacttttctggctcagttagcagcaaaaaccattccaaatcctatccattgcctatcaatgcgcttgactatcgattactatcttctgtctccggagaaaagaaaattccctcggagtgaaaacctagaaaaccctaatctttatcattatgccctcttttccgacaatgtattagctgcatcagtagttgttaactcaaccatcatgaatgccaaggtaaaatcattagctcttatcacttgattcgtcctaatatctgtatgtttaattttagatacgcattgcagagctgaaattaaaaatgtctttattccctatatgtgcaggatccttctaagcatgtttttcaccttgtcacggataaactcaatttcggagcaatgaacatgtggttcctcctaaacccacccggaaaggcaaccatacatgtggaaaacgtcgatgagtttaagtggctcaattcatcttactgtcctgtccttcgtcagcttgaatctgcagcaatgagagagtactattttaaagcagaccatccaacttcaggctcttcgaatctaaaatacagaaacccaaagtatctatccatgttgaatcacttgagattctacctccctgaggtttatcccaagctgaacaaaatcctcttcctggacgatgacatcattgttcagaaagacttgactccactctgggaagttaacctgaacggcaaagtcaacggtgcagtcgaaacctgtggggaaagtttccacagattcgacaagtatctcaacttttcgaatcctcacattgcgaggaacttcaatccaaatgcttgtggatgggcttatggaatgaacatgttcgacctaaaggaatggaagaagagagacatcactggtatataccacaagtggcaaaacatggtaaataactctttaattctttgcaacaaatagtctaatgatggtttattattttatttattgtggtttgctcattttggcttgtgttgtttagaatgagaacaggacactatggaagctagggacattgccaccaggattaataacattctacggattaacacatcccttaaacaaggcgtggcatgtgctgggacttggatataacccgagtatcgacaagaaggacattgagaatgcagcagtggttcactataacgggaacatgaaaccatggttggagttggcaatgtccaaatatcggccgtattggaccaagtacatcaagtttgatcacccatatcttcgtcgttgcaaccttcatgaataaaatcaaatctttgttagatgatttgaggtaattacttctaatgttctgttgttcccattccattgctctttattccacacattgttaattgtttattcatatcgttttttagtcattcttttcttctcttcttctttcgggttaaaaacacttatgttattttttgagtttttctaatgatagtaatatgtttctggagattctcttgatggtcttgtgaaaaaattgaagaacacatactatctctctatttactatatactgtaagtcaaaataataatccaattttttgttgatgtgtcattaataaataaataactatcattaataattggattggttacacattttaaattttatttatgtttggatatccaatttttttttttccattgctaatttaattgttatcattatgatgttcatattcttttcttgtattggatcatattgtatatctttattttccaattgtaaatattcaaaataatatattttcttggaaaaaaatctattgtggtttctctttttttatataagcaactatttaatggtaatatgacatataataataatttaaaaaattagatagtatttagattttagactattagtggaaaattttacaaaataaataaatcccaactatgatagaaacccaaattgagtgaaaatagaagatgggctttaaatcggaccgacgcttattgcttactaatacaaatcgcccttccttaaggtctgaagacgaaacgaagaacaaacactgaaacaaaagagaaaaatcccaaagctagaaaccctaatcccaaacgaatca

SEQ ID NO: 10856 - DNA, 3000 bp, Unknown
  misc_feature (1)..( 3000): cDNA_ID_2716694_gDNA_ID_2214456_Annot_ID_132937 3000 nt of promoter + ATG
ttcttagatgttaacccagaacttggaaattcctataatgaagtcattgctcctcaagatattgccacctatggtggactctgtgccctggcaagctttgatcgatcagaattgaaggcatgtatcctatttagcatttcttttaactctgccatttttctccaacacttggtctataacttagtctaattttgcagcaaaaagtcattgacaatatcaacttccggaatttcttggagctagtgcctgatgtgagggaacttatcaacgatttctattcaaggttgcatattcttaccaagactctcgtctatttcttgcatagcaccaaattactaaccttgaactaaggattattagtgtgaatacccactaagaccagatttacccaacgaagtccctcataattattatgtcccttgaatccactatttattctaatcactgactctgataaactgaagtagctgttgtgacgttagactctaatcctgtatcgattatgaaggcttccaatgttgccctccaaattcttatctatgttaacaatgcgtaagacatgcaaactcgacccttttagactgtattctcgttgaatctaattattaagtttgcttgttgcagccgctatgcttcctgcctggaatatcttgcaagtctcaaatcgaatctgctgctggacatccatcttcatgatcacgttgacacactatatgatcagataaggaagaaggcactgatccagtacacattgccatttgtctctgttgatttgagcaggatggccgatgcattcaagactagcgtctctggtctagagaaagaacttgaagccttgatcacagacaaccagattcaggtccgtagtgtttcccgaaataactttgttttatgttactgtcattttaaaaaccttaatagaggcaaaatcttttttccatcccggacaggcaaggattgattcacacaacaaaatcctctatgcaagacacgcggatcagaggaatgcaactttccaaaaggtacttcagatgggaaacgaattcgatagagatgtcagggcgatgctgttaagagccaacctcctgaaacatgagtatcatgccagatcggcaaggaaactttgatgacatctgctttgctaaactgagaggtaatggcctattccaagatcataagatatctgttaaaatttaatttggtttagttactggttagctttctatctgaccttctctgttctctagttatcgctttgttttgtcaacttttagtttaagattctttgaattatctatggactttgaatgaaatcccgagtgtgaatctatagacgcatgaatcacactgaaagtgaaatggtcaaagagtacagacataagtacacacacttggtttcatgggccgatatgatttatgatctttgtatgcatgtgggtggtgggatcaaaaatctcatctcccaactaatatccatttcattttgtcaactaaacgtcgtatattatatgatagtttgtggctttgtgcacagttgtcactctatagttgaagacttttttttttcttatctacaagaaataataatcaaaacggttaggtcttttttttataagtagaatctcgaaaattgcaaaaccaagatttgatgtcggcaaacgcatcatgtagactaagtgtgaacttttgattttcttgtgtcaaagaacttttgatattaatcactcgatagctacgtttcatcattattagtttcttctatagaatttttatcactgaatgggatagttcacattatctggtactattatttttactattgcaagtagttcttttctatgcatttctttgaagttgttctctttgtagtttgaggtatcttatatatatatatttctatatgtttgtgtttgccaggaatattcaagggtgttttttcaagattcgaaccaaacgagaaattgggcaagattacttttttgtaagaaccaagtgtttcaatgagtcgatgacatttagagtaagtaaaggttttattctaagatggacagtccattattaatcaactattgaatgatattgccttttaaatgagtcttaggtagcatcgcaataactccatgtttactcaaaactcacaaaccatgaagttaagaatccgccaaatttggaagatgggccaactctaaatttactcaccccaatactccatttattttgggttgcattgatgaaagtaatttgtataattgataggttgtgtatcaaaaaccggatctcattatttgtgatctttgcattagttatttttggagactaataaccatctttctaaactgtgagtaatacaaatataaacaacttcttgttcgctatggaaaataaaacataactctttaggtacgattcacgatgcaaaaacaatagtcatcgtgaataaacatgtccgaaatacatgaattaacaaatgaaacgctcaacaaatgaattgacaaatgaaacgctcaacaaacgaagaatctcacatcccatgatgaaattgggatttacaaataaaaagtagcacaagaagaagggggtagaacagtaattttaaaagaaagacagcgttgattcaccacttgaagtggacttttatagcaaaaagagttgagtaacgtcaaaagagtcaaacccaacttttcaaaggttgtgtaaggctttccatgactccacatcttcttcttttccctttttatccttttctcttctctctcttttattttttcttttgaagtaaattaatttcacgaaacaaatcagagaaccttttatatcttcctttttcgtcgttactatcgtcctttacctttttcatttactgttctctctctctctctatctctatctctatcttctattcatggacatgcaccgaagcgacaaagcttagggcttttctctcatccatggcggatttcttctatcttcattaaatatttccctctttattaaaatctc

SEQ ID NO: 10857 - DNA, 3000 bp, Unknown
  misc_feature (1)..( 3000): cDNA_ID_2716690_gDNA_ID_2214456_Annot_ID_132938 3000 nt of promoter + ATG
tctcatgtcctccactgtttccacttccactaatccatcccgtaagctccctcaaacgctgcgtttctgatttattttgtagaaatatatatttgtttgttgttgttgacgtgattcatatcttatcctaccagaataaataagatttaataaatagtatgaactgttgactgagtcacaaagaaaaagatgatagctgttgattctgtaattatcaaactatatagtttaattaatctttttttggttatattaatgggcacagctataaactgcaatgggagaaaaagcatgctaaagctagcgaagaggatgactgataatttctgtggaggggtttgtgcttcgtcgttacagaaatggagcaaactcaacgttggcaacgtcgacgaagacgttaggataatgactaggaagagtgtaaacaatcctggcgagccgcctgggataattctaaatgcggcgacgtcagtttggatgccggtatctccgaggcggttgtttgacttccttggaaacgaacggcttagatcggaatgggatatcttatccaacggtggaccaatgaaagagatggcccatatagctaaaggccatgaccgttccaactccgtctccctcctccgtgccagcgtaagcattcatatttattacactttctatttgcatgcgtaagtagctaagctaatctccaaattttagtttaggttttggtgaatttagtattttataaacattagatggttttggaaaacttgaaattttagtcggtttagttttttgtttacggttttcaactttttctgatttttttgggttggttttagataaattaaagttaaaccgacttgtgtggacattgaatatttgatctataaacagtgtatgaaaggactttgttgtgttgtgtgaccccaggatggtgttgtcatatgaatcttgtcgcgtgtgattggaaagtgacaaatctagaatttggaagtattgtgtgataaaagtcaatagtaataagacatttttgacctttttctttcctttttggctccgacgttttgaaaaatcctctgtttttttctctctttatttctgcattattggtgtcttttctccgttgtaccccttgagctttttctggcttgtgacggtgacactgtaaaagtctcctcgttcatcatcttttaatttattgtttccccttttgggatttataattttctcttctaccaccaaagtttccatttatttaattttgttttgattttttcatgcaggcgataaatgcgaatcagagtagtatgctgatattacaagagacaagcatagacgctgcaggagcggttgtcgtgtacgcgcctgttgatatcccagcaatgcaagctgtgatgaacggtggagattctgcttacgtggcactccttccttcaggattcgccattctccctaacggtcaggctggtacgcaacgctgcgccgcagaggaacgtaacagtattggtaacggtgggtgcatggaggaaggagggtcgttactaacggtggcgtttcagatactggtgaatagtttgcctacggctaagctaacggtggaatctgtggagacggttaataatttgatatcgtgcaccgttcagaagattaaagctgctcttcattgtgatagcacctgatcatcgagatcagacgatggaggagattgagtcaagaacgaacctcattttgtgatgaatccgtttttgtgatggttcgggtattgactcgatgaaatttaaaaaaaaaaaaaaaacaaagaatgttgtaatttggatcggttttattttggatcatgtcgatgaaatgtaattgtttcttgtttctcttcttgtaatgactcgataatatcgggacagcattatatgaaacacacaagttttttttaggggagctcaaataattagttataagcaaaaacgtattatcatttttttggttataaatcaaggcaaccagaagcacaatccgtgtttacttttgtggtagtttataatgtgaaaggattggtttggaccgtgtcctttatttaatgttgttccaagtttacagtacttttctcaataagatggaaaaggaacgaacgaagaagagtgaaacacgtgagtgcatgaatttagttgcaatcccttatagttattatatccatgcaatgtagacaactacaacgaaaggctaattgattaggttggtttagagattgtttgataatgctagcctagatccaaaggtcacatcagaagagaccacaggctactaatgggcttttatctaaagcctgtcattaactactctattatggctaccaagtaagtcttctcaaagtgtattgggccaatcattaactaatttattgggctagattttaagtccattggagtatatactattattacaaacgacaataatattattattacaaacgggccgaaagaaaagagtcaaaaggaagagtcaaacttccgaataatccgcgcgcttaacgttcgatcgccaccgttgaatgaacaaacggtcacgatcgtatctaatacagattatttaattccatttttttcttgtggggtgatgatctctgaacagaaattaagggtatgagaatgattgattggtcttggaattgtgtaatagaccaatggcgagaaatgccatctgttcttttttagtttaagctatatccgctccgccgcagagatatatatagatatttctataaatatgtttttgtatatatacacagagagttttgattaaggaagaaaaatccttagatcattttttttttgttatctttgtttcgtttttctggtagaagagagaagaaggagagacgaattggcagctaagcgattctctctctttctctctttctcttctcgtgtaatcttttggtgttcttgaaaccacttttttttttgttaattcctctgtttccttggaattgttttctgcttttttaagaagaaaaaaacg

SEQ ID NO: 10858 - DNA, 3000 bp, Unknown
  misc_feature (1)..( 3000): cDNA_ID_2716686_gDNA_ID_2214456_Annot_ID_132939 3000 nt of promoter + ATG
ttaaaacattggtatatttgaaacaaaagtcttaaaaacacatgaatgaaagcggaatgaataatcttagttattccttatctaaattaaaaacatatacatattcattaactaaataaaatctgacctaccaaaaaaaaaacaaaatcaaatccaatggttttgatgttgggcaagaaacaggaaatctagttacaaaaaagaggttttctttcatatcttattgttgaattagatggcatttaaatcaaaagtttatctcattctaaaagtgttatttgaattcaattctatttatatttgaacagattactttctaaaacacttacttccattctcactatctcttgacttgtccatcttatgaatatacagtttatttggatttttattttctttctaattaatatacttgaatgctttccaaatcaaatgcgtccaacttttttttctattaggattgattgtatattagacacgtagacacacaacttcacacatatatataaagatgatatttacaagtcacatatattacaaaaaccctcatttggtttaagatattaaaagaacttcaaatcctttttttatagataaatatcaatgagaatgcaatttggaccattcaatatattacaaaatttaaattatatatatataaagctctcttattttatttaatttttattgatttttgtaaatatccttcctatgtttatatattttatgattttgtttccattcccatcatctatataactatttatttattgaatttgtctattttttatttttttttcttcatgtatcatactatatatatatatatatatatttaattacttatatatatatatatatataatattcacatatatattatcatcagcatttctgtttttttactctgaaattttaatcaaagatgtctaaatccaccattctcgctattttcatgatcgtcctcgttctaggtttgccttacatttaccattctttaaaacatttaatacattttttttggttttataaatttttttttaaagattatttaaaatatttgttagggaaggtaacgaaagagacgcaaggacaagaaatgtgtcgtgatattttaatgaaagctaagaactgtgatgaaggcacttgtgatactctgtgtaagcaaaaatggaaaggaaatggatcgtgcttcccaaacgtttatacttatagaaaaagttgtctctgcacatttccttgcaaaacttaacttttatagactcaaattctaatttaaaatagtaataaaattatgataataaaactaataataatgataatgataatgataatgataatgataatgataatgataatgacaatgacatgaattaaaactaaacttacacaatgtcttatattattatataaattctgatttcattttcttatttcacatgaactataagctactacttgagcatatgtgcctcacagggatggatcatggatcatggatcatggatataacaattattttacaaaactaaaacattcgtaaatttgaaacaaaaatcttaaaaacatatgaatgaaagcggaatgaataatcttagttattccttatcttatattaaaaatatatacatattcattaactaaatcaaatccaatggttttgatgttgggtcagatacggaaaatcgagttaaaagaaaaaaggttttctatcatatcttattgttgaactacagtagatggcatttgaatcaaaagtttatttcattctaaaagtggtttttgaattcaattctatttatatttgaacagattgctttctaaaacacttactgccatagttcccattcattttctctttacttgtccatcttatgaatgtatagtttatttgatttttattttctttctaattatcatacttgattgctttccaaatcaaatgcgtccaactttttttgctatattagacacgtagacacacaacttcacacatacagtatatatatagagatgatatttacatgtcacatatattacaaataccctcattttgtttaagatattaaaagaacttcaaatccttttctttttccaaccaaatcctattatatcatcaaaaagatgagtaaactcaccaatgttgtcatcttcattgtcttcttcctaggtttgttttacatttccattctctaactatattataaatgaccattaacaaattaatcaaataaattttcacgtttttatgctttgtatattgaaatttgatgtttaaaaatattgttttagggatgatggcgaaagaaacgcaaggacaacatatatgtcatcagattctgttaaacaacaattgtgatggagccacatgcacaagtctctgtgacaagcagttgcaaggaactggccagtgctataaaaccgttgacaaaagatttatttgcctctgcaattatctttgcagaacttgatgatttttttgttttgctttgttcttatctactatataaacgatcatcaacaataaataataaaataaaatagcaaaagtttcttgcaatcttttctaatcttaattacatgcatgtaaaaaattgcatgttaaatgtccatcgatttccagaaactattgtttgtttgttattttactttgaaaaatgcatcactccaaattcaatacatccaacaaaaaaaaaaaatcaaattaaagtcttaaggtttttacttttttttttttattgacactcatccaaatatcaccaattactagcaagcaatagatttaatgatataatcacacttttttttaatcaacttaatctaatgttaaataatttacttttgttattttaatgttgtacaaaactgtgggccggccgtggcaatggcatattcgaaatttggtatttgtcttgtatccgtaaaccttaacaagtgttttattttgttgtcttgtgaaagtgaaagagagagtatatataatttggctctgtcgtaatg

SEQ ID NO: 10859 - DNA, 3000 bp, Unknown
  misc_feature (1)..( 3000): cDNA_ID_2994671_gDNA_ID_2214456_Annot_ID_132942 3000 nt of promoter + ATG
aagttgtgattcttgcatcaccaatgatactcttattcattcaaattataattgatgaaagctctaaacatgaatcatttgtgttcaagtgtttgtcatgtttcaccattactccatatggtcaagtttaagtggatgagttatcatggacacaaactatcattatctacttggatttagcgtgttgatgtttgaaagtaatgtctacagattgttcttgtgttttggagacctatatgattattagtttctacataatgaaatcgtgttggaagctttgataataacatgtccacttagacgtgaccatgtggaaataattgattctcgtatgcaaagtaaaatactcttaacttagaagttcaacgatattatcaatttatcgagccaaaatcatatgataccaaacaagctgatcaaatggatataaaattcaatactggaattggccaatttggtttattcacaacctggtggttcatgaaatcgaaaaataaattatttaagagcaaaaacagaaaacgatagaaaaacgaagaggatgtgaatatgtgatgatattaccatggcagttctttaaatccaacagatcctctcttataaaaatcagattcatattctgaagttggtgatctgaaaaattctccttaatcaaagcagacacggagaaatcgggagatccgattaactggaaaaataaagttgaatctgattgttcaatcaatctctctttttgtagaaagctgatgatttgttgaagaaggaagaaagaaagaagttgatgatttcttctttgcaaacgttcaacaacttttttctctctttaatggcgtaaaaaaaatgtaaattttgaagatttgttttcttgattttttatttttgataaagcgagagaaagagagagaatggatacgaaaaagagagagacaaaatctcaagggtaattttgtctattttctcaccaaaaacaagataaagtgcctaaactcttaaaagtgtctaaaacggaaaaacatttcttaaaagtgcctcatagtgtcacattccctttattttattattattctattcgatttctagttacttcaagatttttccagttgttaatctgaactgaaatttacttcaaaaaaagctgtatttatttagtacgtagagtttttcatgtatgattttagtggagtttattatttacggacaaatctgtaacgtagttaacctatgcgataatcgttatttccttcaattcggtgaggaataacaataaaacatgttcttttatagtggattgcggcataaatgcgatgttagacgttatatttctgtaaattcgacatcatctttttctagcatccttatcttcaaagaatataaagacttaagacctaatctagttgagtaaggtatgagattcgagttttttcttttccaaattttcgtgactactataagtaatattaaattatgaagtgaaattgtaatctatcaaccaaaagcaaagaaagagagggggaaaaaacacaaggaaaaaaatggctcaattggctgctttgtcgggaaagcaagctgatgagtacttgaacgcaaggccgaaatatcctacaatatggtacaaagtgttggctggtcgaaccagcaaccataaggtggcttgggatgttgggaccggcaacggtcaggctgctattggggtttgttttctttctaaaacaatagtgttactttgaaccttttgaagttttgatacatttccttaaaaatacttcaagccacgatcaatttttatgtgaagcctaaatgaactaatcgtacgtgagtcaaatatatattgtgtaattaggtcgctgagtactaccagaaagtggtggcaactgatataaatgaatcacaactccaacgtgcaatgaagcacccaaaagtcacttactatcacactccatcatcaatgtccgacgacgatctagtgactctactcggtggagaaaactccatagatatcataatagccgctcaagctcttcactacttcgacctaaagagattctaccccatagtgaaacgtgttcttcgtaaacaaggcggtatcatcgtagtttgggtttacaacgatctcatcatcaccccaaaggttgattccatcatgaaacgtcttgtggattcaacattaccttacagaaacccgactatgaatttggcgtttgatggttataaaacaatagagtttccttttaaaaacattaggatggggactcaaggaaggcctaaagctcttgacatcccacacatgctttcgctagatggatttctagggttcttaaaatcatggcagcctctagtgaaagcaaaggagcaaggagaggatcttttaacttcttatatgattgatgagtttaaggaagcttggggtgatgatgaacaagtcaaggatgttcactacaaggcatttatgcttgcagggaaactttaggtaattaatatatgttcccctttgagatatatattaactatatgtcatacacgcatgtcatcaatgatcaatcgaattaggattgaaaacttatgtttaacaggtcttgagagcaacctggttgatttaaatgcggatcattactttgtataactttcgtttctgtataaattaatatattaattaatatatttatagcactgtaaatataaagatgttatatataaataaaaggttaatataagcaagatgctcatatctgaaataaatttcttcacaaattgattttcattagttacacttacccaaataacactatttaataaatctaattcaaaaatttaaaatagtgaataaactaattgatcggcataaaaaaaattgtggctatagttttgtacacttcacctaaaaaagttcttacagttttttactgtctaaaaataggaaaaaaataattacaaaagagagaaaagtcaacattacacaaaaaaaaaatcaatttggaaaaaaatcagagtaggttaaaaatg

SEQ ID NO: 10860 - DNA, 3000 bp, Unknown
  misc_feature (1)..( 3000): cDNA_ID_2716667_gDNA_ID_2214456_Annot_ID_132944 3000 nt of promoter + ATG
gaaatataacgtctaacatcgcatttatgccgcaatccactataaaagaacatgttttattgttattcctcaccgaattgaaggaaataacgattatcgcataggttaactacgttacagatttgtccgtaaataataaactccactaaaatcatacatgaaaaactctacgtactaaataaatacagctttttttgaagtaaatttcagttcagattaacaactggaaaaatcttgaagtaactagaaatcgaatagaataataataaaataaagggaatgtgacactatgaggcacttttaagaaatgtttttccgttttagacacttttaagagtttaggcactttatcttgtttttggtgagaaaatagacaaaattacccttgagattttgtctctctctttttcgtatccattctctctctttctctcgctttatcaaaaataaaaaatcaagaaaacaaatcttcaaaatttacattttttttacgccattaaagagagaaaaaagttgttgaacgtttgcaaagaagaaatcatcaacttctttctttcttccttcttcaacaaatcatcagctttctacaaaaagagagattgattgaacaatcagattcaactttatttttccagttaatcggatctcccgatttctccgtgtctgctttgattaaggagaatttttcagatcaccaacttcagaatatgaatctgatttttataagagaggatctgttggatttaaagaactgccatggtaatatcatcacatattcacatcctcttcgtttttctatcgttttctgtttttgctcttaaataatttatttttcgatttcatgaaccaccaggttgtgaataaaccaaattggccaattccagtattgaattttatatccatttgatcagcttgtttggtatcatatgattttggctcgataaattgataatatcgttgaacttctaagttaagagtattttactttgcatacgagaatcaattatttccacatggtcacgtctaagtggacatgttattatcaaagcttccaacacgatttcattatgtagaaactaataatcatataggtctccaaaacacaagaacaatctgtagacattactttcaaacatcaacacgctaaatccaagtagataatgatagtttgtgtccatgataactcatccacttaaacttgaccatatggagtaatggtgaaacatgacaaacacttgaacacaaatgattcatgtttagagctttcatcaattataatttgaatgaataagagtatcattggtgatgcaagaatcacaacttggtcaaaacaaatcataccaacacacaaaagttcatacatcaatgaatatcaccaatttcacgagtagcgtccattttttgttgaccactagttcacttgtttatagacactctcatcgttatgtgggttgatcacttgtttatagacacatatgctgcaaacaaaatacgtggttgtccattacggattgtccaaatgttgtagtccaatagagaacatcaagtactgaatttcaaacaaacggggcagagaagttatctaacattatcatagaattatgaacaagatcaccaaacacttggaagcttttagtaaaccaaaccattaatctttagttttataggagaaataaccacacaaaaatcaagggatgcacttcactcctccatatcaaacctaaagagataaatgtgtctcaatcaaatactatatatgtgtaaattgacgctaatactctccactagcaaaatcaaagtctgaataaatcgttcaaatcaatctaatttcatcataagagttaaggttagtttataccttcaattccaaacaatttcaattccacaatcaatcaaatccacaatctcacaacaatttttcaaatttctgcaacattgaaacttcctgcatctcgtcacatcaaactttccactataccgattctagaaacttccaataacatcaaaaccagactatgacacctcaaaaacacgaagaatcacgaagcaagacaaaagtaaacatgaatggagatgagtaaactcaaatcaccttgagtttatgaacgacgacgacgtcagaagcgccggtgatgttgatcaagcggtcgataacgttctaactcatgtcgccataagaaagaagatatgaagaatcaatttgagcgagaagcttggttcacaacaattgattgattgtgaaattttgtttttggagtgaggaaggagaaaagaaaaaagattttgttttgttgttgtgaaattaccgtgaaccgatggattgaattgggggagatggattgaattggagggggggaagagagagagagatgaattgtatcgagaaagagagagaattataataagaagaattgttagcgtaaatgtaggagagatatagttaaagggcaaatcgagaattttgtctaacaaaagtgtctcataacttaaaaatgcctaaatcgacaaataactttttaaaagtgtctcacaatataatattctctaaaataaattataataacttgtaagtttgtaattaaccatcgcccaaatatgataactatcatcagtaacgttttgttccaaacaaattgcctttattaacgaaaacaaattgcctttattaacgttttgttccaaacaaatataataactttagttatctcaaatatgtgtcaatataatgcaagaaaaagaaaaaaaaactgtaaattatgaaaatcgacgtcacaggtaaatatactaacatgttcaactttaaataatgcaagactaaaacaacggcgtcggattagaagtctaatctcccatgaacatcaatttctgagctacgtggcttcgtttgcctccacatttcttcgtatggtttctgtgcattcactgcatgcgcataagaaaaaaagaaacgccaattattgatattctttgtctaaaacccagaaataaaaaggttcgaaa

SEQ ID NO: 10861 - DNA, 3000 bp, Unknown; identical to SEQ ID NO: 10854
  misc_feature (1)..( 3000): cDNA_ID_2716702_gDNA_ID_2214456_Annot_ID_182640 3000 nt of promoter + ATG

SEQ ID NO: 10862 - DNA, 3000 bp, Unknown
  misc_feature (1)..( 3000): cDNA_ID_2716663_gDNA_ID_2214456_Annot_ID_132945 3000 nt of promoter + ATG
atcgattgatttatttgcagctgggattgaaaaaccataaccactttagaacatctaaatcaagcccctcataattctgtagttacagggataaatctagacatctgaccttagagaaaagtgtgttgaggcagtgaaccttctgtctttcttcgacaaaagcataatattgcgtgacacccataagcgtgagttgatccatgagattgataacatagggcttccggagatgtcgatccttaaaagccttaacagtgacagggaatgtggcggaaaacatcaaaaactgacgattttggggtagaaactgtatcaattcctctagagaaggttggaattctgcagacaaaagcttgtcggcctggagaaatcatttttaaggagtcagaaactttgaagcttatgacacaataaaacaaaataaactcaggtgaatataacaacacacaagaaagatcttcaaaattcaccaaagtaaggggtaaatgactgttaacagtagtaagtataactatgcatatgtatagaggatgataaagtcaaattttgagtctttgacagagaaaactaaagaataaattaagaaaaattccttctagcagtaatcctacagtttgttcatcatcaatttttagcaataaagacatgaggaacatacactgcaggagccataccacaaaacgaagatatacttaagatctagatattaggaaagcaatcaggagctcacctcatccattacaagcatcgcacagtctttcaaaacacagacacccttttttgtaagatccaatattcttccaggagttccaaccagcagatgcacaggttgatgtaatcgcataatatcatctctcagactggtaccgccagtggtgaccataacctggatattcaaatatttggaaagctccttgcaaacttgtgatgtctgaagggccagctctcgcgttggaactagaatcatggctgcatataaaaaatagaacaagtggttcaaggacaaacacaaacagtcaactgatcacttatcaactcaacagggaaaaagaagtataccttgaataacattgttatttgggtcaattttctcgaggactggaatgcagaaggcaccagtctttcctgtaccgtttttagctctagcaagaatatcactaccagttaaagcaattggaatgctctcttcttgaattggagatggcttctcaaaacccttctcatatattccctttaacagatctcttttcagaaagtaatcttcgaattcatttccctttgtagctgtcacatcctgcagacaatatggaagacattgctcaacacgagtttattcaatatcctcaatattcataattcctacacagaaaaactcagaagaaagcagccataccgctgtctgataacgagtatcaggaggtggtagccttaacgtagccttccagtcttgaccactgagagtaacagagaatccatgagcacactaaagagatataacttaacctcaaaataacacatacatctctaacagcacaaatcattactcaatgcaaacaaaatcattcataataattactccagcatcataatttgcaacaagacgtattcaggaacaagaacttacttagcatcgctgctagcttcgggctgggtcgtctgctgaaccacctcattagcgttactagcgtttccaggaagctgagggcgtcttgaccactgttgctgctgctgttgttgttgatgttgttgctggagttgcatctgctgagggttctgagaataaccgcgttgaacatactgctgatcttgaggtggttgttgctgccgatacgactgatgataatctggattcggaggcgcaccacgacccgttccaacacccggtggatatcttcctctgttagtattcatcacaaatctctctcgatctcgaaaactagacacagacaaaccctaaatctaccgaaataccttttacaaaactacaaagaatagaacgaaagagtctgcgataatctggagaaacagaatgcttgtgtaaaacctagggtttaaagaaactgatcgtggaactcagggcaagatcgggaatgttcaaataaaaaaccacaaaaccggtccgccacagaagaacggagaagaaagcgaatcgagagttccgattggaattacaacaatctaaagaagaagaagaagaagaagaacgaaagagagattaagaaaaaatttcgtttgagtgggttgggttacaggaaactagagaaagtgacgaatacactcgccggcgtcttttgttagggcgtcaatggattttctcctctttctttttttcagactctcactatttatcaaaatggccttttatgtttacgttaaataaatacatgacccataagctttatattatttacagtataactcggatttacttttctttcaggtattcaccccatgttgtattgtttttgtcattttagacccccagattctttgccctttgattaatgatatctaacaaaacaaattatgcttatgattattaaaagctatgcttaaaaggcagtcttgtgatgttagattaggtgttacttattttgtataaagatccttataattgtgtatatgaattaataacatcttaaaatcggaggctaactatatataaactttgcacctaatcccttggtttacacgatataatttagaaagcaaaacaaaaataagtgttaaataaaataaaatatagccagaaatagatttagaatgtagaagaacattttaagggctctcctcatttgaatctcaaccatcagaagaaaattttacccctaaaaatctcaatccatgattttgatataataaaaaggcagagagctcatagatgatggcaaaacaaaccttgattcgtgtctaaacgaacaacaaaaagaagaagaaaacttttgatccatcttccaactctttcgtaatttgaaagaagaagaagaagagataccaatg

SEQ ID NO: 10863 - DNA, 3000 bp, Unknown
  misc_feature (1)..( 3000): cDNA_ID_2716659_gDNA_ID_2214456_Annot_ID_132946 3000 nt of promoter + ATG
caattactttcatgatattattagtattgatgatcttctgtgaagtatttaaatgttttcttgttatattcgacatggcaggaaggtttcaagtgggatgaaatcatcacggagacttatgagttaactgaagaatgcatcaagataaactactatggaccaaagagaatgtgtgaggcgtttattcctcttttgaagttatctgattcaccaagaatcgtcaatgtatcatcctccatgggtcaactaaaggtaagtaagaaaagattagatatcaaggaagcttgagagatgtattgttggctaagaaacactatttatgttacaattgattattgtttaccagaatgtactaaacgaatgggcaaaaggaatcctgagcgacgcagagaatctcactgaggaaagaatcgaccaagtgatcaaccaacttctcaatgatttcaaagaaggtacagttaaggaaaaaaactgggctaaatttatgtcggcttatgtggtttcaaaggcaagtttgaatggttacacgagggtcctggcgaagaaacatcccgagtttcgcgtaaacgctgtgtgtcctggatttgttaagacagatatgaacttcaagactggagtcttgtctgtggaagaaggagcttcaagtcctgtgaggttggctttacttccgcatcaagaaactccttctggttgtttctttagtcgcaagcaagtttcagaattctgaatcttcttttgtgtgagaataataagccaaaaatgtagtaatttaatgagaggattatcgtttgaatgtcgaacatatactcttagataaacaaaaacttttatgagatgttttggtaattactcataaacttgaatataattactttacaaacagaataatatatagttccataagaagaaactaaacaaaatttgagtctacttcattgcattagttaagaaattatctctttaacaatttatgattatatatatttcacaaaaggaactcccggatatttcttaggattcatgttcttcagctgctgcatcagaagtttcttcttctgtagggtttgcttcatcttctttgggttcggttttgtcttcctcagccgtcgagcgacggtggttagccgcggcttggaggacatgattgtaattacctttctcaaggaaaagctggctgaagtggaccttacagtaaaggacgccatcgagagcagcatatgaagaatgtgttaatggacaaccactatgtgcacatctgaagcaagtcttgtggtaagattctccttccattgtcatcttctctagaggataaactgttttcttacaagctgcacatttgtcttgtgtgccgctaaagaaggatgataacctgtttggagccttcgtctatgcaaatgatcacaccaagaaatcagattagaaaacaaaaagagaaaacagaggaatgttgatgaattatgtgcttaccgcatcattcgatttctcggtctttccagctgtaaaagaccaagaagagaaagtagcaaagattgttagcttttcaagagaggttaataaaaaacagagcaaagaaaacagaggatttgttagcaacctgtttggaaattcttgctgaaatttccagattctttgaagagctgttcaaaatgggtcttgcaatacaaaactccatccatggatgagtagttacatatctgaaaaggagaagaaagatgttctctttgtgttttttttttcatgagggaacaatggaggaaaaggaagatagatagataccacgagagtgccattgcaatggctgcacctgaagcatgacttgtgataaggcattccttccaaagtcatcaagtccataacgtataccgtcttgtcacacgccttgcatttgtctgttgtccctgtaaacgccgccattggtatctcttcttcttcttctttcaaattacgaaagagttggaagatggatcaaaagttttcttcttctttttgttgttcgtttagacacgaatcaaggtttgttttgccatcatctatgagctctctgcctttttattatatcaaaatcatggattgagatttttaggggtaaaattttcttctgatggttgagattcaaatgaggagagcccttaaaatgttcttctacattctaaatctatttctggctatattttattttatttaacacttatttttgttttgctttctaaattatatcgtgtaaaccaagggattaggtgcaaagtttatatatagttagcctccgattttaagatgttattaattcatatacacaattataaggatctttatacaaaataagtaacacctaatctaacatcacaagactgccttttaagcatagcttttaataatcataagcataatttgttttgttagatatcattaatcaaagggcaaagaatctgggggtctaaaatgacaaaaacaatacaacatggggtgaatacctgaaagaaaagtaaatccgagttatactgtaaataatataaagcttatgggtcatgtatttatttaacgtaaacataaaaggccattttgataaatagtgagagtctgaaaaaaagaaagaggagaaaatccattgacgccctaacaaaagacgccggcgagtgtattcgtcactttctctagtttcctgtaacccaacccactcaaacgaaattttttcttaatctctctttcgttcttcttcttcttcttcttctttagattgttgtaattccaatcggaactctcgattcgctttcttctccgttcttctgtggcggaccggttttgtggttttttatttgaacattcccgatcttgccctgagttccacgatcagtttctttaaaccctaggttttacacaagcattctgtttctccagattatcgcagactctttcgttctattctttgtagttttgtaaaaggtatttcggtagatttagggtttgtctgtgtctagttttcgagatcgagagagatttgtg

SEQ ID NO: 10864 - DNA, 3000 bp, Unknown
  misc_feature (1)..( 3000): cDNA_ID_2716655_gDNA_ID_2214456_Annot_ID_132947 3000 nt of promoter + ATG
aactcacgcttatgggtgtcacgcaatattatgcttttgtcgaagaaagacagaaggttcactgcctcaacacacttttctctaaggtcagatgtctagatttatccctgtaactacagaattatgaggggcttgatttagatgttctaaagtggttatggtttttcaatcccagctgcaaataaatcaatcgataatcttttgcaactctgtcaatcgcgtggagctgttggctaagaaaatcacagaacttggttattcatgcttctacattcatgcaaagatggttcaagaccacaggaacagagtattccacgagttccgcaatggtgcttgcaggaatctcgtttgcactggtaagctttgtgttttttagcatgtactttgaacattgaccaagtgtagattatgatgatgatgatctggcttattggaaaatgactgcagatctgtttactcgaggaattgacattcaagctgtgaatgtcgtgatcaactttgattttcctaggacttctgagtcatatctacacagggttagtcgaaacaaaactggtttgtgatctagtttcttacatgttcattttaactcatgttgcgaaatgttcaggtgggtcgatcaggacggtttggacaccttggattggctgtgaatttggtaacttatgaggaccgtttcaaaatgtatgtcgttccttcttttcaatgttctaaccggtttttctattctgttaaagttttcttagtcatttatcatgttttgaaaacaggtatcagactgagcaagaacttgggaccgaaatcaaaccaattccttctaatatcgatcaagcaatctactgtcagtaaacttgtaactgtgcatgaaacgtgtctccacccaatgagaggtacaagatggttaaaatggtaagagtaagacgaatcctctctcttaggcttaacttgtcaaaacaacatttaaaatcaaaaagctatattgcatgtttaagaccagtgtgcccaatatttcaggtgtttctcaagctcgaggggaggagatgaggcaactagtacttggcggttcatgtaaagactcgttactcagtggtttggttcctaatctctcttaaagacacttgttatctggttctatggaaacctctttacgctgcacttattatgagactccctttgacttggttagtaataaagatagaacgtatgactctcctcttttttattttcgtgttgggctctgtttggaattatgggctttatcctatttaggatctatttatcatgaaagttgcacttcttaatttttgcttccacggaattattttgatttttccaaaatattttcttccacatgcttattattctagtttggtattaagctattttcgtcaaaatgtttgaaccgtaaccaatcttgttttatagtgttatatccattgagaaattatagttttcacgtgtttatttatttatttgggttattaaacataaatcatgtaaatctgaatcctgtggagatctctccctagttgatgaatagatatgatgaatttaattctttcatgaaataaaaatatatgaaacatatgtagcagaaaaagaagcatatctatgaaacaacaaacattcaaaaaaaaaaggaaaacggaaaattattaatatgaaaactacggctttgacttgtagctgactacatttacgacatatatatataaatggaccccactgagtgtctgcaaggtctttacacaacagtatcttcttctgtttctttgactctttgtgatccctaagcctacccataatacgtgtctacattttattggattgtttcgtgactctgtaatcttttttataagaaaacaagtaatagtgaaattgaagtaaatagctcagcacagaaacttcgacaaaaataactcacagattagaaaagaaaatatatgcataaatagccatggttcatttatgaacaatttattcgtttttttagtttataatttcattaaaacatgtttgtcacatcacatttcatgtccttcggctcctactacaacaacaagtcactgtcatctccattacttccacttctgctcctttctttattaacttgttcaaaaacaattctaagataaataacaataaatgttggtctctctttattatttcccggctaaagaaggaggatgtctcgtattatccgccatcaatgctcttttgtttcctgtttcttgcaatttgaatccctgagaatcctagcccacttatttactactttgccttagctgttttcgacatcaaaattttggtcatatgactcatatcaatcttcaaatttgataaaatatgttcccaattcacaaaaacaaaaaagttttcgaaagctcaaaaacctttaccatttcaatagtagataggattcttttagatttgcatttcacgaaaagagaagaaaaaaaatcgaaaaatatttgcaatcatgattttttgtttctgaaggagacctgtagttgctgtcatgaacattaaatacaaatctaataaatgttgtacgaattttgcgtgtaataaatggtcagggccggctcgaagctcgctgatcgtccttttttcgtgtctctatagcaacacacaatcgtatttatttcaaactttttttactttgtttcccatccatcaaatataagtataaaaatgtaaagaatcatcatatatagatcgtaaattcattgcttcctttggctttttatttcatctagacgacgttaaaaccagaccagaccaaatacatttatcatttttcccttttttctaaaattctctctttgattcctatcttcttctctttattttcactttgtgctttctctgtctctcctattatgagtctaaaagtctactagctgttcaatagttttgtctttctgtgtttcttcttcttcaaaaccgaaagaaattcaaaaagagtctttcgctgcttgttagtggggtgaggaacaa

SEQ ID NO: 10865 - DNA, 3000 bp, Unknown
  misc_feature (1)..( 3000): cDNA_ID_1012561_gDNA_ID_2214456_Annot_ID_132948 3000 nt of promoter + ATG
ctctgattggccaataatgttgtaatggcatcattcctcgtatgtagaaatcgtagaatcttggttttacatataatgtcattgagtcacatgccattatgtatttctcgctaaccgaccatgcccatccttctatatatatcttgtatctgttttaattccataaaagaagaatcgaagacttatagtaattaaaaataaaataaaaagtatagtaatactttctttctttttacctatgagtgcactggttctctagatttgagttcttgaatccttcttttgtttctttatcccaatcctttaaaagcaacattattcaaattcagataatctatcacaaaacttatatttatatcataatcttttggaaagtgaaatttgggagaaacctgaatatagagacgagtattccactcttcatgttctgtagcattacacttgagaagatctcctcttccaggatcaacataaggattacctctccaataagcgtacgccacgcggtccttccattgcgtcatactgttcccttcttttattgcctccaacgatttcccccatggttttacgttcacttcagccctggctcattagaagcccaaatattaacaaatcagtaacaacaataagccttttatcatcttattgggctgcttaccagccccaaaaggaccaatcagggaagacaatgtccaagcttgcgtcatctgaacagtaacggaaaactggaggtggttccttctgttgaccaataaagtcaactgatcggacgacgggacgatcatcagcgtcgaacattagctcgagatcaggtaatttaccagggtaccaccgtaacaactgtaagattccccacagagtaaattcatctcttgtttgtattgacttcttatatctcttaacgtacgccttcccgttacggatcaccaatctaaaatgcgccgttctactcgcttcttcgatcatccctctagttatccccgtttgtttccatggccgtagatcttcatggatccaacggaaataagaaggacacgtggatgattttgaactgttgttggggtttaatctcgatttgcggttttgtgagataggagtttgacttgattggttctgtacgaagtcgcatccgtaaggatttggttcttttgtctttgttgttagctttaaacctgcaaaagcattctataaaacaaaacaataagacaaattatgattatgattaacgttaactactgcgatttatattaaagataaaccaagaatgtaaggtgatattaaaacccacgaaatcgagatagcccagtaagtctaagatagcagctgaaatgaatagaacgacgatgaaaacagtagccttcacgatgctttttcgaggaaatgtcaccgttttattatgttggccgtcgttgttattcatcttcatgcttctgttttgtgtttatgttgatgcacgagtttatgtaataaaagattaacgagagagccgagaggatacataaaaggagaatcaacagaaacgcaacacaaaagtatgaagataacaaaaaaaaaaacatgatatgacatcaaactcatatatttattccctaaaacatacaataaagaagtttattgtttataagtaagagatgcatgtgatgtaatacaggtctagagattttgttttatgttaatagtatttgtatagacattttgttttaagtgacgtattatttattagtatttgtttccagtaacattaaatggtattaacatggcacggtctaagaagtcaatattttctaactacctccaactacgagagtggacgtgccaaattgcacttttagttttagtaagtacaacaagatcaataatgtaagatgcacttgataattaggcacattccagtcactaactcttatctttgtccatataagccattttaaattgtttttattgacttctttaaagatagcaaacactagttaaacacacaaatcaaagttttataaggtatgcgatatattaataactgacgctgtgaatgtgattaggccttttctgaagtcatgcttttcccacttagacataacaattttaccttcatccctattcagatggaaacagttggttaagatcggtttacgtccatggtttggattttggaagatatcatatcagtgttggttataggtaggtgttgtgttaagtgttaacatctcccctaatttttttgtaaaatcaaaagagcttcattaaaagttactaacttctatgcttgatgtctagtgagtagtgacttagtttagtaatggaacttaaactatgatatctgtacagttgtactaacgcttccgcatcatatagaatgatagaaaacaaatgtgtatttacggagcgaatctcggagtagtttggatcagtttagtctttttggaaaacaaatcctgtcagatagcttttggatctttcctaaaaacctctaaataaagaatatgaatcgagcccaataaattaggcccatcttatacggcacgtcttatacacgcgctcctacaaacatggataatatccacgcgccaatagagtgcgtggggtcacaacaactcagtatcttatctgtctccagcgtgtcttcctccacgtcacgctttcgtccgacatattattatttaaacagaaaaacaatttactaatgaaaacaaattgacatttgcttacgtggcatatgtttaaccgcattacctgtctgtcggcaagctgaatttttgtgttcggctgcatcgcagttcacgtggatacacaacaaatggatttataaccgtaggatctgatgcctttatatatcaacggataataaaataaggtatttttaaccccaaaaaaacgcggctaatacgtataaacatctttctgttgcttggaaataatatcttcaatttttcatatttcgtttttaatttggttttcttttttcctctctatttcttcggctgagaggcggcgactatg

SEQ ID NO: 10866 - DNA, 3000 bp, Unknown
  misc_feature (1)..( 3000): cDNA_ID_3038306_gDNA_ID_2214456_Annot_ID_132950 3000 nt of promoter + ATG
acgcaagcttggacattgtcttccctgattggtccttttggggctggtaagcagcccaataagatgataaaaggcttattgttgttactgatttgttaatatttgggcttctaatgagccagggctgaagtgaacgtaaaaccatgggggaaatcgttggaggcaataaaagaagggaacagtatgacgcaatggaaggaccgcgtggcgtacgcttattggagaggtaatccttatgttgatcctggaagaggagatcttctcaagtgtaatgctacagaacatgaagagtggaatactcgtctctatattcaggtttctcccaaatttcactttccaaaagattatgatataaatataagttttgtgatagattatctgaatttgaataatgttgcttttaaaggattgggataaagaaacaaaagaaggattcaagaactcaaatctagagaaccagtgcactcataggtaaaaagaaagaaagtattactatactttttattttatttttaattactataagtcttcgattcttcttttatggaattaaaacagatacaagatatatatagaaggatgggcatggtcggttagcgagaaatacataatggcatgtgactcaatgacattatatgtaaaaccaagattctacgatttctacatacgaggaatgatgccattacaacattattggccaatcagagacgattccaagtgtacttctctcaaattcgccgtacattggggcaatacacacgaggacaaggtccatatatctaactaaagatttcttacatctttaatctttacgtctgatttgtatcaatttaaccctgtgtttgttgttgtgtataggctcgtgagataggagaggtaggaagtagatttataagagaggaggtgaatatgcagtatgtgtatgactatatgtttcatttactcaaagagtatgcaacactcttgaaatttaagccggagattccgttagatgcagaggagatcacgccggatagtatggggtgtcccgcgacggaaaggtggagagattttaaggcggagtcaatgattatatctcctagtgaagagtctccttgtgagatgcttcctccttatgatcctctagctttaaaagaggttcttgagagaaaagctaatttaactcgtcaggttgagttgtgggaaaaccaatactttcaaaatcttaccaacaaaccttaaattgttttgttttttccttcttcgttgacgagatcaaccgcaaccaaatagttcagtcgtgggaggatcaatactctcttgatttgacttataaaccttgatttttttttctatcatcattaaccatttgtcgaatatacttttcaaagtatactttgtttatggtcttgttatatgctcatctcattgatccttttaaattagattatcagaagagatatgtaagtctttcgaatacatctacattctagctcgtatataaataagaagaagtgaaaaaaatttaaacgatttttggcatgaagtgattttgttgtcaaagtgaattaaatacagaaatttggagggcactattgttatattaagataaggtgggaactagtcctaaacttggcctatcatggcaaacctttttttctaatatcctgccaatctttttgaccaattgaatattctttttctttcttagaaatttcttaatcattcatctcatctcaactagaaagttttttttttcaaaagtaacttataatttctttcattgttggtaattttgtgagatcactcgggctccataagtctgtttcattgacaaaaagaaacaactgtaagaatattttctcccaaaattaataaattaattaacatggaatatatatacgtaggtgggttgacttgacttagttaggctttggctatggttctccttaaagcctttataaaataagccagcactaattaaatatcagtcatgatctttttaaaacacatgctgaaaattgtttttttttaaaaatcaaacatataattgtactaatttagacctccaaacccttaaatcaacccattttctacctcataaaagagatccatgataagtgagctctgcttcatctctttctagttcttgtgttcttgttgtgttttgtccgatgagagagaacacacaagtggctcaattcacagaagatcatcaccagagacatcaaaccccaataacttgtttaagctctaaactagcaaagatatggacattgttcaccaccaaaatcttcatcttcgtcctcttcatcatcctccttagtgcttctgtctcttggatgtatgcggtatatatttttctctttctcttgatccaccagtcatatctatatataaacctctttcttttggcttgatgataaattatacatataacaatatctcatacgacacgttaaagagaattatatattgtaaccagtgtgtgtttgtttgttttctctactctttaacccatttaaataatttcatattttgctacttatatacttgtattccgaagttggatcttaaattattttacgtggtgtcgttaaaaagtttgttttaggtgagaataaattccaagtgacatcaatattcacaagaaacaccaaaaaaagcactcccacaaaaacaacaacaactacagatatccccaagatcgccatcaagatcccattaaactgcacatcactcaacagcaacacaacacaaacatgtccttcaaattacccaaccaagttcgaaccagcgatctcttcctcggagacatgtcctgactacttcaagtggatccaccgagacttaaaggtatggcaaaagacagggatcacaagggaaacactagagagagcaagaccaaatgctcacttcaggatagtgataaagtcagggagattgtacgttcatcaatacgagaaagcatttcagacaagagatgtgttcacaatctggggaatacttcagcttctaagg

SEQ ID NO: 10867 - DNA, 3000 bp, Unknown
  misc_feature (1)..( 3000): cDNA_ID_2716632_gDNA_ID_2214456_Annot_ID_132954 3000 nt of promoter + ATG
gaattgcccaaatgaagctgccaacaatgaccttttaaggaggcaaacacacatagttaagcataagaaatctaaattcatctaaggaatttgataacaagcgtaagctcacctggacttggcttgctgctattagaggacctccaattccaccaccaatgacacgaccatcggggctagcaagtgagaccgctagacttccagtgcggtttgggtagtcattgtcagttgtgttcagataagaagttgagagagatatgagctcgaatagaccctataagtttcaaagtatacaccaaaataagtaatgtttttgtcttctaaaagataataaaatgtgagtgatgattcaataaaacctcgtatataatagttccatgagaaggtgctggctgaagaagagttgcagtagagacagcaccacttgcggataagacacatatcgctcgtggaccttgatgcgagaacgatataacctttgaagcaatgtcctgaaagcaacaccgagagtatggttatctcaagaactagaggcaagattacaaagaaaaaaaagaacagatttattcaagaggagacagaagaaacatacttcaccaatggaaactacgattacatgcggtgtgaagctcatcccagttgatgaaggcatcatttcaccttacaaaaaagaatcaaatgtcttcagaaaaatcacagctaattgtaatcagggagaaacagagcaataacaaagtttaagagaaaggccaaggaataataaaagaataaatattgaattcaacaatttgacattataaaattccacagctttaattaatccttaacagttcgaattagcttataataaacttcccaccaatgtcctcatttgaaaaactatatcatcaattaagctcaaaacttcccaccatattcagagccaatgtccttgtcggaaaataaaactcataagttagagattagggatattaccaatggaagatagccgttgcttcttgccggagccaggaggtcttccacggccacgtttgttagagttcggggaaacgttggagatagaaggagacaatgccaacgaaacagaaccaccatcttgtccatattttctaggccgtcctctcttccgcttcacagacgtgtcacctgaaggaggagcaaccaaagctcccgccgccgccgctgacgaatcagccggagaagagtcaacgggtaaaggaggagacacgaatccagtagagacacctccagggtttggatttgggtttgggtttgacccaaaaggagagatggaattggtgaaatgatgaaatccttgtgatccgtgaaacgttggttgagtttgaggaggaggaggaccagaaccggggattcctctttggatatagtaagaacccgacccggataacgccattgcgtctcttcgatccatagcttaaccaaaaagactctgactttaacttagtaaaattcgatggggaccctaaatggctaacttataggaggagggataagaagagaacaaaatcagaatctaaaagggttcgatagacttcaagagcaagataacaacatgcaaccgaaaatctctgaaaacttatcaaaacacacaaactttcatttcacctaattgttttttatgtagctttagtatcaagctatgagaaaatctcaagatgaaattagatccaaaagagaaaaggaaagaactttaattttcttcatctcttcttctctgtttcattctctcaccaaaagcaaagaaatgaagtgtgaataagctttctcatccatcaatcaacaatggtgaagaaaaaaaaaagttttctagggttctctctctttctttcttcagagtgtatgtgatgttgctttttttcttttactgggtgacagagggaaaacagaaacaaacaaaaaaagatcctttctccaagcatttactgtggattacaatacaatgggatgatgaggcaggatttcaaaattcgaaattaaatttgaagtctctgacttttgactgtgatataagctctctctctatctctctaatagacttctttctagcatctagcaatttgtaggagggatccatccatccatcatcatcatcatctttgtgtggctcattctcaacgctatagattaggtgcgtgtatcaaacgaagcattgggaatgagagagtgaatctcacgcttctgatgtcgagagtgagagaatagtgatgtgatctagtcaagactttctttgttcctcactggcttccacttcatcataagctttcaaaatttatgaatcccccaatctatctttagactctattttaccataaatacttgagactaatgattatatattggcattaagagacatataacatgaatataaattcccattttgtggagtaaatattgttcttgtctctgttctgttcactttaaatcttcatttttctctacaaacaataatcattaggacccaagagtttatcaacaatacagaatctgaacgtttagtactcatgtcatgtgaagtgaagtgaagaagatcaacaagaacattaattgtttgctataatcttctatgggccggataggaataattaggcccagtatctaacacatcaaacaaaaacacatcgaagtcgaatcgtcggtgggataattaggcccagtatattcaaacaaaataacatttaacagatccaagtccaatgttgtcgtggaacgaacgtcgtttagaataattaagcccagtatttaacatatcaaagcccaatgttgtcctaaaacgacgacgtttgaatgtggaacgtaaacaatcctggaacaaccgtttcaactacctttttcctatcacttgttttttcacctctcgaagtcctccgatttgctacccttacgcagcctcatgtgtcaaccaccatttctcttcttcatcttcgtctctatcaaaccctaaacctaaaaccccttattttcccgccaatgtatcaatcc

SEQ ID NO: 10868 - DNA, 3000 bp, Unknown
  misc_feature (1)..( 3000): cDNA_ID_2716620_gDNA_ID_2214456_Annot_ID_132957 3000 nt of promoter + ATG
aacatttgagagggggaggaggtatttatagcctccaaactacaaaatatctaaaatattttaatcctaagtctagagagttcttacataagatctagattacattattcaaattatctagattattctattagagtatctagatttttatgtttaaggaggtggaagatgattctagaaaatttctagaatcttttaaggaggtggaaatgatgatatttctagagaaaactctagaacttggatttggccataattaattattggataattgatccaataattaaacttgattcaaaatcaagtttaactttcaacatcgtatagaagatacaacactttataccagttgataggtaaacgtttgtatatcttccttttgtatatgtttatgttgtatatataatatgcagattcaactttttacacttttacataagtcatagtttgggtcaggaagccagttataccatatttgctttatttagaatccatttactatctcttgaaactaattctttagccttgttgtaatgttgttattgcacctaaatgaataagaatatgaaactcatctaagataattggcaaaactgctcatgaaaagaagagttttaaaaagctacaaaacttgagccaaaagcaaccatgactcagaagtgtatgtctattattcatctacaatctcggaaactaaaaattaccaaaaatcttatatagaactcatattaccaaaaattaaaaaggatataaataaactagggttttgaggggtggtacaaattcgttagctctattgtagtttgcttattaaatatcagacacaattcccaaagtctgattgctcgtgaaattttataaatagcaaagtatttgagcttaaaacaaccatgtcttacaagtgtatgaaataaaagacgaataccatcactagaacataaaagtaatctgagaaaataataaacgggctatgttatacgagcccaaaatcctgaaaactttgacacaagcttcacatcctccaaatgggtacaaggttaacatcctctaaatggtcaagaaaggtgtaagctttgtgactctgaaaagtttccattcctttgattttaactatagtgatagtgttcctatcgggattgtaatagagaaggtagaaaaagtcggatatagtgtttggggacaacacaatttcacctttacgagtcgttccaacgaaacataacttggtctcttcatatacattcctccacggaggaggcaaaacgtagatatgacttgaccattcgtgtttctccgcgtcttcaagaacccatagttgaataccggtgcatacgttgttaggcatgttgggctgaagcttagctaatttacccttgtagtttactagaattgaattcagccgccttcccaagtacaatatttccatgtcatgaccagcaactttcttgatatatttgaatttgtcagatccaaactcaaagcatactacatcaggatacctgtcgtcagaaacaccatggacaatggctaagtaatacaaaacaccattgatgcataccccatcatattgagaaaagccattagtatgctccacaggaacaggataatgtagtatgtcacattcgatcattttccttgacggtttcttcccggtttctaacgtgtgaacttgatgctcttcagaatcagctcgtcctatacatgaacgcgtcatgcataatactttgaaatttttgtcgatcggatcaaaccccaaaaagcttatcactcctttcctccttgttttcactttacgtaagaccacggattcccctgtgctagggttacatatcaatggctcagtaaccgtcgttccctttgtagttcgttgatgtaaaccacataaccagccacgaacaggacgacaaatattagagggacagctaatcgggaaactcatatgcaaatttgcggctataggagacagatcttgaggatgtggtgatgagaagaagaacgtttcgcagtcttttaggcatgtaaacaagatcttcggacgagacgaagatatggtcaagtaggactcggtgaaatgctgacctcgcaatgtggactgccatagcttcgatacgtaacgaaatctagctatagacttgacaggcaatctcaagagtatctcgattacgagatcgaacgggatccgttcggatttctcttcttctttcttttgattcgaacaagatcgtttcttgcgccgtgtcatcatggtggaggcggcttctcttaaaaccctaatgactttttttctcccttccgtctgattaaacctaataataatcataacgcttaaaacgtgtctctcaagatcctgggtctttctgatttaaatgagaatataaatgcctacatgtataaaattaatagtatgagggtatggctgcaaaataattaaaaaatgagctgacgattcaaaacgatgccgttgtggtttcttagaagaaagtgatcgtcttcttcttcgccgggaagctcacaaacggaatatactctactgttccttgcgacgtgccctgaaggtaacttcttctagattcctctcaatttctcatcttatttcttactttttcctcagtctcgtttcttctgagacgatttaagatctgtttcgattctgattttatttatttatttattgctggagttgtagatctgattgtatgtgtagtggatttgatgtaattgctgacgggtttgatcagtggactgtgagagttaaataatttggtttgacattggatctgtacttgttggaattcgatctgtttcttcatctttgaatgtttgatttgttgttatggcaatgctcttgtttatcttcaaatatcttgattaatgctgctcttgatcacaaaggccacttatgtgaattgctactttaagttagtatagggattagccatatctgagccagtgtttgtctctcttttggtcatgaacaggattttgtagaatcaattcaca

SEQ ID NO: 10869 - DNA, 3000 bp, Unknown; identical to SEQ ID NO: 10868
  misc_feature (1)..( 3000): cDNA_ID_2716620_gDNA_ID_2214456_Annot_ID_182666 3000 nt of promoter + ATG

SEQ ID NO: 10870 - DNA, 3000 bp, Unknown
  misc_feature (1)..( 3000): cDNA_ID_3038306_gDNA_ID_2214456_Annot_ID_182659 3000 nt of promoter + ATG
ttttttgttatcttcatacttttgtgttgcgtttctgttgattctccttttatgtatcctctcggctctctcgttaatcttttattacataaactcgtgcatcaacataaacacaaaacagaagcatgaagatgaataacaacgacggccaacataataaaacggtgacatttcctcgaaaaagcatcgtgaaggctactgttttcatcgtcgttctattcatttcagctgctatcttagacttactgggctatctcgatttcgtgggttttaatatcaccttacattcttggtttatctttaatataaatcgcagtagttaacgttaatcataatcataatttgtcttattgttttgttttatagaatgcttttgcaggtttaaagctaacaacaaagacaaaagaaccaaatccttacggatgcgacttcgtacagaaccaatcaagtcaaactcctatctcacaaaaccgcaaatcgagattaaaccccaacaacagttcaaaatcatccacgtgtccttcttatttccgttggatccatgaagatctacggccatggaaacaaacggggataactagagggatgatcgaagaagcgagtagaacggcgcattttagattggtgatccgtaacgggaaggcgtacgttaagagatataagaagtcaatacaaacaagagatgaatttactctgtggggaatcttacagttgttacggtggtaccctggtaaattacctgatctcgagctaatgttcgacgctgatgatcgtcccgtcgtccgatcagttgactttattggtcaacagaaggaaccacctccagttttccgttactgttcagatgacgcaagcttggacattgtcttccctgattggtccttttggggctggtaagcagcccaataagatgataaaaggcttattgttgttactgatttgttaatatttgggcttctaatgagccagggctgaagtgaacgtaaaaccatgggggaaatcgttggaggcaataaaagaagggaacagtatgacgcaatggaaggaccgcgtggcgtacgcttattggagaggtaatccttatgttgatcctggaagaggagatcttctcaagtgtaatgctacagaacatgaagagtggaatactcgtctctatattcaggtttctcccaaatttcactttccaaaagattatgatataaatataagttttgtgatagattatctgaatttgaataatgttgcttttaaaggattgggataaagaaacaaaagaaggattcaagaactcaaatctagagaaccagtgcactcataggtaaaaagaaagaaagtattactatactttttattttatttttaattactataagtcttcgattcttcttttatggaattaaaacagatacaagatatatatagaaggatgggcatggtcggttagcgagaaatacataatggcatgtgactcaatgacattatatgtaaaaccaagattctacgatttctacatacgaggaatgatgccattacaacattattggccaatcagagacgattccaagtgtacttctctcaaattcgccgtacattggggcaatacacacgaggacaaggtccatatatctaactaaagatttcttacatctttaatctttacgtctgatttgtatcaatttaaccctgtgtttgttgttgtgtataggctcgtgagataggagaggtaggaagtagatttataagagaggaggtgaatatgcagtatgtgtatgactatatgtttcatttactcaaagagtatgcaacactcttgaaatttaagccggagattccgttagatgcagaggagatcacgccggatagtatggggtgtcccgcgacggaaaggtggagagattttaaggcggagtcaatgattatatctcctagtgaagagtctccttgtgagatgcttcctccttatgatcctctagctttaaaagaggttcttgagagaaaagctaatttaactcgtcaggttgagttgtgggaaaaccaatactttcaaaatcttaccaacaaaccttaaattgttttgttttttccttcttcgttgacgagatcaaccgcaaccaaatagttcagtcgtgggaggatcaatactctcttgatttgacttataaaccttgatttttttttctatcatcattaaccatttgtcgaatatacttttcaaagtatactttgtttatggtcttgttatatgctcatctcattgatccttttaaattagattatcagaagagatatgtaagtctttcgaatacatctacattctagctcgtatataaataagaagaagtgaaaaaaatttaaacgatttttggcatgaagtgattttgttgtcaaagtgaattaaatacagaaatttggagggcactattgttatattaagataaggtgggaactagtcctaaacttggcctatcatggcaaacctttttttctaatatcctgccaatctttttgaccaattgaatattctttttctttcttagaaatttcttaatcattcatctcatctcaactagaaagttttttttttcaaaagtaacttataatttctttcattgttggtaattttgtgagatcactcgggctccataagtctgtttcattgacaaaaagaaacaactgtaagaatattttctcccaaaattaataaattaattaacatggaatatatatacgtaggtgggttgacttgacttagttaggctttggctatggttctccttaaagcctttataaaataagccagcactaattaaatatcagtcatgatctttttaaaacacatgctgaaaattgtttttttttaaaaatcaaacatataattgtactaatttagacctccaaacccttaaatcaacccattttctacctcataaaagagatccatgataagtgagctctgcttcatctctttctagttcttgtgttcttgttgtgttttgtccg

SEQ ID NO: 10871 - DNA, 3000 bp, Unknown; identical to SEQ ID NO: 10865
  misc_feature (1)..( 3000): cDNA_ID_1012561_gDNA_ID_2214456_Annot_ID_182657 3000 nt of promoter + ATG

SEQ ID NO: 10872 - DNA, 3000 bp, Unknown; identical to SEQ ID NO: 10864
  misc_feature (1)..( 3000): cDNA_ID_2716655_gDNA_ID_2214456_Annot_ID_182655 3000 nt of promoter + ATG

SEQ ID NO: 10873 - DNA, 3000 bp, Unknown; identical to SEQ ID NO: 10862
  misc_feature (1)..( 3000): cDNA_ID_2716663_gDNA_ID_2214456_Annot_ID_182653 3000 nt of promoter + ATG

SEQ ID NO: 10874 - DNA, 3000 bp, Unknown; identical to SEQ ID NO: 10859
  misc_feature (1)..( 3000): cDNA_ID_3038325_gDNA_ID_2214456_Annot_ID_182650 3000 nt of promoter + ATG

SEQ ID NO: 10875 - DNA, 3000 bp, Unknown; identical to SEQ ID NO: 10857
  misc_feature (1)..( 3000): cDNA_ID_2716690_gDNA_ID_2214456_Annot_ID_182643 3000 nt of promoter + ATG

SEQ ID NO: 10876 - DNA, 3000 bp, Unknown; identical to SEQ ID NO: 10856
  misc_feature (1)..( 3000): cDNA_ID_2716694_gDNA_ID_2214456_Annot_ID_182642 3000 nt of promoter + ATG

SEQ ID NO: 10877 - DNA, 3000 bp, Unknown; identical to SEQ ID NO: 9616
  misc_feature (1)..( 3000): cDNA_ID_2184267_gDNA_ID_2214456_Annot_ID_182672 3000 nt of promoter + ATG

SEQ ID NO: 10878 - DNA, 3000 bp, Unknown; identical to SEQ ID NO: 9616
  misc_feature (1)..( 3000): cDNA_ID_2184267_gDNA_ID_2214456_Annot_ID_132962 3000 nt of promoter + ATG

SEQ ID NO: 10879 - DNA, 3000 bp, Unknown
  misc_feature (1)..( 3000): cDNA_ID_3038417_gDNA_ID_2214458_Annot_ID_182684 3000 nt of promoter + ATG
tcctagctaagtaagctctactatatatagctcatttcattcatttgtaagttacagaaaaaagagaagagaaatagaaagcaataagaaaactcttgtttcgagttttattctctctagtcttcattattctttcttactttaatcctttataacatattatcagcacgagtataatatacgtcggttatgtatcaccgagtataataagatatcttgaaccacaaactggtgatttgtttacggtacgttttgccgattgccattttaatgaagatgaattcctagctttaggggggaggaattcatcaaatgcatatgcataaagatatagaatggtgcacaccatctttaaaatattttgatccccccacgaagtatcgtgagctggaagtacaaaagattgtacatttacaaagtatggcaaatcaattaccagattcgttcaccgatacaagaaaggtgacaaagtcatatatccccgctgcaaatgccccatcaagagttgaaattcctagtgagctggaattagatgggagcaaaattaatgaacctaaggttcaattaaagcgtgggaggcctattgactcaaaagataaaaatccccaaaagaaaaagaaattgggagaagaaaatgaaaaggttcttcaagaagaaccaagtcctcgggacgatagagaaaagtatgagatttctattaactatgcccatgatgatatcatatgggatagagatgatattgatgatgataatggaatattctccttttctttatctaaagagatcgatcaagagaatgatgatccagatccaaagacattatccgagtgcccgaaaaggccggattgagagaaatggaaaaatgccatgcaagttgagttgcactcccttaataaaagaaatgtctttggacgtattgtcactgcatctgagagtgtaaaacctgttggatacaagtgggtattcgtgcgaaaaagaaatgaaaaagatgagatcacacgatataaagctcgacttgttgcacaagttttctctcaaagaccaggagttgattatgaagaaacatattctcgggtcatggatgcaattacattcaggtacttaatgagcctttcggtatctaataatttagatatgtaccttatggatgtagtgacagcttatttatatggatctcttgataatgatatatatatatgaaaatctcggaaggattaaaacttcctgaggcattagactcatcaaagtctaaagatatatatgtggtcaaattacagcgatcactttacggattgaaacaatccagatgcatgtggtataatcgtttaagcgattatctacttaagaaagggtatgtgaataataaaatctgcccttgcgtcttcatttagaaatccccttcgggatttgtgctcattgttgtttatgttgatgacctaaatataattggaactccaaaggagattgatgatgcacgaactcatatgaaagaagagtttgaaatgaaagatcttggaaagacaaaattttgtctcgggctccaaattgagcatttccaagatggtatatttgtgcatcaatccaattatacaaaaaagattttaaagcgctttaatatggataaagcgaatcctttaagtactccaatggtcaatagatctttaaatgttgaaaatgatccatttagaccttgtgaggataacgaagattttctgggtcccaaagtaccttatatgagtgctatcggtggacttatgtatcttgcaaattgtactagaccagatattgcttttgctactaatttgcttgcaaggtacaattcatcccctacacgaaggcattggaatgggataaaacacatcttttgttatcttcaaggtactattgattttggattatattatcctagaaaccccgagtttggtatagagaatgtgtttggcttagatccatgactaatcatattcaagaagcaagtggattagtcatcaaaagagagccaacaaggatatatgaagataatgatgcatgtgttgctcaaatcaaagaaggttatatcaagagcgacagaacgaagcatatccctccacgattcttctcctacactcaaaaactcgagaagaacaaggaagtagaagtgcaatacgttcgttcaagtgacaatgcagcagatctattcataaaggcgcttccaacttctacatttagaaagcatgttcaaagcattggaatgcgtcatctacgagacctgtgaagtgtcttcgagggggagttcacgtcactgtactcttttttccttgtcatggtttttatcccaatgggtttttccatgataatgtttttaacgaggcagtacgtaactcatcaaaagtgatggatactcaagggggagtgttattaaccggataagtatggatgtgattattcatcactcatctctatccctaatatatggattatgtttatccattacttcttctctaagatatggatgatgtttatccattatttcttctctaagatatggatgatgtttatcaattacttcttcgctaagtaagctctactatatatagctcatttcattcatttgtaagttacagagaaaacacagagaaaatagaagagaaagagaaagcaataagaaaactcttgtttcgagttttattctctctagtcttcattattttttcttactttaatcttttataacactaatggtgttgtttaaaataaaatttgttatgttttattattgttatatgatgtaatgtttttttaatgtgtaatgagtgtttaatttaaataatatcatattttatagaaattttgcaaaactataatatgtggagttaaattttaaattctattaataaaaagtattattatataaaatagaaatgtaatatttctaagaatgtttcttttaagagtagaaaatagagagatacattggaaataaatcctcttctaaaatagtgttactctaaggtctagatg

SEQ ID NO: 10880 - DNA, 3000 bp, Unknown; identical to SEQ ID NO: 7187
  misc_feature (1)..( 3000): cDNA_ID_1816958_gDNA_ID_2214458_Annot_ID_182714 3000 nt of promoter + ATG

SEQ ID NO: 10881 - DNA, 3000 bp, Unknown; identical to SEQ ID NO: 7185
  misc_feature (1)..( 3000): cDNA_ID_2174764_gDNA_ID_2214458_Annot_ID_182710 3000 nt of promoter + ATG

SEQ ID NO: 10882 - DNA, 3000 bp, Unknown; identical to SEQ ID NO: 7186
  misc_feature (1)..( 3000): cDNA_ID_3038365_gDNA_ID_2214458_Annot_ID_182711 3000 nt of promoter + ATG

SEQ ID NO: 10883 - DNA, 3000 bp, Unknown; identical to SEQ ID NO: 7188
  misc_feature (1)..( 3000): cDNA_ID_3038361_gDNA_ID_2214458_Annot_ID_182716 3000 nt of promoter + ATG

SEQ ID NO: 10884 - DNA, 3000 bp, Unknown
  misc_feature (1)..( 3000): cDNA_ID_2716736_gDNA_ID_2214460_Annot_ID_132965 3000 nt of promoter + ATG
ccaccacacaaagacgcatgagcacaaaagcggaagaagacataagctcattattgtgagtagaaggagaaagtgtcaagtgattgaagtattgaacatatattaaaaaaaaataagagaaaattcttttttaaaaaatgtttgcagaagagtgggtgaaaatttgagtcagaacttagaagaaatgagaccgacaaaaatctaattttttgagtaaaacaatgaaggaaatatgagtctgatgaactctgacacaacttttgtttattatttggttgcaatgaaataaattggggttaacgtgcaattcaagcaatctctcagtgataatgtattcaactattcatatactacagtcttctccacgaactatccacaaacattaccatatatataatataatatatacacccacccacacatatggacttctgctcccccattaaaaaagtatctaatcaagttttcagttttatatcagtttttagtttggacaaacaagattttatagataggttacatccattgaaagaggagttgattacacaagataataacaaagccataacaattttatatcgttttgggttgggaaataatctataaaaaaaaccaaatagaaaagctgttacagttttgcttaagttgggcttcttaacaaacaaaatctataatatgaaagtttttttaaagatcagtttatgtttagcttctttcggtttatagatgtagatattttctagcataaacattagactaatgtgagctatgcctatgagtttctcgtaattattcgcaattctttttttatcatccctttattagtctctatatcttcatttctttctttctttctttttttttctcttcatttcacattatatgaagatgttttctaacataaaaacttaaaattacataatccgaattagattgctacgagctatgcattttcttgtgatatttcacaattctttttagtaaaaatgtctcattcagtgctaaatcacctctaggttttttcctctttttttgaataccaattcacctatacgttagttgtcataaatacgtcttttctaacgttggagactaattggagtagttaaattaaatgactcgaactactactactatagagaatactagttacttaggtataataacatattatatatttctatcgaactgaaaataattgaataagttatagtatatccaaaagaaaaatagctttcagagtatccgacacccacgtgcaaggggaatgaataaagtcataataaatatttttctctttaagactcccacattcattcgcatcattatcacttttttttattcaccattttttcaatgaattgcattattgtatatttacttgaatacttccacacattagtttactaggttatgttataatataacaaacacatacagttaatcgacaatgtgtaaggataaattattgagctaaatttattcatcaatgtatgagttttttctgtcagactgtttaataagattgacttatgatatgaataaatgactgatgggtcgaaaccagaataaaaagctattttaattatgattgcactaactttaacgtgtcctttatttctataaaagataaagaataaataatcaagaaaaaagtccttaacagaaaaaaaaaaaaaaagagaaaaagaagtgagagacagcgaagaaaagaaaagctggtaacctcatgggatgttttggctttgctcaattatttcgaacttttgatatgattttgttccattccttttcattaatcggatgtgaaagctatctacttcgtttattgtataaagtgatgaagaattcttacaatctgaatgtgaaaagtaaacagttctttggctatcaggatttggagcagcgtttaatgcggcatggaaacggtgaacatccgtgatcactttaaaaaaaactatggcatacacaaaacttctgttttaaaaataagcgtataattggcaatgacagaatttagcaaaaaatgatgatgatacaaattaatggtgattgtgtgacgaaatttgacaaattagttaagagaataaatgataacaaagatgaccgaactaaagatttagttaattaaagataactcaaaattattgaataacatgcatgcgatttctctggttcacatattcttgaataagattacaaaaaaaaaaaaaactaatagaacaaatggataattaattatctgacgatttaacaagaactatattaataaaggttatcaaaagaataatgttttgactcgtaaaattaaactagtcatatgtgagctattttgaaatattcaaagatttacctagaataagaatttattgagaattatttcacaaacttaagttgtgatattggtttgttcgtcgcgttttttgtttcaaccaaatttcacccatttaacctgattaaactattatatactataaatgtgaattttcttatattttggttaacaaattatattatattatatgggttaaaacttgtgtaataacgtagcgataccactaacataaaacaaaatattaattttagctagtgtaacaacagtttcaataatattttccctttgatgtaactaagcatataattttagcaactataacaacagaaaattctatccgaatagcaaaaagaattattgaagttgatgtcattaatgttaacacagtctaaattaaaaattattttcataatttattattttttcacttaatgttttttcctcttgtcccctataggcgttagttactagtattaattgtccactcgtcgcggaaatgtaacacacattcctcgctctctctctctctcaaatcacttgcaaagacaaagatcttccacttcctcttcttcttcctcttcctttttgcctttctctgtctccctctagagtctcttctatataaatatcactagatttagtgtttgatcaaatcacattcaaca

SEQ ID NO: 10885 - DNA, 2096 bp, Unknown
  misc_feature (1)..( 2096): cDNA_ID_2716713_gDNA_ID_2214460_Annot_ID_182731 3000 nt of promoter + ATG
ttcttcaagaactagcataggttgctagctagatcaatgggtcctaaaccttcttaatgggcttataaatcccaactgttacaccgacatatttacgagttttgtggaaggcttagctaattacattttttttctttcacatgttagctatttaactaattaattatgcacctctccatcgttatccattaaacgtcaaagacaaaaaatacttggacacacgtaagagagagacacatatatctgctcaaatgagtcattacaccttattttattatactttttcttaactgtcttgttcctttttttagtcttcaaattatcaactttgtttctttgatcagctttgtcatcttgaaattatcaacgttttgactaaatttaaagaacagttgtgttcgttcgtgccattcttttgaatgcttatacgtacatttcttcttgaaaagactttgaatccaagaacccgtgaggaagtaatcccagtgaagagaagacgacaaagaaaaaggttaggcacattttcccatatttttcctcaaagaggagacattatttatctttgtatgggttttcttgataaagattagatattgaaggaatctttttttcattttgtgtcttttaggagcctataaagatccaaagcttcccttgtctttagttctcatcaaaaaaattgaaaaacgtttggagttattgagagagagagagatagagaaagatgttggaaggcaaagcaatggtggaagattcagacatgccagtgaagatgcagatgcaagctatggcatttgcttctcaagctcttgacctttttgatgtctttgactgtaaatccattgctggtcacatcaagaaggtattagtaatgattttcttcaattctatttataagtcataaatacatcattatcatctatatataactacttggttaattttgtttgttctataatgaattttcaggagtttgatgagagatatgggagtggatggcaatgtgtggtgggatcaaattttgggtgtttcttcacacattctaaagggacttttatctattttcaattggagacacttaagttcctcatctttaaaggcgcttctactccttaattacactaccctaatcatggggatgtttttttttcctttttcttttgcttctatgaaaatctgagaaaaaaaaatcttgctaagactatcaagatctttagctttgtttgaattctaagtttgtaaataggcccaagctaagagaggaagttgatttcaatgatgtaagatttttcatttttacaagtgtttgcttttgtgatcaataaaagtgaaatgcagaagattttttatatttatattcttttagttgagatgcaaacaattataattgcccagccacaaatagagaatttcttagactgacttagactaatctatcattagcataatataaatttattttaaacttttactttgatagaaattcagagagaggtcaaaattgaggaaaacattatcatccataatccttaatttagttgagaaactgagatttttttaatacaacaagacataaacaaaaatgatattacagataatgtcagtaacatgtcctccctacatctcaatgtttgatttaaagaaaaagattgagattttttttatgtgtgtggagaaattcaactttcaaataacgtgcagcccacattccaccaagtatcaatttataaatagtaaaacatttcaagaaaattaaaaatatcctcttatttttttcccctgaagaatctgaccaaattcactacttgtttatggttatggacaacgaatcataatagttactaaaataatcaggttaaaactaaaaccattaacagaagtcaaatgatggtgttctgtatttgctaagtctgaaattaaaatcaaacaccgttttttggttaattaagtttgttttttcttcatgatctcctaaaactcctctttattacacgaagaggagaacaaatggagattaaaaagaattttcaaatcatagaaatcttttcattttttttattgttttgattaactagtaattaatggtaaaagcaatg

SEQ ID NO: 10886 - DNA, 3000 bp, Unknown
  misc_feature (1)..( 3000): cDNA_ID_4254434_gDNA_ID_2214460_Annot_ID_182730 3000 nt of promoter + ATG
aggaaaaagaatcataagagtcagaattaattaattacctgatggtaaattcctgcccagaagagaatcagagcagtataggttgtgaagaaagcaagactaggaatatcaagcaagatatgttgcataatctacaagataataatccaagttttgcaaatttagaaaggctgacatagaaatgtttcaagtgtttaaatttgtttttggatcatagagtttttttttaagtttataccaattttcaatgaaaaagtagaaaccatcctacatatatgggattctccttaaactttctgttattatccatgaatgttttactttaattaaacatcaacatttttgctatatgagagtaaagttttgtgtgggaaaaaaaaaagagagcaaagtttggtaaaatattattttttcatccctagctattacttcttttgtattacatatcaatgttttgtattatttgtaaaaactctgttagttattctttttcagatcttattgatacaatttaggtattcattttagtaatataaacacacataaaaaaaaaatcacatcaatcaatttttcatttaaagcaagtataaatgtattaactaaaagcagaactaaaaaagttacgaatcaaatttagtaaaaaagaaaagaaatcatactcaagcgcaaaaaaaaaacagaaataaaatcataattccaaatctaaatttttttagttttcgacgaaattgagagatttgtttttaataactggataaataatcttaaatattcaaaagttaagatcaaaatcagtttaaactttaaagactacaaactttcaagagagccttaaactaaaaatgatgatgaagacccttgaacctgtgaatgcatgttaagcacattccgcctgaagacaaatacaacagccctatagcatatatctatagatcatcttaaaaacattacttcttcttcttcttcttcttcttcttcttcttcttcttcttcttgatgaatgattcctctctttttagggttattatttaaagccaaggactaattgtgatttgtgaatccaaatgtttagttctgaaacctcacctaatgtctcgaattcagagtgcatatgatacttattggtttcaactgttttccctatcctccatgtctgttttaaatgtggccttcttaaattgtaggtgatggaaaagaatattgaacctattagtgagaagaaagacatgcacacaggagatgtggcttctccaagtctgaaggaaaattcttcgcagcttgagagtaccagggacctaattatggttgccgcaaatactaatttatggagggagagcttgtttggttctgctaaggtgacacctagttatttcttttggttggtgctctaattattcccatcatcatgcagaagattgaatagttttatcaagctgttacgttccagtccagcaagaaccatagtttatgcaaacaagatttataaaagaaccttaatcattgattttagggtttatgtaccagaaaactgaaaacaaaacaaaagccagaatcgtgaaatagaaaaagggcttttggatttgagaaataacaaatttgttgaagctctgaacttgaaaaattatggcttttgatatgcggaaacaataaaattgaaaccctgatttaaaacgtataatcataaaagagaatctttgaaattagaaaagattgattttgctcacaaccaaaaaccaacaataaagtatttacaggtttcaaatgcatgacattattggactagaaacaacaaccaccctgtcatgtaattttacaaacttgcaaacaaatcatcttccaaagatgaagtattatcacacacacaaggttcactggccaagtatatccgctactgatttcttgacaattttcgaaagctcctgtctgaaaaaataaacaaagacttaggttaaacaaaaacaccagcattcgatttcataaccgcatttaaagaaaaaaaaattacctgtccggtttgaacaagagatatcgatatgtgaaccactgcagaaatggagatatcaaatgctagaagaatcaaggatcataacatttatacttattgagatgataccaagccttattacttaccgtggagaacaagataccaactagttcgaatccgctcgagataacgggcaatttgtcgattgcctaacgaagaaaaagaacaagtctttgtcatcaagtctcacaaaattaagcacaacaaaagataaaagttttgagtcttttcattactataccgtgatgagattcaatgatgcccaaagagctacaataccagcaaaacccaaaccaataagacctaacctatcttcagacttatcccactgcaataatttacaaatttaaaaaatgtccaaatcaaaactaaggcatatatgtaactgagaacagagtctaatgtagggtttatagagatttagggactcacaacattctgaatcgtactaacaacgtcgagatcagtcgatgaatctgagctttctccactagctttcaccatcagactgatgctgctagggtttcgagtaagagataatggagaaagatcattcgtacctcgagttagagaaaatgggagtttttgaatcgatgtgagattggattttctctgtgtgagtaacaatggcgaaggcaaagttgcagaaattgaagccattctttaaaaaaataaaaagaacagaacaaaaaaattgaaactttagagattttgattcgattttggagacagagacgaagaaatttttggttatggattagagatagccttatctttttataatccacgtggcatttcctaagtggcatatcaaatctcaaagatgacaacccaattcgccacgtggcagaacaagatctatcaaatgagtgaagaagattctccactatacaaattacatcaatccactcacttactttggcaacaaacaaacaacaacaaagagagaaattaac

SEQ ID NO: 10887 - DNA, 3000 bp, Unknown
  misc_feature (1)..( 3000): cDNA_ID_2716724_gDNA_ID_2214460_Annot_ID_132968 3000 nt of promoter + ATG
cattccaacctgcaattataaacaaaagttttacacaatttcaaaatttataaatacatatcatttttgattattaagaaatttctctgtgtttggttaatattatcaatagattcgaaaacagattaatatatcatatagttgtgatggatctacaaattgaaaaccatgcatttctatgcacatatgtttatactcaaatcttgttatataactatgatcggagttcatgcatgtttatactataaaaatcataaatgatataaccaaatagttttccggtaatcgattaaactcaccacacttgaacacttatatcaaataaaattcctggaccataaatatagatttgtatctgacgttttgagttagtacctagagaaggatcaagattcctaatcttgagctctctgtattcttgacaaagagagcaacaagggcataggacatgactggcacaatctgaatatggagcttccacaagattaaattttctcctcattttttctctatactttgatcccatcacccagtgagagcataaagccggcatcatcaataagtacatgaaagttccaagaggacaagctgcataaacaacgcaatatttgctattaaaaacatcatatttaatgaagaatctgatttcggtttcaaattgtgtaaagcagaacatactcatctctccttcatccatcacttctgctatttgtccaaatgttacacaaggtacaattgtggtcaaaacggctgcacaacaaagtttttaaagattagtgagtcaattaaattatgaatctcttgcaagaaatataaatatctataatctcgtttaaaagtgtatttgggatacaataccattggcttggtctgcttgacaatcaaacaaaccagtgctccatggcctcccaacagataggttaacattagcttgctgataattcggcggcgcgaattgactcacgggaactctggttcgctggttcggtgtaccgggttgctgaaccggtaaaccgttgtttgaatcctcctcggatggagtagtgacacgacccattggttgatatgttaagtgtagcaagctagttttgacgtgaagggttgatttataggagaatttgagaaggagaaggattctatatttccttaagccatgaaattaatcaaataatattcaatagaaaaattgagtttttcttttgatttaacgaataaacttctatgctgaaaagaaagaagaaattttgaatgacgtagttcacatttaagttttgacttttcaacggtcgatatgtttaaagtcaatggatacccataataatactgagtaaaggtctcaatcaaagtcaacgtctcgaacctatccttttgataatttattttctaaaacaagttgcaaggaaaaacaaattaattagattcattagtatactcatcaatacatagtatatatatatatatatatatatatatatataatattttggtacaagtagtgttttggatagataccaattttttttttttatatagaaaaatatctatttttgtcaacactcaaaatttaatcggaaacttatgaattccattttggatgttctggatataaaatatctatttttgccaatagggattgaccattccactttgtcaacttctttccttgtaattgcagcaagtgtttaaacttataatcaaattaagtatgaggagaagatacatgaaaatcgtatatagagaagagaaatgtcaatattttatacatcttcacaaataaatagactataacaacttttatttttatcaaatattacaaagatgccattattatcatctaatgtttttcttttagtaggttaagtttgattaccataattgtatattttaagatataattaagatatatatttacatatattattgtgggggtgatttccaacatgattaattataagatatcatacatcacctacatgaccattataagatatcatacatcacctacatgactaacataaatcaaatttagacagggctatcttggtagatccggcctttaacacaaagttacaaacaaagacattggggtagcaatatttaaaatttgtatcataattggttaaaaaacctaaaagacatgaagaaattatgtcaaaacagatggggtcaatcaattaattaaccgcattagacttgaaaaaattgtgtcaaacagatttattcaaaagcatgtaaatggagattagaccatcaagatttaaagcttagattattgaagctaacatccaaatgagatagaaagcttgagattcttcagagaaattatgggattaaactggtctaaggatcattaactttcgtgtacacgtcgttttggtggcaggtttctcaaggtgggcagaaccagagaaacggtaatatctctaccaactgtaattgagcaacaagattaggtttcaagcagaaacaatggtttgattatgtatgagacagatgttcatgatcaatttttatgattagtttaagagagagcttaccaggtaatatatgagattaaggattggatgatccatcatatcatgggtttcttcctcgtagaaagcagcgaagcatatctaaaccatattaaatgaataaacctttggttagttgtccagtctaaaatttaaaccaagaaggtaaggattaatagatatcaagataaacatgtgtatgtgtgtgtgtctctaccaagatacaacggatgaggaaacatgtaaagcaaattgttgtcacataaccaaccatacataagagagaaagagtgtgaagagtcaagaagcgtcatattgtaaatattgattggttatgattttgtacaatttgatgtttcacctctttcatcttttttgctatgccctttaaattctactagaaaccgatccaacattaggctgccaaaagatagacataatacaaggataagaaatcaagctcttttttgataaaccaatgcatgcc

SEQ ID NO: 10888 - DNA, 3000 bp, Unknown; identical to SEQ ID NO: 10886
  misc_feature (1)..( 3000): cDNA_ID_4254434_gDNA_ID_2214460_Annot_ID_132971 3000 nt of promoter + ATG

SEQ ID NO: 10889 - DNA, 2096 bp, Unknown; identical to SEQ ID NO: 10885
  misc_feature (1)..( 2096): cDNA_ID_2716713_gDNA_ID_2214460_Annot_ID_132972 3000 nt of promoter + ATG

SEQ ID NO: 10890 - DNA, 3000 bp, Unknown; identical to SEQ ID NO: 10884
  misc_feature (1)..( 3000): cDNA_ID_2716736_gDNA_ID_2214460_Annot_ID_182724 3000 nt of promoter + ATG

SEQ ID NO: 10891 - DNA, 3000 bp, Unknown; identical to SEQ ID NO: 7401
  misc_feature (1)..( 3000): cDNA_ID_1817544_gDNA_ID_2214460_Annot_ID_182719 3000 nt of promoter + ATG

SEQ ID NO: 10892 - DNA, 3000 bp, Unknown
  misc_feature (1)..( 3000): cDNA_ID_2716786_gDNA_ID_2214461_Annot_ID_132974 3000 nt of promoter + ATG
agaagagctggctatgtggccatgtgcttggtgcttcaatttccttataaactactcacttctaatggaaaaatggctcagaagaatatcaactaaaagtagataagatatattgtctttaagctacatacaagttacaacgatccatttattagtgatagcgttatcattttatttttatactattgtaaatttactagtaaactataaatgttatatacggaatgaacgtttagatatctaatatatttcctcaaagataaacactttcaaagagatatatccatggaactgggtattatatttgtatatacgaactttactaataagtaataagtatatttttataatcgatatatacgtaggctatagtgggaaatataaaattctgggcataaatatggctactaaaattttaacattaaacaatgtacacgaaattgtttagaattgttatgtatgctgtaagttccaacgaaaaatacaaaactatgagcaagataatatatataaataaaagaaacgatgatatatcatttgtaagcataagtatacatattacttttctcttttagtgttatattagtgtaaataaaatatagtgagaaaagggaaaagagagaggggatgcatgtgactggcacgacatgaaggatagtggttcgatgtttggactttgtttaagtgttagcaaacgatctttcgttgccatttcacgttgccacatatatttttattaccttttcattatttttaatttattttgtcaacggtcgaattacggtattttatgtacacatatatgaatatatgataataccaaaaactcaagttggactttgggaccgactttcgtgagggatcttcctattgagtgaccacttctaaattgaaatcataaattctattaccaaaaaggtcgagactaatgcttagattggtagatgcatacatatttcccttgatatgacatttaaactctcaatccggcttgattagctcgagtgaaagagtatcaatatatagtttagttatatattttaaaaaatgttcttgattatattttatgaaaaatggatgttttcttatgaaagttttagtttcaaattttgtttgccttatctttgttactcggtatatatattcaaagcgtgtaattacatagattgataccttgatcgtttggataggttaaatatgtgtgtgaatgtgcttagccttgatcgtttggatatgttgttgtatttgcgttaataaagtagttaaaaaaaatctatataacaagagaaaaaatgtaggttctttgagtagatttgtgaaattattttccgattgtattgttcaccaaatgatcctccactttatttgttcaagtaaatgatcattctgctaactataaacaaaaaagaaatgttcatgggataatatctcttgtcgaaaaaacaataaaaaattatatgaaaactattttttttaaaatcctattatgtaaaatattgtttattgtttaaatagaaacgctaatgtcaaacgctaaattagcattcttttaactttgtttcacacaaattaaaagaaaatactgatttttgtgagttcagttttttttttttttaaacattaaagaaacggtaacagtgtttggaccaaaccaaaaattggaacgggacagtttttccaataactttttgtgctactgttcaatgtagatgggcttttaaatgtaaggcactattgagtctggcgttttcaaagcccagtaggagagatgtgtgatactttttagtttttaaagaaaggaaaaagggcttttgagctgctagatagagaaaagtaatcgatataaagacgtttgactcagaaaattgcatataaaagttttgaagctttgcttggaggaaaagcaacaattcgtctttttggagatgagaattgacttcacaacgcatttcattgacttttcgttgtaatttgtaaactaacccttacgcaatttacttgcaacattcttataattaacaaatatcctattcatatcccttcaagccttttctctctttataatttttttgattatttccagaaacttgtgcggaaagtacgttttcaagtttgatatcttcacatactttttttttaaaatatgaatgaagaaccgtacgttgtgatctatatattgtaggttaaattattgtgatccgagtaagttatatcgtcacttatcaagaatttttggtccacataatttgttcaaatggatagaaagttcatctaataatatcgagttaaaccatttacgaaaactgatgttgttcaaatttctatgaatttcggaaatcgttgggtgtcggcatattatcgatttcatatttgaaaatataaatatatcgtcaattataaaatttgaaacattataacggatatgaaaaagatgatctgacataaacttttggaattaattactatgctagaaaattctatgagattagtagatagataacttggaagaagaaaaagggaaaattagaaaatgcagcagaccaaagtagtgataggtggtgcacacgtttttggtgttgacctacgacaacgacaacgacagacaaaaatttatcatcatacaaaacctttctttgtctttatctcattttgttttcttaatatcctctgtttcttcttctaattttctctgtttttattccttctacttctgagatccataaagattcatctcttattacttcatcggaaaagaaacctcgatttcagttttcttgatctctctaatggggaattgcttggactcttctgcaagagtaggtaatagagaaagcacttttggaggtaagaatcaaaaccacacttctcttctcgaatttcgccttttgagaattatgatggatatttgatagttgatactaggtttctttaattctctttaattatataaagcttctatcaaaattttcatttaattcccaactaaagtttctacttatg

SEQ ID NO: 10893 - DNA, 3000 bp, Unknown
  misc_feature (1)..( 3000): cDNA_ID_2716778_gDNA_ID_2214461_Annot_ID_132976 3000 nt of promoter + ATG
aaggaaaaaaccaaacaaaactactatttgattaaccccacataagagctgttctatcttgtctctccctcctttcctcttccattcctttccataatcaatctttctttttattttattttattattttcttaatttctcttcccaacatcccttgtgccgtattcatcgatgatgtttactctaacatcatcaaccacataattattaacattttaacgttcattttcactttcgattagactactattcattactttgagactacttatccgtctctaactgacatttcacgcatcacatcgtgccgttctgcaatcaaaacttttgtatcaaagtacttttacttatccatgcatacatatagcttcacaaatacccgaatatttattgaatgagtatgatttaatttttattttgtatggaatgtgaatgacccaaaaagttatttttttttttggtaaggaaagagaaattaaagaagttataaacaatctggtttttagaagacgagtaaaaattgttaatttcaactaattatttttagtactcaagtatatattatatttattggcaaaacataaaagatgtaaacatctagatacattttaatccattcgaagaacttaacaaaaaaaaatttcatacattatattacattcggtgtggtacagatcgcacggtcaatcaatctaaagatcacttgcggtgattgagcgacgttgtatgattttatccatacttcatattgtttactgttatgatccattcttcacaagattgactagacgcgatatatgtgcactcttatcatcaagaagtgaaatatagcgtatgattagatatgtgaatttaaaggctagtcttacaagttgctagcgaatttggaaaacttgtatagtcgtttttttttttcggtatgatcacccaactttgacgtatctatttcagacactataaaagcatatgtttcgattactgtttatccaaatggaaatgtctcgcccaaaacctcaacatgaaagtcaggaaagtccaacaacgtagttttcaagaagtcacaatatgtccctcctctcgtgtcacaccactcctagtcctagcgaactagctgcatagtgtaaaatactttatatatgaaaaacttagacataaatatatatatacgtgtgcgtgtgtgatgcatgtttattgttttttattcaggcctatatgcattctacatgttttagatcaagatggtgatacagagacactactaatacaaacacttgcataaatcctctatgattatgtcattcgtattcattattttaaaaagaaaatttacgtcaatacttgaaatacattaattgatatatgttttcctagttttggagaaaagggtggtgttcatatgttgcaaaacacaaacatgtaaatacagcaaagaagacatagtggacccatgacaagaaataaggcccaaaagttgggctaatttcagccatcacgacaaaggctacttctcatttcgacatccatattattctattcttgtacacttctctttcattcactcgtcattaatatgccttcaatctaatatatttaaggacacaattatacacacgtccatatataaacttatattgttgccttgttggatatatataaaagttattgtaattagtagttactagttagagtaattttcaggtctaatagtgatgagattaacgtattttcttctttaaatttcagttatttgcaaataatgtcactgctcgatttcctggaataaaggagctaataagagtatcatgttctccttcatgttaccatttcacgtttgcacgttttttttttttttattatgaacaagattacgatcacacgttcggtttgttgtttagtcgttccaagtgtataggagttttatccacacaaaaaaaattttgataggaatgtgtaattccataaagatttccatcgttacacactaaagttttatcttacgcgccacgccgtttgtggagtaaccgagtaactaatttactactagtcttgatgttggtaggattaaataaaagaatcatggagataggatacgattgtgtttgaataattcaatatgtttatatctggaaagatctacaaatttgatatgatcactaagattgtgggaatttattcaaatccaaaacacatagttacaaatcatatacaaatatggaaaataaataatgtctaataacatttgtgtaacatcatctttaatgcgagtcatttagaaatgtaactttttttctttctgatatgtttatttctggaaatatatacaaaattgacctgatcactaagattgtgggaataattccaaaccaatatagaaagtgataatttattaaaaactgaacatttgtgtaatctttttttttttttttttaatgtaatgtcaaattatattcaaaaaaaacatatacttttttacaacttgtgcttcatgtgtaagaaagggagagtgctaaaaaaaattctgaaattgtccaaaaatgattagatctttcgtagagtcgatgttgactaccccgggaatgaacccatttgtgtaatcttttaacatttattaaaaacaaatcatagatagctaagattgtgggaagaattccaaacgaaattaaattcacactaacacatttactaaaatcatagatagatatagaaagaaaaaacttttctactaatttttttgacatttgtgtactcattatagcgagagaaagagatgggcctcaaaacttttattaggcccaaacgttttaaattcattataaaaataaaacaattccacgaaaatttcgaaacccatcactttggcgcttatgtgacgcgcttatttcgccctcaatctcagattatttagtcctcacactcgtcacacccccgcttcctagggtttcatttcgtctctttatcttccttcgtctctttagcttccttcgattctctgactcaatc

SEQ ID NO: 10894 - DNA, 3000 bp, Unknown
  misc_feature (1)..( 3000): cDNA_ID_4254736_gDNA_ID_2214461_Annot_ID_132978 3000 nt of promoter + ATG
gtacatatgttcttgagttgtatatttaacgctttgttttggttttcattttgtagaattcaacaggggatgaggcatacaatgacaatggtttggtgcctcgaacaattcgtcttcttaaagacaaatatcctgatcttgtaagatccgtaatcccagttttgttaattataccaggagatgaaaaattggttaatttgcaattgtgactaatgttctcctctgttgctagattatctacactgatgtggctttggatccttactcatctgatggtcacgatgggatagttagagaggatggtaagtatttatacccaacttccatctataacgttttaactggagctttgatacaattttatctctgtaggtgtaattatgaatgacgaaacagtacaccagctctgtaaacaagctgtttcccaggtaatttttttcgatatcaaagagttaaaatgtctgaaactttttcttaccaatgaggttgatttcttcttctctctctctttccaggctcgagctggtgctgacgtagttagtccgagtgacatgatggatgggcgagtaggtgcaatccgctcagctcttgatgctgaaggatttcaaaacgtctccatcatgtcatacacagccaagtaagtaatcatacatttattttctggaagcatgttcttgtttgttctgtctaattgaatgaatcttcggccaacaggtatgcaagttcgttttacggtcctttccgtgaagccctggactcaaacccgcgtttcggagacaagaaaacgtaaatcccatcaaccctcatcgatactgaatttgcatttcttctgctaacactaacagttacaaactgacgttttgaactacaggtatcagatgaacccagcaaactacagagaggcattgattgaggcacgtgaagacgaggctgaaggagcagacattctcctggtaagtcttttatcatcctttagcaaaacatattatagagtttggtaatataactggagtgttttgttacaggtgaagccaggtcttccatatttggacatcatacggcttttgagggacaagtctccattaccgattgctgcataccaagtactttccttatactctacttctaaaacttattgaataacattcccaggatgtttttgttgatttcaaactctttatgaattttcaggtttctggagagtactcgatgatcaaagcagggggagtcctgaaaatgatcgatgaagagaaagtgatgatggagtcactgatgtgtttacgcagagctggagcggacatcatcctcacgtacttcgctcttcaagctgctacttgtttgtgcggcgagaagcggtagaatagacaacaagactgtgttttaaactgtttgagtatatctgttttaaatcatttgagactattgtgattttgccttgttctgatcccattcttttagtgtcgtgcatatgtgatcttgtgttttgtaatatggattatgatgagtccctagacttcaaaatttggaggccatgatctgagtttctgaatgtggttcttgtagattccattgatattttgcagaccaattatttggttctctgtttttttaacacacacatgacacataacaacattctttatgaaacaaagattactcattactgtctataagagaacaaactgataacatatttctttttgatgtggatggaattgttaactctctagaagaacacgggaagaacacccaaaatttggctacaaagtttgttaacatattgatcttttgttcttctttgactttgactataaatattaaggcctggaccgagcatctaataataatatctaaatgggccttttttgggtaagcaattacgtatgctaaatttagggtttgtttttgccgcacctgtaaaataacttcacagcttctcatttgtaaattctagggttttgcaaaaccaacaccgaacggatccaacacgatgggacgaagtaagtcaatcttcttttcttaccaacaatctcaattcgaattcttagaaatcgattcatttttggtagaaccgtgtttttgcttaaatctgtgttcataagatttcaaattatgtcgatcaaggtttttgtgtgtgaacgccattgatttcaacatagccagttttcaatttatcatttctaaatgtgaaatggtgaatcgattgggttttggtagaatcgtgttttgtcattatgtgattcatatgaatttgctaggttttggatcagtgtatgaatcgccatttattcaactttgcgatcttcaatttatcatgtcaaatgtgtagaatgttgtttttccgattttctgttgagaacattttaggtttcttttgtgtgtggacgcctttgattaaacaattccgatgtcaaatgtgtaggacctgcgagatgttaccgtcagtaatgtctgattgactattttatgacgaaactcgtctacagcctccattaacgtaggtatggctatattgtcttccactagactaatgcatggtcaaaatgatagagacgtttgaccaactccgaaacatacacaatccaaacaaaatcaaaaaagaaaaatctccggacctgatcctattcctaattcagtccgtctttatcattttgcaaagatcatcggatcactctttgttataaccgtggatcaattgtcaaccacaaaactgtttttccttcacgtttccaaattagttagcaactctctaagtttaattaagagagatttggcctcattaaccatagatattagaatggatccagtaagtacatgaaactcgaaggtatgggccattatgggcctgaaccaaaaatgaaagagctgggataactgacctttctttttgacatttgagcatcgagcctcacagtgcaagagttctattatagaactcctatactaaaaccgatcaagaggcaaatctcccaactcttccaacttccaaggctcgatatg

SEQ ID NO: 10895 - DNA, 3000 bp, Unknown; identical to SEQ ID NO: 10893
  misc_feature (1)..( 3000): cDNA_ID_2716778_gDNA_ID_2214461_Annot_ID_182774 3000 nt of promoter + ATG

SEQ ID NO: 10896 - DNA, 3000 bp, Unknown
  misc_feature (1)..( 3000): cDNA_ID_2716770_gDNA_ID_2214461_Annot_ID_132979 3000 nt of promoter + ATG
ctgtgaattggctagactgaaagtactctggatccatatatcccaccgtacctgaaactaccgttgtcaagtgggtatgatccactgtcaccgttcttgacgttccaaaatcagacaccttggctcgatatttctcatccaacattatgtttgtagacttgacgtctctgtgatagattggagacgatgcagacgagtgcaagtatgagagagctcctgcaatatctatagcaatgcggagacgtatattccaagtagccataatgttttcatcaaactcatcatgaagatgttcgaaaaggttaccattaggaataaactcgtagacgagaacagggacttttgtctcaaggcaacatcccaagagtttcacgatgttcctgtggttgatctgtgaaagaatgacaacctcattgatgaactcttctagcttgtcttcgtccacgactttggacttttttactgcaacgattcttccatcgacaagcattcccttgtacactgtaccttgaccaccctggccaagtattctgtttgaactgaagttttcagtagctttctccaactctcgcgaactgaacactattgtcttttcgaccatgcctactgttgaaatcaattgttgttgcaacaatagaccaccattacgcttgaagaacttcttcttttggtttaacttcctttgctttttaataaatttgtataacaagtatattccaacaacaaagatcaatgagccaaaactagcaccaagccctgcaaacacagacttgatcatcattgttgaatattaaaaaaataactaatgttgggcatcaccattgtaaaagagctttaaatggacatgcgcgtgtatttggatttttggcataaaaattcccacgacttacctatagcaagtggccgatgattgttgtacacacatttaaagtgtccttgcaaattgacacatttgttggtcccacagtaagtcatgccctcttcttctttacattcattgatatctgaatttccaaatataaagagattgtaatcaaacaaatgaacgattttttcatatgcttactttgatcatggccatataaaagttgaataaaaactttaactataaacacaataattactaacctttgcatccgcctaaacggtatgggttgccttggaaacccctagtgcatgagcatcttgcatagcttagataagcattgtcatcgcatatacaacttgttatgttaattcttctctgggtactagtgtatctttcattgttgtactcttttacactatagcatcccagagactttataaacgaatgattcgtcgtatggataaaccatcctagctcgaccgtactgtatcctctagcatgaagcttttgcggatcagatttattagacaaatattctgccttgtttgtcaagaaggcaactttgcaccctctcgttatggtgttttctattgtgacaccaacaatctgttgaatactaccgccgcgcatgtatgcattgcagcatccaataccattgcagcttgtttcatccataatgctttcatccatactgctgtcctcattacaattcttctcgtagccattgtaattctgacaatttagtactgcaagataatctttgatatgcgtatggggttttgtgctgcagcttgatgtgcattgcactatgcttggcttcacatttgtcagcgatgccgtgttgttgcaaccaaccgctaccagttcattgtgctggctaacataaaaaggggtacccgtcaaattcaaaagtgatccaagctcttctccattgcttgagcactcctttgaggctattgggtttttaatgttaacggactggtatggattgttatatctagaacccctgccttcagtcggaagagagatacccacaacttccttgttgatcacggaaagataagggacgagctttccagaagtagaggtattacaagtaatttcgtaccacttctccagataacaaccctttcccattccaaaggggtacgggatcttgattcctccacagtcgggttgacataaggaaactgtgcgatccgcagaatctagaataaaacagagttgcaaagagaagagaatccaaagagaaaaactattataagaactcatgtttatgatttgctcaagagaacttgttctttcctgaatatttttgttttgtaaagcagacaattttttgtacgaagaggtagattagaaagattccgtttccttggacagaaattaagtctcaagtcttcgtcttttgtcttttatcttttgtctttctcaatcaagactagtaagaaatgcctttatggctatatgtgttcgtaggcctactgaaacaatctcgcttcttccatcttttgaattttcttcctccattatttgcaagataaatttaaaaaaaaaaaaaaaaagagtaccgatataaagttgtagaccgttttagagaatttaaaattttgtaactggacaatactttagaatgcccagtttcatctaattaatacaggcccattaaaactctatcaagcccagttccaaaaccatcaacacttaaaatttcccagttctcaaactcgtagataaagcgcgtgaacatcagtctctatcttctttgtcaatgtcaaaatcggcgatcatccaaagttatcatctttctcataaacccaatttttttcccagtcttccttaatcccaacaacttcttaacaattcaaggtttgaataacacaactttactctgtttctctttgctttctgtgttttcattttgaacaaaacagctttaatcttcttcttcttcatttttcacctaaatcttgctttgtttagtcaatatacgatctaaagtctgtaactttcaattcaaacctgcattcttagtcacgggtacatctaagaaacctcaatttcgaaattcaatatcacaatttgcttataaaatcctcaatgtgttcctgtgtgtgtgttgcagattcatg

SEQ ID NO: 10897 - DNA, 3000 bp, Unknown
  misc_feature (1)..( 3000): cDNA_ID_2716766_gDNA_ID_2214461_Annot_ID_132980 3000 nt of promoter + ATG
tatgttttgctaaaggatgataaaagacttaccaggagaatgtctgctccttcagcctcgtcttcacgtgcctcaatcaatgcctctctgtagtttgctgggttcatctgatacctgtagttcaaaacgtcagtttgtaactgttagtgttagcagaagaaatgcaaattcagtatcgatgagggttgatgggatttacgttttcttgtctccgaaacgcgggtttgagtccagggcttcacggaaaggaccgtaaaacgaacttgcatacctgttggccgaagattcattcaattagacagaacaaacaagaacatgcttccagaaaataaatgtatgattacttacttggctgtgtatgacatgatggagacgttttgaaatccttcagcatcaagagctgagcggattgcacctactcgcccatccatcatgtcactcggactaactacgtcagcaccagctcgagcctggaaagagagagagaagaagaaatcaacctcattggtaagaaaaagtttcagacattttaactctttgatatcgaaaaaaattacctgggaaacagcttgtttacagagctggtgtactgtttcgtcattcataattacacctacagagataaaattgtatcaaagctccagttaaaacgttatagatggaagttgggtataaatacttaccatcctctctaactatcccatcgtgaccatcagatgagtaaggatccaaagccacatcagtgtagataatctagcaacagaggagaacattagtcacaattgcaaattaaccaatttttcatctcctggtataattaacaaaactgggattacggatcttacaagatcaggatatttgtctttaagaagacgaattgttcgaggcaccaaaccattgtcattgtatgcctcatcccctgttgaattctacaaaatgaaaaccaaaacaaagcgttaaatatacaactcaagaacatatgtacacaaatagaagagaagtgtgaaacaccttcaaagcctcaggaactttagggaacaaaacgatactgtttaccccaacagctcgagcctttgcaacctgtttgcatataaaatcatgttattgtaacacagcggcaacagatacaggaatcatcatatcaaaacataaagccaaacctcttgtacaagaccatgcctccagccaagtctgtagcaaccgggcatagctccaataggcgtgtcttcctcacctgccacactccaaaaccttataatgtttcttaaagacaagagagagagccattgaatgtcagaatacaaaagaaaataacaaccttcatgaatgaaaagtggatatacaaaatttgcaggggagatatcagtttcctgaaaggcagctctagtaacaggggaagcgcggttacgacgtgggcgtcggcttagattctgaaagcattcagtaacaataagccacttataagcttcaaccttacagctaaacattagattctgaaagcatgaagtaacagtaagccatttaaaagtttcaaccttgcagctaaacatcagattatgaaagcataagtaacagtaagccatttaaaagttttaaccttgcagctaaacattagattatgaaagcataagtaacagtatgccacttaaaagtttcaaccttgcagctacttattgttcactatacggagatacagagatagctaatacacaagagtgatgaaatcaattaaagaagtatagattgattcaaattatgttcttagataatagcaaaatcatctatacaatgcaactagagcaaattcacaatgaaagtaagagacttggatactcacaagaggcttaattatcggtgtcccaaccggagcagccggtttaggtggaaccggaggagcttcaggaacatttccagcagcaacggcagcttcacactcagcatcactcattccaagcttcttagcatgtccattgccggattcactagctcttacgacaagattacgacgttgactagttgcaatgcgagaagaagcaacactcactttactcacattcgatctcagaccaatatagcttttgcaatcgattcctctagtcgaaggaaagctgcaagaagcattaaagatgggtgtagtagccatgaatctgcaacacacacacaggaacacattgaggattttataagcaaattgtgatattgaatttcgaaattgaggtttcttagatgtacccgtgactaagaatgcaggtttgaattgaaagttacagactttagatcgtatattgactaaacaaagcaagatttaggtgaaaaatgaagaagaagaagattaaagctgttttgttcaaaatgaaaacacagaaagcaaagagaaacagagtaaagttgtgttattcaaaccttgaattgttaagaagttgttgggattaaggaagactgggaaaaaaattgggtttatgagaaagatgataactttggatgatcgccgattttgacattgacaaagaagatagagactgatgttcacgcgctttatctacgagtttgagaactgggaaattttaagtgttgatggttttggaactgggcttgatagagttttaatgggcctgtattaattagatgaaactgggcattctaaagtattgtccagttacaaaattttaaattctctaaaacggtctacaactttatatcggtactctttttttttttttttttaaatttatcttgcaaataatggaggaagaaaattcaaaagatggaagaagcgagattgtttcagtaggcctacgaacacatatagccataaaggcatttcttactagtcttgattgagaaagacaaaagataaaagacaaaagacgaagacttgagacttaatttctgtccaaggaaacggaatctttctaatctacctcttcgtacaaaaaattgtctgctttacaaaacaaaaatattcaggaaagaacaagttctcttgagcaaatcataaac

SEQ ID NO: 10898 - DNA, 3000 bp, Unknown
  misc_feature (1)..( 3000): cDNA_ID_2716764_gDNA_ID_2214461_Annot_ID_132982 3000 nt of promoter + ATG
ggttctttgtttttgatctggaaaagattagatgatcatcattccatcacttgcttatctattttgtttaatcattcttcttcttcactataatcattctatatatttctggaagatatcatgataaagaagatatatttatctataatcacaaaatgttttgaaccttttcatttatgaaagaaaaagaactaattagatgatacttttctaagttccagcccagtttggatagtgaatatattttctccatccccattgattggtattgatgggctagatatatgacatgggatctcataaggcctatttattaaatgttttgtaaggcccacgtattgggctaagagaaaaaaaaaagagagtactcaagtataggtttgtgtttttcaaggcaaaagtcaaagtattgtctagagacactggcacttgatagattagacgcataatgtattcaacataatcaatttagaataaaaattacaaaatgtagtatagtaaagagttatactaatagtttttttttagaagtatataagaccaattaaaggaaataaatcgcaattaatattctacttttgtttagtaaggaaataaaattatcgacagtaatgagtaaaattttcggtacctcttcatccatttttctttttacctaaaatttgaaagtaaaaaaaaagaaaagaagcgagtggtcataaaagtccaagaagtctctgtaagtgaaacctggcctccacttttgtttttccacttctacggtaagtgaaagagagagagagagaggaaaaaaaaggggaaagcttaagatattggagagtaacaatgccttcaaattcaggagatgataatgttcttcaagttctcataaagaactttgatgtccttgctctgtaaatctctctccctctctgcctcttctttaatttctctttacagatcctatcttgatattttgtgtgtgtgttaattagatcctatctagtttctttagttttattgctaactgggtttagctacattgtctacttagattcttgaaaatgaaaccctctttagattagtactaattttttggagtttttgtttttgaacggaatcttgaaagttgaaacttacaacatttttgcttttgcagcccattggttacactcgtctatcctctgtaagtaaaaccaatctctctcatatatacatttgtgtgttaaatctgttgcatcagttgatagagattttattgtaagcaaaactcacatttttaggccaatctttagttcagattcatatgaacattagaaatttttgtggaaaaagaatcaaaaacttaaccttttgaaacatttgatcctctgtcattaaggaataattaaaaaagagtacgaatcttgacttagatagatgcacgtatatccacacacacccacttagaatccaagacacgaggcattacacttttgtatgtattcaattatttattacaaaaaaatatgagaaaactaattatgtttgtgaaaaaaatgaacagatatgcatcagtgaaagcaatagagacaagatcattaccagaagatgaacaatggcttacttactgggttctttacgcacttatctctctctttgaactcactttctccaaacctctcgagtggttagtgaattcattaacacttttaatatcttcttaacatgtattcatcataatattagtttttgtttttgttatcataaggtttcctatatggccatacatgaagttgtttgggatctgttggttagtgttaccacaattcaatggagcagaacatatctacaaacatttcattagaccattctacagagatcctcaaagagctaccaccaaaatttggtatgttcctcacaagaaattcaatttcttccctaaacgcgacgacgacgacattctcactgctgctgaaaaatacatggaacaacacggtaccgaagcgtttgagcgaatgatcgttaaggtaagtaaaattcacattgacatttacataatcattttcatatgtaatgtacatttggtaatgaatgttgtgttttgtgaatgcagaaggatagttatgaaagaggtaggagtagtagaggaatcaataatcacatgatctttgatgatgactataggtactaataagttcttaaaccggtttaattagctactttcagtttataagtttgctatgtgacaatatattgtctgtttctatggttgttataatttgcgtggattatgtataagcccttatttaggactgcttatttttgtgaaaaatcaaataaacattttctctcctttgcgtgtgtaagcaaacttaaagtcaaaattagtgggccaagctctgtccagttttacacttagatgattagactattcaattatttaacgagttgggcttgtaacaaaatgggccgggcttagataattattaatgatatgcgaattttgaaaggagctaatgatgaaataaaaatttgaataaacgggagcgaagcagaagcgtaggttctcaaatcacgaatagcctctcgaatcatcgccggcgatcgacgttggtactgcttctacgtccggcgaggatattttctggattctgttctttcgctattgatcaatcatagagattcttcattgaggtttttcagattgattaggatttgcttcgtcttcgatttaatcataatcacgaggatttgaaaaatattggtgaacaacgatttggtgaagaagaattggagtataaattgtttgtttctgaggattcttcagagtgtattttcttgttgtttggttaatgtgcattttggagttgagagtttgggggattttgaaatcttagattttgaaggaggaagctaaagtagtagaatgggttagataagaattaggaatatgattggaaagacattcgagtgatgttaaacgatttggttgagaaatatgattcgaaagggaattagctctttgcagcagcttcaatg

SEQ ID NO: 10899 - DNA, 3000 bp, Unknown
  misc_feature (1)..( 3000): cDNA_ID_1034424_gDNA_ID_2214461_Annot_ID_132983 3000 nt of promoter + ATG
gggaaccataacaacaaccagcaaaaccgtgacggagatcatcatcacaaccatcaagaagatggaagcaccagtcatcattcctaggcaaacatacacaaacaaatatattctgtgagatttatttttctttttttgtcctttcgtttgtttgtttgttcttaacaagcgtgttttttttgcattgcttctttttcatatatttttatttatttctaaattctaatattctacggatttcatcttgtttatttttctgattaatgtattgagtaagtaattaagaacctgataatcgatatgttttagtttgtggtttttgcatgcaaggctttggttttattattctagagatttttgcttgaagtagttgtcttgtgaaatgttttcctcattactattgagtgtgagagttttctaatacttgattagggtttttgaacaatttttatatatgtatattaattcagtacggattatcaataaattatttcgcatgccaaattattatcttccacttcgttcatggttacattgtctcgaagaagctacatcttatgcattgtgagcaattattcaggttctagctatctcttttaatatgttaatttctttgcatgattaacatcttactcctgactggtctattggtgactatgctaagataatgtagatatatatagtaacaaaatcatataggtcaaagcattaagtgtgattgttttggttaattataagtgtgttgacgaggggatgcattgtagatatgatgccatattaatgccagtaggtttatgcgcatggtggtttggatacgttcaatttatagccgttgcaaaaattgaaggcatttaattttgctaatgatattaccaaaattatttgattatgaatcaaaagatacaaggagaattatcaaaaaaaaaatatataggtccattatccgtataaggtagctaagaacttaattagtctggtgctatgtttgaagactcacgtacgatttacaatctctggatctatgaaactcatcaccaagcaggaacctgtatttatacgtcaatatttgtgaattttcggatacccaaaaaataccaagaatatatatttcattttctgctgaaaatcagagaaaaatgtgttttaaaaacaatgtctataaacaaatttatagattgaagttagaactaaaaacttttgatggttatagatttcagcttgatcatttatttctgaagtgttttcgttggatgaaacatagattatatatgtctataattaattgagacatatacattgatgatatacaaaataaccaggaatttttcgttatacagaaaaatacacaagtctatgtaacatgcgtaataaccatatggtccatatcgctgcattttgtgtcggtctacattattggatttattttagtataatgtatgtgatacgttcttaccatgcatgggtatacatagagaaaggtgtataaatcaacgagcatgggaattatgacgttaataattctaaaataatgcacacacatcctgttaatataaacaatataaattatatatcagtttattatggaaataatacttgaaacttctatagatcggtgtgaaccattccttgacatcataggcatgtcggttatataacctcatccatatgttctatcaattaatcaaatatggtaattaaagaaagtcaaatattgtgacatacatgcatttttttttactaacggttgatatcaagcatttatagacgaacgtctatttgatgatctcaataatcatatcaattggcggctaaactaaactagatttcacgatgacaaaagtaaaatgtatatatagacactaaaacacagatgatgtcatgaatcttttttgatatttgtatattattgtttacgtattactttctagataaacaataagatacgagtcatgaccgatcattgtttctatgtcggcgttttattttatagtaaaaagaaatctgcaacaaaaggaaagggcacaacaagtagatcaagtagtagtaatctggcattactcaataggtccaaaaggaattaaaatgttcactaaagtatgcttaaaatatagatgtatggatctacgtagttataagtagttaagtaccattatagaagagtgtattcatgtgggttctttgtttttgatctggaaaagattagatgatcatcattccatcacttgcttatctattttgtttaatcattcttcttcttcactataatcattctatatatttctggaagatatcatgataaagaagatatatttatctataatcacaaaatgttttgaaccttttcatttatgaaagaaaaagaactaattagatgatacttttctaagttccagcccagtttggatagtgaatatattttctccatccccattgattggtattgatgggctagatatatgacatgggatctcataaggcctatttattaaatgttttgtaaggcccacgtattgggctaagagaaaaaaaaaagagagtactcaagtataggtttgtgtttttcaaggcaaaagtcaaagtattgtctagagacactggcacttgatagattagacgcataatgtattcaacataatcaatttagaataaaaattacaaaatgtagtatagtaaagagttatactaatagtttttttttagaagtatataagaccaattaaaggaaataaatcgcaattaatattctacttttgtttagtaaggaaataaaattatcgacagtaatgagtaaaattttcggtacctcttcatccatttttctttttacctaaaatttgaaagtaaaaaaaaagaaaagaagcgagtggtcataaaagtccaagaagtctctgtaagtgaaacctggcctccacttttgtttttccacttctacggtaagtgaaagagagagagagagaggaaaaaaaaggggaaagcttaagatattggagagtaacaatg

SEQ ID NO: 10900 - DNA, 3000 bp, Unknown
  misc_feature (1)..( 3000): cDNA_ID_2716758_gDNA_ID_2214461_Annot_ID_132986 3000 nt of promoter + ATG
aatattacatatgtgtatagtttttggtcatcgcaaaatctttaacaatattaaaatacatgacttcaaaacttttatctaaatagaaagacaaaaaaatcaatttatcaagtttattaatttatcgagtattaattttatagacgtttcattcggatgtttatagtcgatattgttggtctcaatagagtcagaggattgagattctcaaactgctcatgcattcttctgctagagagaagtctcaggacattgctatggcgcatgagtctttatgttttgttgtgtgtacatcagttaatgccataaatcatatgtttaaaagacttgtcaacagcaacggaagcatttgcctcgacattttgaaagagcaatggagtcctgcacttaccatatctaaggggaaatatataagcgagaagtttgaagaatttgtagctacgtattgtggaaaaacttcatgatccagccacacttgttctatattatctcctaaactgcattcactaaaatgtaacagaagatgatgccattgactcctacaacgcaaaatacaggaagcaaatgaaacaggagatggagtcattgattcctacaatggcaggaaatgggaaagtggagaacgttgcctaccaactagcaagactcattcacttattgaacaaatgaaacagtggattgcagtcttgcaattaagataaaggccaaatggcattttacataatggaaataagatcatgttgagaaagttccaactactaaacctaacaggaccaaaagaataactacaaatctttaacaaagcaaacttcttgcagccttaggttacaccaaattggcaggggcttgaatcgtcttctcatttcgcatagactcaagctgaggaaccgaaaagattccagtcattgactttgaatgtagagagtgattgtttaatgatatcacacattggcatttttccagattgtgaagctgggacagctaaaccagatcccacagcatccgcgctttcgctcagaggactgcacaataatacgcaaacaccttagatgaaaagacatgtggtacaacaacaacaacaataaccatattttgatattcaagttctgtatcaaaacgatgcatatctatattcaactgcttgcaatataactgagtgactcaactttgtgggacttactttatcaggataggttcataggcagtcactaagacatctgtatcaactcccttaagacgaatatttgccacatatacctgcagaatcatataaaccagttggtgtctcaagtaacaaacccctttagaataaatagagagacagaacaaggagaagcttcatactctcactaggttttgtgcttctcttccctgtcttcctttggatatagcctgtaatgatccttgttaaggagaaaacaaatagaaaggaaaattatgagcaaagacatcatatgtttatggacattaccatctctccaatagcagttgtcgcaacagcagagatgtttctgaaagacagtccaggcgcctcaatgacctctgattgctcaatcaactgaaaattacacagcaacattactagattgtcttcttcatatatatcatcaatcttggtaaagattaaccaaaaacacaccagtattagttctatttcgactagtttcagagactgaatccacaataaccaaaaaacagcctcactagtatcatcacaggcaaaaaggttccaactttgggaaatctatacacgttaaactctatgtttgtactcaagatactagatgtattctagagaaataacaacactagttcttaaagttggtttgtctaccataagaagagttctagtgtagtagtggtattacctgaaatccttcagcatcttgctcactcgcaagatcattaaggaaccaagaggcactgccaatgtcaccaacctcagccttgaaatccaacaactcaaaaatcaaactctcatctcttgaaggatccacaaacacttcctgtgaaaaccaaacaatcaaacacaaatacagagtaaactagagattcttctacacatgtacttacaaacaatgccactgagaatagaaccaccaaacctgatgatctggaacttgtcggatattactcacatcctgaagattcacaataaggaagaaatgaggaaaccagtgaatttcaattaagcagcgaaaagggttttattgaaagaacctgaaatctttgagggaagacggtggaaatagcgccaccaaacaaaggcctcaccgaacataactcaacagacatgttttgctacattcaaaaaacaaaatcctcaaaaaactaaactttgccagaaaaaaaaaatgcactcacaaacataacagaatcgattagggattaaagagaagagagaagagtaccaaattgatcgattgatgtatctggggaagtaaaagagaagaacaaaagtagcagagaaatcaaaaagttggagtttagtatttatatgaaagtcagaatcgaaagaagcgttgctttgacgtcccaacaagtagctttaacttaacgcaaacaattaaaaaaacaaacgattagcgttcttcaatcaacaatgtctgcactctgcaaattcacgattgagaagaatgagaattaccaagcgacatcgtttaaattaataccgtagttttttttaacaaaagcccaggcccatctgttttatctagcccattttaaacaaatagagataatcaaaaccactgggataataataagatttaattttttttcttccgctatcatcatcaatcatcatcatcatcgtcttcaagacttcaaccttcaaattcttcatcacaaaccctaacctccaatttctgattctacgattgatctaaggttttaatcaattcttctatcatcatgatttattcctcgaattttttccgattttcctttgaactgattttgtggtctctcttactttttggttcagtttcattttcaaca

SEQ ID NO: 10901 - DNA, 3000 bp, Unknown
  misc_feature (1)..( 3000): cDNA_ID_2716747_gDNA_ID_2214461_Annot_ID_132990 3000 nt of promoter + ATG
aatatctagttatctatcattcttaaccatttatctctcatggttaagaatctcttctattttatagaaacataaaatataagagattgccttcattcaattagtattatcggtagtaaaacttcggatactgattttttttttgattaattcattaattatgagagctagtaaagatgaattttatacattcgtcacatatgtttaaacttatacggcgtcgtttcaaagacgacatgaaactaaaacgaggaacaaaacaaccaatcacgccatcgctaacagtaataataatcaaacacggtaagtacgagattcttcttagcgaatcaaccgttaaaaatcacatcaaaagtatatacgatcgagattccgccacgtagataactcactgtagatctaaccacactggataattagatatttttttcttttttcttttcaatgagtacagttcagccacgtctgtctctcagaccaaaacgcaagtatcgtcctttgttttgtttctttcttcatcgttgatttgtcaactcaacaacgcccaaaccctaaaacaatccccaatcatcgtttcaataatcaaatttccccaattgaagaataaagatcaaaactttggaagttttcctgtgaaaataatctatcctttttgcatcatttgcgttttggttgatgaagaggatctgaagaagctgagatttaggaatgatgatgggttttgctgtatcggatgaattgttgggtactgttgctccgattgtggtgtactggttgtattctgggatttatgtagcgctctcctctttagagagttatagattgcattcaaaggttgaagaagaagagaagaatcttgtatcgaaatcttctgttgtgaaaggtgttcttgttcaacaggttgttcaagctgttgtcgctatccttttgttcacggtaccgtttttctcttttcccatttttgagttgttttgcttttgtgaaattgaagtgaaaagttaggtaaaacatattggggaattttgatatctgacgctgactttttatgtgtggaattggatggttaagatttttgtttttaaaaaggttaactttttgggttgatgttgtctttcgacccataaagagaaatgggttatgtattaatgatcttaaagttggatcatatattgactgttctaacaatagttaagagctttagaggaaagtatcaatagggattgttctgtgatttggcaatagggtttagacttggcagaccttattaggctgctctagaattcaaccaaggactctatcttaggctccgttggtcctctgttccttacttgtgttagattcagagaggactggttcttatcagcttatctgatgagaaaaccaacaaacatagtaaaccttgctaattgtgatctttaagcttaagcaagttcttttgttgaactggaatgttgttttgttgaactggaatgactacatcatcggttcttttgttgaactggaatgaagcggcatcatcggttcttggtttgaattcgtctgatcctgagtacttgtaatgtatggatttgcttagacatgccgctgatagaattgactcatcaatatcatggaatatcttcttttctgtttgtactagtttttgcttttaaccttcttctaatatgcttcttcattgtctatacaggtgacgggaagtgatgccgaagcagacaaagcgcaacagttttccttcttggtcctagcaagacagtttgtgactgccatgatagtcctcgacacatggcaatacttcatgcatcgatatatgcatcagaacaagttcttatacaaacatatccactctcaacaccaccgtcttatcgtcccttatgcatatggagctttatacaaccatccagtggaaggtcttctcttggatacaattggaggcgccttatctttcctagtctctggtatgtctccaagaacttccatcttcttcttctctttcgccacgatcaaaaccgtggacgaccattgcggtctctggctacctggaaacttattccatatggtcttcaagaacaactcggcttaccacgatatccatcatcagctctatggaaccaaatacaatttctctcagcctttctttgtcatgtgggatcggattcttggaacttacatgccttactcgcttgagaaaagagaagatggaggattcgaagctcgcccgactaaagaattcaaagacgattaagattttggagtttggatatatgttatgtatctgccctgaggttggagaaatggatgatactttgtgttattggaggtgtagttttaaaatcagaaacagaactggtttttttgcgttttgcgtttcttctcaagagcgaatttagcttggagtttgagatttgtatataaacattattgagttgttgttctactttcggtttttgttttgcatgtaatattactacaacaaacatgttttttttataatctatccatctacgaggccattcttgaaagattttgtgttgattttgttttataatttcttcacattcacattttagtattggatattcttagaagtattgtagtgcaagatgaaatattacagatttaataatcctccagatgtttgattaccacatggagcaattctttgctactcgttagtagtgtctagactaaataaaacagtacctgcgaagccttttgcttgtcccacaagaaacacaaccacatcagatctcaaagttgttcaacaactacatgtttacatgatctcttcatcaaactcatcgtttcaaattataatgcgttttcttttatgttcttatttctctaaagcccataaggcccgttatacaaatacaatgcgatttatactataaaacgatgtcgtattaactgtagactcgtttttttcttgtacaactgtcgattcgatactctcttaagtttttgagggtttcttatcgattcgatattttttttcttttc

SEQ ID NO: 10902 - DNA, 3000 bp, Unknown
  misc_feature (1)..( 3000): cDNA_ID_1029485_gDNA_ID_2214461_Annot_ID_132991 3000 nt of promoter + ATG
ccttgaagacgttttgtgtactattatgttaacgcgttgaaattaacgatgatgggtattgttacgacgaagacgaagacttatacaactactaacttcgatttctccaataaaggttttggtgttggtggtttgaaacagtttgtgtacggaaacactttcattgttctcgatgctttctgggtttctttctctaatctcttcaggtaaacgtttttgcttcttctttattattctttgttctctgtttttttgagttcttattggttaatgggtttgtttttatttagagttaatccagacaaagagacaagcttggtcttgttcgagaaacagaacacaaaagattcctctgtttttggagatcatcaagatcaaaaccaaatttgtggaacacaagacgatgatcagatggaaagctctctggtttcgattagcaagagatgcgagttttattccgacaacaaaagtatcgttggttttgtagaagaacctaaagcgtttagctttaagtttcatgagtattctgctattactgttcaggaggaggagaagaagaagatggtgagtttctctgatgaaaaaacgagttccatggttttggagaaatcagaatcagatggttttatgaaggaacacgtgaaagaagagatgttggtttatgagttcatgagttgtggtgttttaaaagagtcattggttcacgagaatcttgttggtggtgaagacaacttgtttgatgatgatgatgggtttatagaactaaacccaagtttacagatttcaaactttgcttatggagaagaagaagaagaagagtttatacacagagaagaagagatgaaaatgggctttgatgaacaagaagaggtatatgatgagtttgatgatggttcagattcagatgatgatgagtttgagcatagtgatgtgattgagaagttgaaaacagaattaaggactgcaaggacaggaggattgtgcactattcttgaggaatcagagactccattacaagagctgaaaccactcaagattgaaccaaaaccagatcaacacaaagacagaattgctgaaattcacaaggtttacaagaactacgcggttaaaatgcgaaaactcgatgtcatcgattctcaaacaatgcattccatcagtaagtcaatctattctcaattcaattttcaatcaatgttcttagcagactattacatcattagcaatgacgtatctacagagtcttaaatttttgtctgattccagcttttactttgattgtgaggacatattgttgaagaatgtctctttccttcttaaatgttttctcaactactcaaaagtgttagttgagtatatagttaacatttttggatttgatttaacaggtttgctaaagctaaaagattcatctaaacctagtagaaacactgataaaccgcctaaatcgtctctgcatcagaatatatggccattcaagaaacatacgcttgaatgtgacccgagtgagagacttgtgaaagaagcaagcagagactttgagactgtctatgtaggccaagtttgtctctcgtgggagatgcttcgatggcaatacgacaaagtcttggaatttgattcacaggttactacttatcaatacaacttagtagctggagagtttcagttattccaagttctgcttcaacggtttgtggagaatgaaccgtttcagaactcctctagagttgagacttacttaaagaaccgtcgccatttccagaatttccttcagattccacttgttagaggtaacaaaacatgttttcattattctttatagtatatactgaacctttcttgctaataccataatctgcaaagttttcagatgaccgttcttcgaagaagaaatgtagatatgaaggagaattcgcggtaaagactgaaatgttgagagagattatccgagagtcgatgagtgttttctgggagtttctttgtgcagacaaagacgagtttacttcaatgatgaaagtttctcaccaaactcaagtctctccacaggattctttagaccttgagctcttgacagatatcagaactcatctccaaaaggtatttaaaaacttcaaattcttgctctcattttgtcagattacatcaatgtttaacaattcactcaagaacctgttcttggcctaatgtagaaagagaagaagctaaaggaaatacaaagaagccaaagctgtatagtgaagaagttaaagaagaatgaatcaaagagtagtattggtgtgaaggatgaattactaatagctaaaattgaactgagactggtttcaagagtgatgtacatgtcgaaacttactactgagaagttacattggtgtcaggagaaacttgaaaagatcagcttcaacggtcggaagattcatatggaaccatatttctcgttgttaccttgttgagccatctctgcgtatagattagatcatagatgttggaacaatatggcttcatcagatccaggaagatgtctttttgttgttgttcatatcttcctgagaacaatagtatatctaatgaatgatatgtggtagcttagcgtttttctttctcctctaatcaccacaacatctggaatcacctcgaagaacattttgagaactagaagtaaagttgattaacatttggtacatgaacacaaatcttcttgaacgttgttgaactagtgattactgattaatgaataattaaagaaaagacaaacgttcgaaagatgggcctttgggccaagtcatatttggattattatgtaagcattaacaagcccataaaatgtcgtccattgatgatcataagtcaatatgtaatctgaaccgtccgatctagggctttaggtgttgaagtgaaaaaagaccctatataaagataatatagcttataaagtctcttctctgctccgtcaagctgaggaggataaaaaccctagggtgagtgagacagagagaagcgaaaatg

SEQ ID NO: 10903 - DNA, 3000 bp, Unknown
  misc_feature (1)..( 3000): cDNA_ID_2711074_gDNA_ID_2214461_Annot_ID_182788 3000 nt of promoter + ATG
ccggagacaaagtattttaccatgtatgtacgaagtaacgaagcccaagccttaacaaaaggccggtacgaatatccatgccagatagatcaatgtatgcaaaagctctatgtagatacgagtaactgcatgcaatgattaatgatcaatatatggtacacaaattgtttaacatgcatttggcggataaaataatttacattatagatcggtatatgtgtttatggttggatgattgaattttttgtatgctactaattaagattccgattggacaatattccaatacctagctaatatcgattttagatgttagtggtccgattaattgatgatgtagatatcaaattcttatatcagtggatcaaaaatatgatacacgaagacatgttacataatgatgaaaaaagtagcaacggataatccccataccaacagtatgtaacatgtcttcgtgtatcacattttttagatgatatttcaaaaaaaaaggtttttattagttagatgttttcttttgttggaatatgcaaagaggaaagcaatgtaaaaaattccattatagctaaagcccattgtagtttttgatttttgagactagacccaataacacactaaaggacactaatcgaaccaagtatcttagggatccgttaagtctttcaccaaccggagacttggtcaagtataagtataaccgttgaagcataccataatccaagtcaaagatcagaatccttcagtggggatcttgcatccaaaatcgatatgtatagtcacggtggcaattttgagccaagccagagacgaagcagctcaggaaaactcatcatgctttactttggattggtaaggacactgataagttgatcaccacatggaacatctttatcatctatctagtgtgtatttatgttagataaatgattatcaagagaggtcttcttgggttgggagatgtataaggtagtgattaagatgtatataaacacatttaaatgagtcaaatggttaaataagtcaattttttgtttgaagtaaaataaaataaataagtttcttttataaagtaaacaaaatcattttaccttctttacaatttataagataaaacatgcaccaatcaccatttattaaatctagtttccattttacctacattaaaagaggatgggatacgtcagcatcaatgtctggtccaaatttattgagacacgtgtagccttgcatctctattgcacgttgaaaatgaaacgaaaatgataattaatttgcttaacacctaaaagaaaaggactaataaacgatcgcactcgaaattaaaaaggaattttcaatttcaacgtaacacgagcatctgccaaatgctctcgtataatagtcaatcaattttgtttttggaccgtgacttggccatgtttggacggtcgaagaccaaaatctctcacgcgactatctacaattctacatgttacccaaactcattaatacacctataaggctacaagtgttcaccagcagctacacataacatgaaactgctgatatttttcgttggtcgcccccccataggcatgtatgtccgggctcgaccgtgacccgatcatacctttacttgatctatatcttccaacttttctaaatagttatgaaacgctaattatctttactattacaactactttttttttgtgatataactataaatatcattaaaaatgaaaagtttagggattacaaaatgtaacacctataactttttaagtcaaaaaacaaggctacaaatatttatgaagacaccaaagtgaaatcacctaatccaaagttgcattaaatttctaaaatgcttcatttgtcttcgaggactgattacagttatgatatctttatccatcagctcaaaagtggtatggtgagacgagactgtgagattgtgaagaacattattccactgcttccaaatgtgataaattgtagtttgagatgttcgaactacccatttaaataataaataataaattctttaaaactactcaaatccgaattttactcgtttaataaattatcctattttaataacaaattaccatcatcatatctcttatttgcatttcacaaacattattttttaattctaaaatctatatacttttaccagcttggtatccgatattatcctatttttggcttgttcacccaaatgtacaatctgcaactttagaaaagaaattaggtttaaagatgatattcatgaaagaaaatctcatatgtgaccaaagaaaacaatttaagaaaatcttagattatgactttagaaagatgatattgtttcttttctgacaaaaaaccaaaagagatgattttattaaataacagttgaaactccaagagaaaaagggcaagtgaaccaatgaatgttttgaagcaaagtgacaaatggagaagaacccgaaaagcaatgtaaagtttgactcttgagttctcccacgtcgaaccatgtccgttctccgataaaaaaaaagagtaagtttcattacagttattcgaataattttaattcaaatcctaatgtatttgatattaatattcatttttttcccaagaaaacaaaaaactttattctcttcttccttttggacatcttaagcacaaggcaaaaaaacattcaaatcagaaagaaaaaaaagaagagaaaaattacaaaattgaatgagaaagcgaaatgtcacatatatataaagaagagttgtgtaagagtgaaataatttcccatccacaaatctcgcacctgattccataaattgatcagtttttctttctttctttcaacgcatatctagtgactctgtaacactttctatgtccgaattcgtcttctccaatagtaagagattttgacaattttcttgggggagaaaaaatcataaaaacactaatcatgtgtacccttgaagacgttttgtgtactattatgttaacgcgttgaaattaacgatgatg

SEQ ID NO: 10904 - DNA, 3000 bp, Unknown; identical to SEQ ID NO: 10902
  misc_feature (1)..( 3000): cDNA_ID_1029485_gDNA_ID_2214461_Annot_ID_182787 3000 nt of promoter + ATG

SEQ ID NO: 10905 - DNA, 3000 bp, Unknown; identical to SEQ ID NO: 10901
  misc_feature (1)..( 3000): cDNA_ID_2716747_gDNA_ID_2214461_Annot_ID_182786 3000 nt of promoter + ATG

SEQ ID NO: 10906 - DNA, 3000 bp, Unknown
  misc_feature (1)..( 3000): cDNA_ID_3038487_gDNA_ID_2214461_Annot_ID_182782 3000 nt of promoter + ATG
gattgaatacatatatccactatggagaataatctaaattaagtttctgtaaaataatgcgaacaaaagctaagaattaggatgatatttgattacgcgcagtaatgtttgaaatagggttcgtgattgatggtggtaaattagattcaatcaaaagatgaaaaaaaaagaagagaaattgagaaaagattaaataatttgacttgactagatgaggggtccataagggagggatgaggctatggtcactgtctttagagagtgaatgatgcagaggacacgcacgtggagtctgtttcatcccactgtccacttttatttatttactctccattttcttctactgagtatatttttttttatatatgataaaatttgtattttacaaccttaaaagtatatttagacagatagatcatagattgatgtatataataacagaaaaccttgatcatccagaaatgacccacaagacgagactagtactaaattgttgtctttctaacatttattatatcaccacatgttaatttgtaatatatttaaattgtctacaactaaacgaaggttatgggttttgttttggttaaaatgttattgaattataggagtgcgatcaatataaaataacataatgtagacctaaatccgtttttaaattgtttagagttgttcatggactaattaccaggatgtttttttttggtcggaactaattaccaggatgttgggatcgaagtatagttgttagtacgtaaaacttgtggtcctaaacctttttagggggcaaagtgtgattgattcttgtttgaagaggaaaaatagggagtcatatgtacataaatagatacgccagtggagaaaatgactgataataattaatgagtgattaattagtcggctgactttcttattcataatatcttctgatcatatttgtgaatcgtaattgttttgctttttagatttgtcaaatatgcacaacaccttttaactatcaattcgttttcttttctgtttagtctttgatatatagttttcttgatattttgattggtttactaattactacaagcaggccgatacttttagttatttatattttacgagggaaaattatggtcaatgaacatattctagttaaaacataaaaagatatcacatatataagtaattaaaatataaaattttgtcatttgtaaatatgtttgggcgaaaatgtttggacatcccataggttttatgtggctatgcgtaaagtttctaatagttagactaatcaacgttcctaagagatcatcagaactagttacaccttacacgtaacgttaatgattcgtctaaactaagagacgataattagccacaatagaaaatactatattttgatttttgagaagttttatcttcataaagcttagacatttgaaaaagaatagtaagattataacaaatatattttacaattttcaatatatactaagaaagatgaatttgcctaaactcaaaattaatatgtgtaagaatttttataattggttttctccatttcttttaacaaaatcatatgtatattcaaatatactacctggcaattattatatgcatgcttatgttggtttatgtaataacttggatttattttgttacactcaatttctataaaacacaaatttgagatttttaaaaaatatttatttaaaatatcttcataataattcgaatttacttttatattatttttttcttttgtattctctaattcaattatatttttaacgttaccatatatatatatatatatatatatatatatatattacgctggtcctaattagtagtataatctatgtaacaccgtatattttgattctttgaacagcttatatgaataatcatcacataagaaggagccttcttcatcactattcactacatataaaaattcgtttcagaaaaaaaagatcaatgttctgtccacatcagagtatcaaaataattttctaaatttagtgctacatcttttaacgacaattgtatgtcaatgagataactccaatggtggaaacaaaagagaagcattacaaatttgcttttatatatctataaagcactgtaactatggttttataaataataatatcaaactggtaactcattcaagagtcacagaggagaaaaaacaatccatctgtttcataaaaaaagcagttggattctattatatcatgtggatctcgtgaactaccatagagccatggattaatcactgtcattctgtcaataataattctatctatttattattctgttgtcacatatgtacaaaatatatgtaaacttctcagttctgtctgaatcgctgaaattttcgctaaatgtgcaattaatttcccgatcgcttgaagttaacagttacgacgagaaactgacgtcactttttaattattgtaaagaatgaaaaagagtgttcgtatagggtaattgtattattgtaaaaaactatgtatccaaacacaataaatacacgaacaacatttattttcactcactttgatcactgtacgtaataaggaaaaacattttatttgaatgaatatttgtacagattggagaaccacgtaagcccatctcttttatttccaaaaataacgaaaaattctcaaagggaatagtttataatgtaaataaaattccaaaaataaaacacaaaagatataaagcagcaagagaaaaaaaaagtccatgctttcatattcattgctttaatctctctctctctctcagacatagacacagctaagcttcccatctgaaaggagtttcatgtcctaaggaccatattataacctctctatctctctctaagtatcagcaaaaaaacagagatttatagagagagaaaaaaactatggctcacataaagatctaacagagacagtagtatagtcccacttccccaccaccaaagcttcgatcatcatcatcatcatcatcatg

SEQ ID NO: 10907 - DNA, 3000 bp, Unknown; identical to SEQ ID NO: 10899
  misc_feature (1)..( 3000): cDNA_ID_1034424_gDNA_ID_2214461_Annot_ID_182780 3000 nt of promoter + ATG

SEQ ID NO: 10908 - DNA, 3000 bp, Unknown; identical to SEQ ID NO: 10896
  misc_feature (1)..( 3000): cDNA_ID_2994682_gDNA_ID_2214461_Annot_ID_182776 3000 nt of promoter + ATG

SEQ ID NO: 10909 - DNA, 3000 bp, Unknown; identical to SEQ ID NO: 10903
  misc_feature (1)..( 3000): cDNA_ID_2711074_gDNA_ID_2214461_Annot_ID_132992 3000 nt of promoter + ATG

SEQ ID NO: 10910 - DNA, 2532 bp, Unknown
  misc_feature (1)..( 2532): cDNA_ID_2716839_gDNA_ID_2214462_Annot_ID_132994 3000 nt of promoter + ATG
aagcttatgtattgtcctattagctccattgttgcgtgtattaatgtgagtttggagattgatgatcatggagttcgacgtttggttcttagcactgatcagtctttcgttgttaagtttcagaaggcttatgattcaaactccaactgtaatcttaagtctaactcgagaatgttcctttttctctaagtgttaaattttggtaaattgttatgcttgagagttgagacaatgccaagtttgtgatgtaaccaacggtttctatgaaataaaacgtagttattgtgtgttttataatctaatgaattatcttaacacttaagtaacaactaacaatgtactatactactatgaataacctagaaaataattctttgtgggttaattaatattttataaaatgttggggtaatttagagaaaacatggaaatatatactatttattgataactccaaaactatgctatatttcactttggtgcccctcgtttgtgagagtatgtttggtccgtcgatgcacatggaagcagcagagatagtccattcggcggcgcgttttgaagctgagaaaatgggcaaggaggatgaggcggtggaggagatacgacgtatgagtggttacggcggagatgtgatagtagtaggtgggtttccggcgtcggagtcggaatctgaatctgaatccgatttggcggcggcggagattatggttatatgggctattcaagggccaacttcttttgctccaaacacactcgttgctcaatcttctcttgagctgcgtctcgacgcttgtggccactcactctctattctccagtcgccatgttcattggtaactccttagcttctctgtttcagtgtcaaatttctcgcttttagggtttattgcaatcaagtttgcgtctttcggatccttaacgagtttgtgtatatgtgtcttgcggctatcatcaaacctacattgggatgttgttagaacatgtttactgatacattcagcttttgttaagtggatttagcttaacattgaagaaagtgataaactttgattcttcttgggttgaacatgaagcgtgttagaactatctgatggttgtttgtttttgtactgtgaagaacacgcctggagtaaccgggtcagtgatgtgggacagtggagtggtgctagggaagttcttagaacattctgttgactctaaggttctttctcttgaaggcaagaaaatcgtcgagttgggttctggctgtggcttagttgggtgagcaaaaaccgctgatatttctcttctgagaattactattaacgtgtaaaacatttagttagtttcttctttcagttgtatagcagcacttttgggaggcaatgctgtcctcactgatcttccagatagactgaggctactcaaaaagaacatccaaaccaatttgcaccgtgggaacacgcgtggatctgctattgtgcaggaacttgtttggggagatgaccctgatccagatttgatcgaaccattccctgattacggtaatcatctcggtttcattttttctccttttgccttgtacataccattctcacaccttttatttgctatgtacttgtagtattaggctcagatgttatatacagcgaagaagctgttcaccatttggtaaaaacgcttttgcaactttgcagcgatcaaactacaatcttcctatcaggagaactacgaaatggttaatcattttctttttgtggttttcaatcatcttatataacaagaacacaatgtctaattttgcttgctcgttctttctgtcagatgctgttcttgagtacttcttagaaaccgcactgaaagattttgcgatcgggcgtgtggaacaaacacaatggcatccagattatcgcagccatcgagtagtgctttacgttcttgaaaagaagtcgaagagatgcctcgctgatgaatcttcgcttaatcaatcttgttagccattgaggtattgtttgtttacacttgacaactgaagtagatggccctaagcgggaagtatagttctggcctgatccttccttgcatatttgcatacatctagcttatagagtgttacagatatactaatttttattttaaccttgttttaaagtgatcttgaagaatatctaagaaacaaatgtactcttcttctttacgtttaacttttttttgctgttgtaaaaaatggattcagatcattgaagatatctggtctgcgttttaagtcagacacaattatagagcaaaattaaaattttatgtattgtttctcactaaaatgtttaaattaaaatataggaataattgtctttttatgatcgcgtgaagtgaggacgattgtttagtaattttatacaaggttgcgacattttaatattttgatccattaaaaaaatataccaaaaccgaaagataagagagttttgatagacgacttttttgtgtataaaagatgcagtaattgttgtccttaatgacattgctaatcagaaactgaaataggaaatg

SEQ ID NO: 10911 - DNA, 3000 bp, Unknown
  misc_feature (1)..( 3000): cDNA_ID_2716835_gDNA_ID_2214462_Annot_ID_132995 3000 nt of promoter + ATG
ccctttgagctcgaaaccgggtttgttttcaatctcttcgtttaattaaattggtgttcttagtttggagataatttaaaatccgtcagatactgtttcttgtgaatgaaggtatattggtgttggtgaggaagaggaggtgcaactgttctactacttcatcaagtctgagaggaacccaaaagaagaccctcttcttctctggctaactggaggacctggctgctctgccatctctggccttctttatcagaatggtgagatcgaaaacatggataaactccttcttctgcgtctctggttactgtctgtaaccctatatatgtaaaatataaccagggcctctggctatgaagctcgatgtttacaatggaactctcccttctttggtctctactacatattcttggacaaaggtaatacaaaaaagtgtgtagtcttgatataaccatcagcaaaacccaatgatcatttcttgatcacttctctcagacttcgagcatgatattcttggaccagcccgttggaactggcttctcctattcaagaacgcaactttttaataaacctagtgatacaggagaagccaaacggatccatgagtttcttcaaaaggtaaaataatgacaaacttaattgtctcttgaagccaaacggttcttagtaggagccttttcctattgttgttgtttgtgcagtggctaggcaagcatcaagagttttcctccaaccctttctatgttggcggagattcctattccggtctggttgttccagctaccgttcaagaaatttcaaaaggtatatgtatgttttatgatatcaatcccctaagcccttttctcaaataccattattgtaacagaagaaacatgatggtgatgcaggaaattgtcaatgctgcaatcgtccaataaatcttcagggctatgtgctcggtaacccgttaacagactgtgtatatgattgtaactaccgcgttccatttgctcataaaatggcactgatctctgatgaactctacgaggtatatacgatgacattttgttttttttcttgtcctcacaatgaaaagctgttcaaaaacactatgttgttcccagtcgttgaagagaacctgcagaggagaatatgtaaatgttcatccacatgacacagaatgcttgaaattcgttgaagaatttaacaaggttaaacactagagctgatttcgtgttgtggatctgccttaaattaataaataaagattcatcactaaattcagaccttgtgtggttatttttatagttaacaaacagagtatgcgaacgacatatattacattcatgttgcgaaactgaaactccaagttgctatgtaagtaatccatatatcttgccctctcttatctgttaaaccctttgagaatatatctatcatacacggttgcttttgcagtcttataggtttatgctaactacctactgggccaatgacgaaaccgtacgcaaagctcttcaaatcaataaggtaataatttattttaaggttcttggtaaaagcacagtgtcattattataggaggatctacgattgcaggagagtataggggaatggacacgatgttatcgcggtattccttacaatcatgacattaaaagtagcgtaccttaccatatgaataacagcatcgatggttatcgttctctcatctacaggtcagagtttataacccttttgctgatcttttgtccctatcaagattcaagactattgttaaactgtaaggtttttggtgcatagtggtgatcatgatatccaagtacctttccttgggactcaagcttggataagatcgctcaactattctatcattgatgactggaggccatggatgatcaaagatcaaatcgctgggtatatacgggtttttttttttttaaaacgggttctcttattcttttgttttatgagattcgctttgaagtttattcttgatacttaactggcagatacacaacgagttatgtcaataaaatgacatttgctactgtcacagtaaatctttcttcttctttttttttttttttttttttttttttttttttttaattttcttttaatccatctgccatttttattaacttgtattgagttgtgggtgttgattatagggaggtgggcacacagcagagtttacaccaaaggaaacctttatgatgttccaaaggtggatcaatggccaacctctgtgaaagaagagagtgacttttacgtacaacggacaagagattgtgtgtgattctagtaacacattttccaaatcaatgctgcctctcggcccaagtttctcatagagacaaatcaaaatgatgtggattcatcatttctaacatcgactctatgaaactgctttagctatttctcgatatttcagttgtttcttccagatacaagtgaggttcctttaataaacaatggtgaaggaaaatcgcagattttaaaagttttaacgaataccaaagtagtaaatcgaatgtctaacacgttaagcttgaaatgaaatgggtgctataaaataattaagtaaatctcttaaaaccacacgagtccaaaacaataatattagtggattggttaattggtctatttttgtgtggacctttttttttttttgttttttggtgctttaaaaaatggattcagaatttcagatcattgaagatactctggtttgcgttttgaatcagatacaattatagagcaaaagattaatagtataattatatttctatgatcgcaaaatgcgaggacgattatttagtaattttatataatactcaataattttatagtccgtttatcattgacaattcattgttaatttgttatacagggtgtaaggataaaggttgcaagattttatccattagaaaactgtgacaatgtgcgactttttttgggttcaagtataaagatgttgtctttaaagacattgctaatcagaatctgaaatacgaa

SEQ ID NO: 10912 - DNA, 3000 bp, Unknown
  misc_feature (1)..( 3000): cDNA_ID_2716823_gDNA_ID_2214462_Annot_ID_132998 3000 nt of promoter + ATG
ttatctacgaggtgggagaatcaagattgcgagattttccaattaaaaattgcaacaaggtttggtcatgtagccaaaattgaaagatagttggtaggcgactttttttttgttttagtataaaaatgtaattattgtccttaaaaggcattattgctacattgctaatcagaaactgaaaaaaacaaaaaacaaatggctagcaactacgttttctctgttctgaggtcgctgcttctgttaattcacactgtattcttaggtcagcaccatgttagttctgccacaattatcaagtctcttcctggttttgaaggccctcttccctttgagctcgaaaccgggtttgctttggatgtcttcgttttattaaatccgtgttctgaatctgagtttggagataatgtaaaaaaattaggttactgtttcttgtgaatgaaggtatattggtgttggtgaggaagaggaagtgcaactattctactacttcataaagtctgagaggaacccaaaagaagaccctcttcttctctggctaagtggaggacctggctgctcttccatctctggccttctttttgagaatggtaaaattgaaaaaatcgataaacttgttcttttgcgtctctgattactcgttgtaactcgatatatgtctatataagcagggcctctggctatgaagcttgatgtttacaatggaactcttccttctttggtctctactacatattcatggacaaaggtaatacaaaagtgtctagtgatacgactatcaacaaaacccgattgatcatcattttcctcaggcctcgagcatgatattcttggatcagcccgttggagctggcttctcctactcaagaactcaacttttaaataaacctagtgattcaggagaagccaaacggattcatgagtttctgcaaaaggtaaattaatgataaacttaattgcctcttgaagccaaacggttcttagtaggagcctttttcttttttttgttgttgtggtgtagtggctaggcaagcatcaagagttttcctccaatcctttctatgttggaggagattcttactctggtatggttgttccggctaccgttcaagaaatctcaaaaggtatatatatatatatatatatgattttatgatatcaatccccaagaccttttctcagtcttttattataacaaaaggtatatatatatatatggttttatgatgatgattgcaggaaattatgaatgctgcaatcctccaataaatcttcagggctatgtgctcggtaacccgttaacagactttgtatatgattacaactcccgcattccatttgctcatggaatggcactaatctctgatgaactcttcgaggtatgaagtatgacatttgcttttgtttcgtgtcaccccaatgaaaagcggttcaaaacaaaactttttgtccgcagtcattgaagaaaacctgcaaaggagactatagaaatgttcatccacgtaatacagaatgcttgaaattcattgaagaatttaataaggttacacactcaaagctgatgttgtttgtgccgtacgtaaataaatattcatccctaaattcatacctttttgtgattatctttatttagtgtacaaacagcatatgtcaacgacgtataatagatccattttgtgaaactgaaactccaaattgctatgtaagtaattcatacaacttattcttgccctctgttaaaccatttgagaaaaatatatgtatacaaggttgcttttgcagatttaccgttttttgctagctgcctattgggccaatgacgaaaccgtacgcaaagctcttcaaatcaagaaggtaacaatttattttaattttcttggtaagggaacaatgtttcttggtaagagaacaatgtcattcttataggaggatctatgattgcaggagactataggggaatgggtacgatgtcattatggtattccttacaattatgacattaaaagtagcataccttaccatatgaataacagcatcaatggttatcgttcactaatctacaggtttagagtttataacccttctgtccctaccaagattctagtcttttgttaaactttgtgcggtttttggtgaatagtggtgatcacgatttcgaagtacccttccttggaacccaagcttggataagatctctcaactattcagtcatcgatgattggaggccatggatgatcaaagatcaaattgctgggtatatataaaccgaatttgttcttccgttttatgagattcactttgaaatgtattcttgattcttacttgaatggcagatacacaaggacttatgccaataaaatgacatttgctactatcagagtaaagtctttcttcttcttttttttatccgctccaatatttttttattgcggttttctaacttgtactgagatgtgggttttgattgtagggaggtgggcacacaatagagtttaaaccagaggaagcctctatcatgtttcaaagatggatcaaaggccaacctctgtaaaagaggggagtaacgtcctttacgtataaaggaaaagaaaagtatgattctagtaacacatccaaaaatatatacataaggacccttggccttataagtgaatagaatttagggttaagttaaactcataatttgtaagcaaaatgtgtgttgctctattcaacaagcttggtacagttgcattttaccttcttttttgtcaacaagcttgttttccatttgtttgaagcaaaagttaatttacatgtattgttattaataagtgtcactaaagatatttaaattatatttttaatgataaaattatatgttggtagaggacaaggttggtcatgtagccaatatttaaagatagacttggtagacgactttttttagattttagacttttagtagaaaaatgcaatagttgtccttataggcattattgctaatcagaaacaaacaaaaaa

SEQ ID NO: 10913 - DNA, 3000 bp, Unknown
  misc_feature (1)..( 3000): cDNA_ID_2990347_gDNA_ID_2214462_Annot_ID_133003 3000 nt of promoter + ATG
tctcttgtgttcatttatttgttgatttttatttaacaattaggttgtaatacctttaatgtcaagagattgtgaaccaagtgatagtgtttttatatttttttatagaaagatataggcttgcctaactttaacagagcatttggagtgttcccacaactcgtcatccactaattattgatcaagtactacatatcccaaattctttattattgtggaaaataattgataagaagacaaatataaatggatttaagtaacgattggatgatcatttggtatggtagtatattgcatttatgtcgtgtcattactagttcttccactagtgagtgtatattcggtcttcctcatttttatgcttctttcatctaattgatgaaagacagactaaattcttttctttcttatgtcactttgcaacataatgtgatgtggttcactaacactcggatgtacataggtatgcttagcattagctattatagtataatacatatatggatatgtgcgtgtatgttcggactgaattaaagatttactcgttatttttgtgaaattctggttgacatatatagtttcgtaattacacttctacgatacccttagttccatatatggcgaaccgaacataatttattaatatttgttcttttttatcagccaaatactcttatttcaataatcgggtaaatgctttaccaaagtctagactaatttccagaattaatggaagattaacgtcgttcttttattttgggattcataacacatatagtggccaagattgagatcgcactaaaatggtttgaacaatagtctctccttctttcaggaagaatggagaacacttcgatcattgaatcgctattcttcgttacaccgatttgaattgattattttatgtttgcatatatatctcgacagaaacatccaaatcttgtattcaaaatgatatcaggaatttgttttctcaatttttgttgcctcctaacacttataattccacgatttatagtatatacaaaagacttcgaaaactatagacatgtacataacagtcccatggaatcaaaagtagaatatgccatatatcccatagacataaacactttaattctcatctgtccacgatatataaacgaataacaaattcacacgcaaattgtcaccacatacgagaaaaacacatgaaaaaggagctttggctacgcatattcctcctaaaaaaaggtatatcttaatcaagaaaaaagtttatagatgattatactaacgtagacgataatactagacggacgtaatcacaagtactaacattttcaccctcgagatcatattactatattccaaattgaaattttatataagaagttccggctaattaacaccattaacacaaacaaataatattcacgtgacgaagattcatgaacgatatgttgctttccagatggagtaataagtccaaatatatatatttgttagtgatgtttgtgtttgtgtaatgttttgtatacaacaaacaaggatgattctatcacggaaaacgaccttcggaaattttttgtattgatcgatagcatgcaaaaacttacataggtatagtcatatagagcctagacctaggtttgaaaaggaaaatgaattttcacattctagagaataggaaaaacttaattaagaaaggaagatagagataggtacatcaaatatacgaaaatatattacgtaccaatagaccccccacatcacgtaatgtcctaatcctactattaatcccactttcttcatgggctcttgggatgatcgcacctctttaattaactaatctttaataatgccattatgcaacaactttttgataattggataacctaaatcgaaaacttaagtagttgcagagtctgtgaaaaccgaataaaattgagttctaaaagttatgctagctaagttttacaagtaaatatttctatttgcaactttttctcagatttgtttgttccatttttcattattactcagattgatagtttttttctgttcattatctctctatatggaataatagttattaaacgccaaaaaacggatcaactataattttggcttagatttctcatttactttttttaggtaaagaaatctagtactacacacataatcgctgaaccgtacatgtatattgtaaagagtgtgtatgcagtatgccatacgtaacactcaagtacttacggatgaatatacgttcacttaattacaacgggtttcttgcaaattataaactcaaatttcatgtttttattcggccaaaaacccgcaaaacgaaccaaactttggaaatcacgatcgatcgaaataatatttgacaagtatcaagccacatgcattggttacacatcatattattcaatttgtaattttagctatgtgttgtcctcatgcatcataaattttttttttctctttctcgtcacgcatcatgcattctaaccgtaacctttgtcgtttattttctttttccaatatatttaaaattagtgggaactaaaagagttacgtttgttgcaaaaagaaaaatgagttacatttgtagacaaaaagatgaaagagaagtatagacaaataaaacaagaaggaaaaagagagagttgcatttttgttaatgtcacgaatcaaaagtaattcttcttttcaagataattgaatttagagttgtaaatgatcatgagaacttaatgaacgtgtaccaatcaaacgcaacagataatatagacaacacaatataagaaagttaaattgtttatacgaaaattttaatgactcggtatgcacaattgctttttgattagtttattagagagagtgagaaattggatgcaaaacactcctcgaccatgtgtatatataccatcgctaacttaagacatatatcaatcaatcccacaaacctaaattgaaaacaaatatatttccacctgaaacaacataaacagaatg

SEQ ID NO: 10914 - DNA, 3000 bp, Unknown
  misc_feature (1)..( 3000): cDNA_ID_2716804_gDNA_ID_2214462_Annot_ID_133005 3000 nt of promoter + ATG
agatgagtgcgtatggctttggcacacaggttgatttaaacaatggcgaaaccgttatgcagtactacgtcccgtacctatccgctatccaaatccacactaacaaacccgccttgctttccaggttacgtttcccacttgattctgtgacattttagtctgttgtgatgaaagtttgactatggaagtattagaacatctcttgatggtttgttcttgggtgttgcaggaaccagaatgaggtggctgaatctgagagtagcgagggttggagcgatagtgagagtgaaaagttgttgtcaaggtcaatgagcaatgattcaagcaaaacatgggatgctgtctctgaagattcggttttcgatccggatggttcaccgttgctgaaagatagacttggtaaccttgactttaagtacattgaaagagatcctccgcacaagcggattcccttaaccgacaaggttctcttctctcctttcattttcatttcttagtaacctcattctcagttttgaaacgaaagtaacgttcttggttcttgttcagataaacgtattggtggagaaatatccgggactcatgaccttaaggagtgtcgacatgtctcctgcaagttggatggctgttgcgtggtaagtagttctttgttaagttaacaaaacccttcctgtttggttaactgctagaaatagtgattgagtgatggtttgatgaattaggtacccgatataccacatcccaacctgcaggaacgagaaagatttgacgacaggcttcctaacttatcatactctatcttcgtcttttcaaggtacgtatgatcacttcgaattcattgctcagtaacaagcaccattttctggttttattaatggtgttaaaaatgctgcagataatgtggtggaaggagatcaaagcaacaacaatgaagaaacagagttttgtgaagattccgtaataaacaagagaatgccattgcctccgtttggtgtaacaacttacaaaatgcaaggagatctttgggggaagacggggtttgaccaggaccggttgctttatcttcaaagcgctgcggattcatggctgaaacagctcaatgttgatcaccatgactataacttcttccttaactcgagcttctaaagatcaatcgggtcgttcgtatgtttatccttctccaaaccttaaacaaaaaaaaaagacctcataaccctttttctttgttgttttcaagctccttttgtttctctgtgttttttgttctttttgtttttgtctggctcgttgtgttgttttaggtagcaaccgccatcgcggagttttttctccttttgcaagccaatcatggaagtttctaagaagaaaacagagcttttttttctttttttttaacggtgttgagaaaacaagaaagttgttttcttttcttgggtgagagatcatgtaaattgaccttgaacagaggactctgttttgtacttttctgtctaaaatatataaaaaaatctgtctttcttgtatgtcggtatgagtggaagaagaagactgtttttgatagatttgatatgtcctttcgtttcttttcaagattttttagtgttgaatatgatgacgatgttgtcatacaatatttacttagtaacagttgttgcatacttttttttctatgttctttataatttaatttaaattgtttctatgttcttttcgaagcttaaaagaattgtgcaatcccaaactgaaacagtcaaacttactagttcaacaaaattgttttgctatatcgggctgatatttactgtcgaacacaggtaaaaaagtatttattttatttttttgttgaacacaggtaggtatatgcctacatggtatacaaataatatagacagtttcataacatttacaattgtaacatactgtttttacaatttttgttgtcgttttcttatttatcgtattaaaattgatcttatcctgaattttaaaatttagataactgacaaacgaaaagattaatgctaattgtatatgaaatgaaatgtattgttgtacattttaaattatatagacaatttaatgatatttacaatcacaaccgatcgttttgtcaatttttgttgtcgttgtattatttattgcatttatatcgatcgaaccctaaattttacatgtaattcacttacaatcaaaaataattaatgctaactttatatgaaattacatgtagtaaatttaaaattatattgacaatttcttctttgcatttttgttggcattttcttatttattgcattcaaatcgattaaaccctgaaatttaacatgtagatcattaacaatcaaacataattaatggtaacattaacatgtagtaaatttaaaatacaatacacaatattttgatataattttgagtttaaccaaattatccaacctataaaaacacatgcaatggattcttgaaatctttatgtctttagcgatttgaaatgaatttatgtagattttcatgtgtacacacaataagtaataaaatctaaattatcatctacttaaaataaaaacataaaatttaatcataaaatcaatactaaatatatcaaatcagtaaacaaaaaatcctatttcatattaatatgttaagaaataaacttttatgattttttttttccaaccactacatttatggttgtttttcaaatgttttcttatgattttctgagtcaatttttcgctttttgttagctggatactctctcttctgataatggtcttttgtttttcaaaaaaaaaaaaaataataattcttttttgagcaaattatttggttggaaattgcaaagtttatcaatcaaattaatctcatcctccttcttcttcttcttcttccaagtgacatgaactatacaacattacgcgttttcttctcttattgattccttcgtaagaaatcttctccactagttgaccaatcgagagacttgtggtcttcccggag

SEQ ID NO: 10915 - DNA, 3000 bp, Unknown
  misc_feature (1)..( 3000): cDNA_ID_2716798_gDNA_ID_2214462_Annot_ID_133007 3000 nt of promoter + ATG
ggttaaagttgtggatgtttggagagatggagtgggctgggatttacagaggcttacgccgtatatcacagaaggtatgaagctcaagttactatctttggtggtggataatgtgacaggggctagggatcgtttgtcttggggagggtgttccaatggtaaatttacagtcaagtcagcttattcttttttaagcttggactggagttcgaagcagcagatggcgcgttttttctctagaatttggcgtgttgtagctcatgaaagagttcgagtgttcatatggttggctgcaaatcaggtgttgatgacgaatgttgagagacacagacggcacttatgtgattcgagcttatgttcagtatgcaagagtggggaggagacaattctacacattttacgggactgtccggcgatggcgggaatttggacccgcttgttaccagcacggagactctcttctttcttttcgaaatcgctgttagaatggatctatgcaaatttaggagaggagatagagattaatggttgtccatgggcggtcactttttcgcaggccatatggtgggggtggaaatggcgttgcggtaacatctttggcgagaacaggaagtgtcgggatcgggttcgttttattaaggatcgtgcgttggatgtttagaaggcgcatgtgcacaaaatgggagtgacgacgcggacagctagggaggagagattgattgcgtggtctccgccaagggtgggttggtttaagctcaatactgatggggcttcgcgtggtaacccgggactagctacagtaggtggagtagttcgagacggggatggaaattggtgttatgggttttcgttgaatattgggatttgttcggctccgcttgcggaactatggggagcatattacggtttaaatatcgcttgggagcgcggtgtcacacagttggagatggagattgattcggagatggtagtgggttttcttcggacagggattgatgattcgcatccgctgtccttcctggtgcggttgtgccatggcttactttcaaaggactggtcagtccggatttcgcatgtttatagagaagctaatcatctcgcggatgggttagctaactatgcttttcttttaccgttaggttttcatttgtttaattctactccagatagtgttatgtcgattgttcacgacaatgtagcggggtctgcgtacccccggaacgttcaagtgtaattttttttagtttttcagttttaataaaaatgggggttcgcccccctcttctaccaaaaaaaaatacaaagccaggaacagttttggttttgatcatacacaacgagaaacaagacttgtaagaattttccattgtacttaagaggctattactgtgtatcaagagctagatcacgccaagtttcagcatctgcttgctgagtttcctgatctgaaacaatcacaatgtgagggattatattagtcaagctgcttatatgaagattcataggtatcttggaagtgaaagttgttaaatctcagaaaccctctgaaacaaagctcaaatttgagctttactatgtttgaaacatacacaaaaagtgacgtatgtgtctccattactttccttatgacatttcaaggtctcaatatgggtgtttaacatcttggatcagaaatgcatcaccagtgtggattcacagctagcagttttaagaaaagactatattccaaagaatttagaccttaagaatcataaagctatgtaaactgtaaagcaaagcaaagaaaaaaacaaagagccatactggtttcttcagtatcatcagttttaacagcaagcactggaggcaatggaagatctgcaacaataatctcttatgaaatagaaaataggagaaacacaatgatcttgaggtataatgtaggaggaaaaagggttaccatcatcaggcaaagtgtccctcatccactcttcgtccacaatgtctataagcataccaagacttacttccgccatattcgaaaaactggagcttggaaatcccacaaattactgatgaaatcatccaataagtaaacatatatacaaatatcagacaaatggtgaagaaatttggattgttgaagtaaaaagtcaatttctttacaataggaaaacattgaacagaattgggacttctgatatccaaaattttgaattttgagaaagtgacagtatataacagacagaataaagctcaataacctatatatgaatatctaaaacaatctacaggtagtttcgccggagattatgaaaaagagagtagggattcattgagaaattacgtcgagcagttggtgaactatctagtaaagagaccaaatacgaaatcgtaccacaactcaaagccgactctttataaacagatatgattctctaaggaaaaaaacctaatttgaatcgaattagcaagagattcacctggtagaaacaatgcagccgtactccacacagagaactaaaaacctctagcttataaaaaaagctgattttttttctctttggttataaatatacagtaaccttctggtttacctagagtattcaaaaggctgatgaaatttaagttagggtatctctttatacggttcagagcttaagccggccactacagcgaccgacttctctcgccgtcgattaccggatcgtctccgttattgcgtgcttcatttaggtgctttcttcttcttcttctccagtttcagattttcctgttcttgcatttcacctttgagaaattgtgatataaaagttgtttactttacttcaatccagtaaagtaatttggtgattatcgtttcctctaccgcgatcactgtgtaattgatgatgagggttttatacgttcagtacaaatttgagagcttttatgttgacttcaatttgtaaccagtgtatcaattctgggattttaattttcatcattgcattatatattaggtgtatcaagtaagcaatg

SEQ ID NO: 10916 - DNA, 3000 bp, Unknown
  misc_feature (1)..( 3000): cDNA_ID_1989675_gDNA_ID_2214462_Annot_ID_133010 3000 nt of promoter + ATG
aaattaaactaacacctttctaaattgaaaccattgtcacataacacatggctaacttgaaattcttgctgtgcttgttcttgatctgcgtttccttatcgcgttcatcagcgtctcgaccgatgttcccaaacgcagacgggattaaacgagggcgtatgatgatagaagcagaggaagtgttgaaagcgagtatggagaagctaatggagagaggttttaatgagtccatgagactcagtcctggaggtcccgatcctcgccatcactaagtcttattctcgtagttttgaattcgaggatgtatattttgttcttgatcgagaaccggtttagaagaaaacatatcgatcctctttgtttgttttttttgccttgtttgttcgttcggtgtaaccaatatattgatgtatctgtttcgttacacatttatgatttgtgcatgctttacgtaccttatacattccactatatagtagtctagtagagaggaggactttgcatataaattgttatataacaagaaagggtaaagaaatatagtatgataagggaggattgaattaatttaatttatcctgttttttcagtctctaatggctcgtgtagaaaagtatatattatatatggactcttttgcctcatcgtccaccaatgaaatatcacataaagagagaacgatagtgattgaagtttttcaaaaagaaaaaaaaaacaggggaaaacagagagaattatactttttaagagcgaagcaacgtcttcaaatcttcaatttttcagagatcaaacccttgaaatgctgctctttacgaaactcattttccaaaatctctttttcatcactttcgttacaaattcacaaaaagttacaagtcgtgacaagcttgagcttaagtatgtgtatgaatagtgtgaccaaattgttttgcaagagatcaagtaacttgttacaaaagaaatgattcaacgtaacttacaaaactataccaatttaccaaatcagttatctgtggaaagagggtacctacagtacctctcatttttcatacacataaagaatctctcataagccgaagccatttgagtcgctgtaaacatcgaaagagcgtatcccttacaagctattcctttcatctccaaaaccctaggcccatctcttacaacagaatccaaagtctcaacaagagatctcacgtttggagaaaatgtgtacccaaaacgctcgtccacaaccactgtcccaacaatgcttggataattaggtgccacgacaggtttcccacactgcatcgcctcaatgatcgtcaaatcaagcccctgtggtctcaacgtcggattcacaaacacatctaaagcgttgtagaaaccagagagctcctctggctctaaagctcctaaaaccctaacgttttcgcctaattccgcgtatcttttgccccaaggaccagatccagccacaagcaaatagactttcgggtgcattttaacgagcaaagcaaacgcttcatatagaagtggatgtcctttgtctctcaccaaacgtccagacacacccatcacaatatatgtcccattgtcaggaataccgtgtttcgccctgaacctagctccagattcaggagaatacacgaacttggtttggtcaacaccgttgactataacgtgaacttttctcttaggaagttgatagatgttaactagtacctcgcgcgcgctgttgctaatgcaaatatgctgtttatattttgggaagaatctgatttcatcgacgagtctaggcatcgtttgttgaagatcagagctaggacgatcattggaaagttcttgaaaaagatttgaatgcataatctcgtaccagattccgtgccatgtcacagctatgtcaccattaggcaccattttgactcgccaatgaggcagagaaacactctcagtgtgaacataatcaaaggaatgatgatctagactgttgattttatggaagatctcaaaagctcgagagtggttaagtgagccgtgttcgtttggagcaaagtagacatggagatctcctttgttgtagtactcttctcggttacttctgtcggaagaaaccgtgaagacgtgaatctcgtgacctcttgaggcgagagaagtgtagagtgtgtaagcatgacgctccattcctccggggatcgaaccaacaggccatgacttgcagaagacagcgagtttgagcttctccgagattggtccaagtgagagtttgttccaagggaatgtcaggtctcgaagatctcctgcgaaaggaggattttccggtgaagaagtcaccggagagtaatcaaactgtgagaagaaaatgtagtaagaagaacaaaagatgaatgctaaggtaatgattgttgtgaatctgaatgaaaatgaagtggaagaagaagaagaaagagttgttcttgaagaatggttcttgaaggccattgttttggtttatttgatttttgtgaattgagtgcaactattgatgttgattctttgcttaaatttcggatctttctcgagttattatatcaaagttcatttctcaatgacattgcacatggcttagctaatttttatatggtttttacattcaattgaaagtcaaatctctcttaaccaactgagatttgtaactaaaccgggatatcacacctaattagttttcccggtttgatattttgttttgtacacgtaggcgtgtgattactccgtcacactttacacatgtgtaattcccctaatttatcgggtttctttaggcgcgtgagataatgcgcgtgtgtctacgctattcttgcgacgctgtgcttcctagggtttcgtcgttgcaaacacagtcaatgttcatgaaccacggatcctaatctccccgatcttcgattcattgtttcagaaatccccaattactgtctctgtgcgtaaaatctctagagaaaccttaaaattttccgttcagagaaattgtcaacgaaggta

SEQ ID NO: 10917 - DNA, 3000 bp, Unknown
  misc_feature (1)..( 3000): cDNA_ID_2175085_gDNA_ID_2214462_Annot_ID_182819 3000 nt of promoter + ATG
cttctacactatcctcgcctgaaaaaacccaagagtttccagcagaagatttctgagaggttaaactgttactgatccaagactcatcatccgtaattattggtttttcatcaccaagagtagtgtctgatgtcagattagcatcacaatgctcttcgagcaatggagacttagagagtatttcttcttcagaaaatttctgaggggttaaagtgttagtgattagagactcatcatcggtaactattggtccttcaccaccaagagtactggttgatgtcagattagcatcacaatgctcttcgagcaatggagacttagagagtatttcttcgtcagacaaggaggattcaactctaacttcttgtacactttcctcgcctggaaagacagaagagttttcagcagaaaatttctgaggtgttaaagtgttagtgatctgagactcatcatcggtaactattggttcttcaccaccaagagtactggttgacgtcagattagcatcacaaagctcttcaagcaacggagatgtggagagtgtttcttcaccatccaaggaggaggctgatgaattctctccgtgagctatattctccactaaaatgtcaccttgaactcgttcctcaacccgaacatgtcctaaaatgtcaaagttctgacatggcggtgaatcagaaggactattacaacttggtgaattagaaagacttttagtgatatgcgactctttatcagtaactattggttcttcatcaccaacactagcggctgatgtcagattagcatcatgatactcttcaagcaatggggatgtagagagtctttctccatcaggaaatatctgagactcttcatcagaaactaattgttcttcatcactaagagtagtggttgatgtcatataagcatcacagtactcttcatgcagtggagatgtagattctatttctccatcagacgaagaggaagctgatgaattatcctcaaaactatctctttgaactacattctctttcaaaatatcgccttgaactcgtttctcaaccaaaacatgtcctggaatgtcaaagttctgatgtgacggtggatcagaaggactttcacttcgcggtgaagcaacacgatcatgacgtccttgtacattagaagaatggtcctctgcaacttcctttgattcacctctaacatattcgaatctcggaggttcacttgatttcaaacaaagcgtgctctgtgccaacataagaaaaccatcactcattctctctattctttagacattattagctaaaattgataatgacaatcaaacaatggactaacctgagaagtgaaagagtcaacctcaacaagcaaattttccaacttgttgtagattttactaaaccatgctcgtcctttagattctggtcccatgatggctcacgctatacgaaaattatgcagcaaaaatataaactttggttaggcaatatcatcagaataataaagagttgaaaaatatcatgttattccaaacttgatcgcaataagaagatgaaagtttcaaacaacaaaaacaggtcctcactaagaaacagctcaaaaatcctgaaaattttgccatcatcactaatcactaggtctagattttatcgaaactcagatgcttaatcggaaaagatgaataatttagaaaaactgtactatacagctatctcaaatttgtgacccgagcacgaagatcgctgaaaaagagaaactcatagacgcatcgaattacataaaaaaacgagactttgagatgaaaaacagagaaagtaatcaaaaggagataaaccctgaaattcaaagtaaacatagatgagaaaaacaaggaaagagagaagaatttacctgagaaagtaagaaggaaagtacaacagaggaagaaacgagaaaaaggcctcaacataatcatcatacaacaataaataaatactaaagagcttatttaagatttttttttatttttttattttttattttttgagaaaaggattctaatttaggattacaaccagatccataataaaaattcaatttagagaattaaaaaaagaaaaaaagaaaaaagtagtgttattggtttgtgatttaaatagtgatttaatgactttaaatgttactagaatctattgttattcaataataaaagttaattaagagtttggtgttattagtttgtgatttgtaaaaaatctttataactctaggttattggatttagaatttgataaagttgttgaaaaaaaaaactttgggttattcaactaaaacaacataattttttttattattaataaactaaattattatattattaatttataattttatacattttcgtcataaaaatatcgtcaaaatagagaaattattcgtgaaactttacaaaattacgaaaaaaactaattaacaaaattatataatactctctaccaatttctcttcatttatttactttatatgattttaaatcatcaaaattctttttaaactagaatccaataccagcccaaagttacatatagattccgggcttttattgggctacctatctaaagttaacgggcttataaaatttagtaggcccaatagaaataaagtagtccgaatgggtcatgaatcatgcacgccacaagtgaccaaaacatgatcatgtgtacgcatacgttttgaagaagaatgatccaaaataagaagacgtggattatgccacgtggaggggaatggcacaaaagaggcatgggtctgacgataaatctacctcggggagtgtgcatctggatgatccctctccatcattctttccatcccaaattctttatcttattttaattttgttgaaattccattcacattttatgatgtctcatgtatatatatgcaactctctcaacaaacacataatataaatatatttacctacatcagattcttcatacacattgtaatcaatagaccatagagatttac

SEQ ID NO: 10918 - DNA, 2596 bp, Unknown
  misc_feature (1)..( 2596): cDNA_ID_1989677_gDNA_ID_2214462_Annot_ID_182817 3000 nt of promoter + ATG
cttctacctttttccctcaatttaataaaaaaagatttatacttttctcccaaagataggattttgaagaagaagagccatttgttctcgtctgatagtggctaattctgtggttcttgaagtcaaaagatagttttggccccacttgttactacttgcatgtttgtatctgtctgaaactatagcaattccaatttgtaagaatggatataagttttttgtttggtggattttggatcaaagctttagttagtcattagaaggtacattatgaataaggcagcagttaatctacatgcattggtagtttggtacgtaactcattttgtaatcatcattaattattcattatcattggttatatgacaatatatttccacttaattacacatatattttatggtttcccattagaacaatagacaataatatagagacttcgagtcttcgacgagatcgagatgagaagagagtcactcgagactaatggatcaagagaaccaattaacgagctcgtccgcgtggctgccagctggaggaggaggcacatcttgcatcactttctcttgtccctttggatagtatattcccgtaccttcatgtggcacccaactactcgccggcgacgacgtttctccggcgccgtagaagcctctcatcgtcttcacctcctctccggagctagagccctcagtcttcaccgtatccctcactatatcatgcgaggcactcttcttgtgaattgatttcctaagcatcggcctatatatatgcaaattgcatgtgttaatgatatataacatgatacataattaaacgatcataacaaccaaaagtgtatgatctaagaatcaatatgaatagagagaaaattagcatggtttatgcgtaaagattgacatgcacgaaacaaataatgcatatgctcaacactaaatttaaggtaaacttacttgacgaacatggtgttcatggtttgtgccccacgagaagagaaggtagaagtcgccatgtaaatctctatggtctattgattacaatgtgtatgaagaatctgatgtaggtaaatatatttatattatgtgtttgttgagagagttgcatatatatacatgagacatcataaaatgtgaatggaatttcaacaaaattaaaataagataaagaatttgggatggaaagaatgatggagagggatcatccagatgcacactccccgaggtagatttatcgtcagacccatgcctcttttgtgccattcccctccacgtggcataatccacgtcttcttattttggatcattcttcttcaaaacgtatgcgtacacatgatcatgttttggtcacttgtggcgtgcatgattcatgacccattcggactactttatttctattgggcctactaaattttataagcccgttaactttagataggtagcccaataaaagcccggaatctatatgtaactttgggctggtattggattctagtttaaaaagaattttgatgatttaaaatcatataaagtaaataaatgaagagaaattggtagagagtattatataattttgttaattagtttttttcgtaattttgtaaagtttcacgaataatttctctattttgacgatatttttatgacgaaaatgtataaaattataaattaataatataataatttagtttattaataataaaaaaaattatgttgttttagttgaataacccaaagttttttttttcaacaactttatcaaattctaaatccaataacctagagttataaagattttttacaaatcacaaactaataacaccaaactcttaattaacttttattattgaataacaatagattctagtaacatttaaagtcattaaatcactatttaaatcacaaaccaataacactacttttttctttttttctttttttaattctctaaattgaatttttattatggatctggttgtaatcctaaattagaatccttttctcaaaaaataaaaaataaaaaaataaaaaaaaatcttaaataagctctttagtatttatttattgttgtatgatgattatgttgaggcctttttctcgtttcttcctctgttgtactttccttcttactttctcaggtaaattcttctctctttccttgtttttctcatctatgtttactttgaatttcagggtttatctccttttgattactttctctgtttttcatctcaaagtctcgtttttttatgtaattcgatgcgtctatgagtttctctttttcagcgatcttcgtgctcgggtcacaaatttgagatagctgtatagtacagtttttctaaattattcatcttttccgattaagcatctgagtttcgataaaatctagacctagtgattagtgatgatggcaaaattttcaggatttttgagctgtttcttagtgaggacctgtttttgttgtttgaaactttcatcttcttattgcgatcaagtttggaataacatgatatttttcaactctttattattctgatgatattgcctaaccaaagtttatatttttgctgcataattttcgtatagcgtgagccatcatg

SEQ ID NO: 10919 - DNA, 3000 bp, Unknown
  misc_feature (1)..( 3000): cDNA_ID_3038527_gDNA_ID_2214462_Annot_ID_182813 3000 nt of promoter + ATG
ttcgattcaaattaggtttttttccttagagaatcatatctgtttataaagagtcggctttgagttgtggtacgatttcgtatttggtctctttactagatagttcaccaactgctcgacgtaatttctcaatgaatccctactctctttttcataatctccggcgaaactacctgtagattgttttagatattcatatataggttattgagctttattctgtctgttatatactgtcactttctcaaaattcaaaattttggatatcagaagtcccaattctgttcaatgttttcctattgtaaagaaattgactttttacttcaacaatccaaatttcttcaccatttgtctgatatttgtatatatgtttacttattggatgatttcatcagtaatttgtgggatttccaagctccagtttttcgaatatggcggaagtaagtcttggtatgcttatagacattgtggacgaagagtggatgagggacactttgcctgatgatggtaaccctttttcctcctacattatacctcaagatcattgtgtttctcctattttctatttcataagagattattgttgcagatcttccattgcctccagtgcttgctgttaaaactgatgatactgaagaaaccagtatggctctttgtttttttctttgctttgctttacagtttacatagctttatgattcttaaggtctaaattctttggaatatagtcttttcttaaaactgctagctgtgaatccacactggtgatgcatttctgatccaagatgttaaacacccatattgagaccttgaaatgtcataaggaaagtaatggagacacatacgtcactttttgtgtatgtttcaaacatagtaaagctcaaatttgagctttgtttcagagggtttctgagatttaacaactttcacttccaagatacctatgaatcttcatataagcagcttgactaatataatccctcacattgtgattgtttcagatcaggaaactcagcaagcagatgctgaaacttggcgtgatctagctcttgatacacagtaatagcctcttaagtacaatggaaaattcttacaagtcttgtttctcgttgtgtatgatcaaaaccaaaactgttcctggctttgtatttttttttggtagaagaggggggcgaacccccatttttattaaaactgaaaaactaaaaaaaattacacttgaacgttccgggggtacgcagaccccgctacattgtcgtgaacaatcgacataacactatctggagtagaattaaacaaatgaaaacctaacggtaaaagaaaagcatagttagctaacccatccgcgagatgattagcttctctataaacatgcgaaatccggactgaccagtcctttgaaagtaagccatggcacaaccgcaccaggaaggacagcggatgcgaatcatcaatccctgtccgaagaaaacccactaccatctccgaatcaatctccatctccaactgtgtgacaccgcgctcccaagcgatatttaaaccgtaatatgctccccatagttccgcaagcggagccgaacaaatcccaatattcaacgaaaacccataacaccaatttccatccccgtctcgaactactccacctactgtagctagtcccgggttaccacgcgaagccccatcagtattgagcttaaaccaacccacccttggcggagaccacgcaatcaatctctcctccctagctgtccgcgtcgtcactcccattttgtgcacatgcgccttctaaacatccaacgcacgatccttaataaaacgaacccgatcccgacacttcctgttctcgccaaagatgttaccgcaacgccatttccacccccaccatatggcctgcgaaaaagtgaccgcccatggacaaccattaatctctatctcctctcctaaatttgcatagatccattctaacagcgatttcgaaaagaaagaagagagtctccgtgctggtaacaagcgggtccaaattcccgccatcgccggacagtcccgtaaaatgtgtagaattgtctcctccccactcttgcatactgaacataagctcgaatcacataagtgccgtctgtgtctctcaacattcgtcatcaacacctgatttgcagccaaccatatgaacactcgaactctttcatgagctacaacacgccaaattctagagaaaaaacgcgccatctgctgcttcgaactccagtccaagcttaaaaaagaataagctgacttgactgtaaatttaccattggaacaccctccccaagacaaacgatccctagcccctgtcacattatccaccaccaaagatagtaacttgagcttcataccttctgtgatatacggcgtaagcctctgtaaatcccagcccactccatctctccaaacatccacaactttaaccgcctcccagttcgccggtaattcgcatgttaccacctcacataacggggtctgcgacatccacctatctttccagaagaggatatcaacaccatcccctagaacccagctcaaacccgagaaaaccacctccttcagacccacgacaacgctcctccatgtagaagaccatgtacctttagacaccatccacgctctgttatgaatatcaccgacacggtacttgcttctcaagattttcgaccatagactcacatcatcatgaagtaaacgccacccaattttcgagagaagagccgtattcatctgtgtagagcaccagatgcctaaccctccatcctgttttggcaagcacacacgatcccatgcaataagatgttcctggctttgtatgatgaagacataattgctactctacttaatattaaaaaaaaccttggtggcataaattttaagaatttgtcgctgacgtgtctcgtgatgattcgtccacgtggttggcaaacggctcctatttaaaatctcaaaaccaaaaaaaaaaatcaagcgaggaat

SEQ ID NO: 10920 - DNA, 3000 bp, Unknown; identical to SEQ ID NO: 10914
  misc_feature (1)..( 3000): cDNA_ID_2716804_gDNA_ID_2214462_Annot_ID_182808 3000 nt of promoter + ATG

SEQ ID NO: 10921 - DNA, 3000 bp, Unknown; identical to SEQ ID NO: 10913
  misc_feature (1)..( 3000): cDNA_ID_2990347_gDNA_ID_2214462_Annot_ID_182805 3000 nt of promoter + ATG

SEQ ID NO: 10922 - DNA, 3000 bp, Unknown
  misc_feature (1)..( 3000): cDNA_ID_2114009_gDNA_ID_2214462_Annot_ID_182803 3000 nt of promoter + ATG
cttcgtggttgctggtccaaagccagaagggttcggacaagattcgttgaagagtttcttcaagatcgagaaatctggagaggatgcttacaagtttgtgttctgtcctcggacttgcgactctggcaatccaaaatgcagcgatgtcgggatattcatagatgaacttggcgttcgtcgtttggctttaagcgataagccgttcttggttatgttcaaaaaagctaatgtgaccgaagtttcgtccaagactatgtgagaggacaactctcgatcttttactttgactactcataataaaacctctatgttttttttttgataaaacacccgctctctgttttcttgaaaactacaaattgaataaaagctagtgaagcacatgcctatttattaaatcttcatcttctctcaatcttaatgcccgatataaatcaaagggatagagtggacgtccatttaaataaaaccagctaacaatacaagcccctaattattgttgtgtatttaataagaaaaaggaagcttttaaacagtacccgttctctagagaattctgatgatggtagtgatatagaaaatgataaaaataattaatactctagtctctagattgactaataactaatgttttcatttagtctaatgactttagttcagtttctctttacataatctaattgatttttttatatatttaaattctcttattctttaatttgaattttatttttgtttatataatagcaaaagtgactgaatcaatttacaaaatgatatttaggtaatttaaaaaacttttgaaaaattgaatctatgaaaggttagtttgcaaaaattctgcgtagaaatttatagaaaaatattatttttgtcctcaatgcatggaatcagttaagggataattttatgcaaaacaaagaaaggcttatgaaaatgtgtggcgttgcaaaatttttactagaacaaaagcaaagttgtggaaaacattgcgaaacgtgaggaacacactaatgttcaggtacgaaccggaatctttcggtttacctaatatgttatcaaaacagctactcaaagatgggcctgttttgggccaacgagatttgtttcagtcgatatcaacacaaattagtaaattaaagttctacgttttatcggtgaaagtcaacggtttcacagatccctggacctaaacagtttttttaaaaggtataaatttttttgctgaccaatatcgtcttcttcccgatctctcagcttcttccatttacaattctaccctttgcctcttggaacctttgaacgaaaatggcggaaacgatcggctcaggtacatctttcttttacttcttcacctttctcaattgaatctttcgtatgtcaacatgcgaatgttctggaactaaaaatgtatggacgatatcgattgattttgtatagtgattgattttagatatcgtcaaaacctttagtctttaatttcgcagcgtttttataattgtgcagaggtttcgtccatgtctgacaaatctgccaaaatcttcgtcgcgggtcatcgtggtttggttggatctgccattgtccgcaagcttcaggaacaaggtttcaccaatctcgttcttaaaacacacgccgagcttgatctcactcgtcaagccgatgttgaatccttcttttctcaagagaagccagtttatgtaatcctagcagcagctaaagttggtggtattcacgctaacaacacctatcctgctgatttcattggtgtcaatctccagattcagaccaatgtgatccactctgcatatgagcacggtgtgaagaagcttctcttccttggatcatcctgcatttaccctaaatttgctcctcagccaattcctgagtctgctttgttaacagcatcgcttgaaccaactaatgagtggtatgctattgctaagatcgctgggattaagacttgtcaggcttataggattcagcacggatgggatgcaatctctggcatgcctactaatctctatggtcctaatgacaatttccacccggagaattctcatgtgcttcctgctcttatgaggaggttccacgaggcgaaagtgaatggagcggaggaagttgtggtgtggggtacaggtagtccgttgagggagttcttgcatgttgatgatttggctgatgcttgtgttttcttgctggatcgatacagcgggttggagcatgttaacattggaagtggtcaagaagtgactattagagagttggctgagttggtgaaagaggttgttggttttgaagggaagcttggatgggattgcactaagccagatggcacaccgaggaaacttatggacagctcaaagctcgcgtctttgggttggacacctaaggtttctcttagagatggtctgagccaaacttatgattggtatttgaagaatgtttgcaaccgataagttaatggtttctcttctcatatatacacaactattgagtctcaggtaaatcagcttatcaccacattgtgatttaaacctttctttgagattcgagaattgcttttttttttatcaaaattgattcatttagagataagacttgcttctttatacaacattgtctgaggaattttaattttggatctccgagtatggtctattattagctctcttctatacaaattatcaaaacagttgtaagaagtttcaagaaaaacatttgatatctcactaatttggctatccttgcaagttgcaacgctaaaatgacaaataatgaattctcggcccaatgggcttacacaagccttgttaaagatagcgtgaacaaaacgcggctcactagccctaacctgtctctctttcgcttaccttcttcttcgtcttcgttggctcagtcacttgacttcacggccccgctcaagctctgacacgaaactcatttcaaattaatttaataaaaccttaatcacaaaaggggcaaaagcaatcgccggcgatt

SEQ ID NO: 10923 - DNA, 3000 bp, Unknown
  misc_feature (1)..( 3000): cDNA_ID_3038551_gDNA_ID_2214462_Annot_ID_182802 3000 nt of promoter + ATG
gttgggtcgttgctatatggttgacggctatatttgggtttattttgaaaagattatttgtttgtatgtttttatgttagaagatatttttttttctttaagtcgaagggctatttagcaaaaaacctatgaaaaacaaactaacaattatcgagaggtgtttggaaagaaatgatcagaaatttgtctttctctctttcttttgtactttatagatagaaacattttaacaactgcatatataaaagtcaatgatccaaaggcaaaatttctacaaatggtaaaacgtcgtcatttatgcagatatggtaaagtgaaactgttgcagaaaactgagtaaatcaatattagaagaatgttcatgtttatttttgtaatgaagataaatctacgactctatgtcttaagccttttaacaaaaaaaaaaaaaaaaagagagagataagtctatgattttgtgcttttggatctcttgggctactctaatagaaaacagattttttgtaggatcgcattatcgagaaattaaagttggcaatattgagaaagaaattttcatcacttgaagcacatactgacatctactcattaaattaaaagttttataattcccaacaaagatgatcatgcacatggcaaattgaatttatatatgaatatttgcctagagagaaagataaatacatgacatgtaaggattaggatcggatcaaagtctatgatctattacgtgtccattaattaggttggttaagtcaaattgaactgcaatagacactcaaaaagcataaacaaatcttggtttgcattctttgcaaattttctatatctgaaaacgttattgaaaccattgagcgaaacataattgttttaagaaattcgagttgtaatttgtcaggaacggagaaaattgaaaacatgctaaatcaaactagaatagcagcaaattttaatccaaaatccacacgtcaggacacagtgatctcgactcttaagttaatagcttccaccttcagattagtcaaacactttgaaaaaaactgagcttaaccaaaatatataaatcaaagaaacgtgtgtagaatgttcgtagatatgatcatgatcatcttctcaatgtgtagtatgcttaaattcatataaatattgagagtttaaagttcacaagctaagcatacactagctatcaagccgcctcacctactctccaatatccattggaataatcatacttacgtgtttataaataagtattacatcaacccatatcttcttcatccacaaataaccattggctataattatgacaaaaactaccaaaaccatgaatcctaagttttacttggttcttgccttaaccgcggttctggcctcaaacgcatatggtgcggttgtagacatcgatggaaacgccatgttccacgaaagttactacgttctccctgtcatccgtggccgaggcggaggcctgactctagcaggccgcggtgggcagccatgtccttacgatatcgtgcaggaatcttcagaagttgatgagggcattcccgtaaaattctcaaactggaggcttaaggttgcgttcgttcccgaatcacagaacctcaacatcgaaacagacgtcggagccacgatctgcatccagtcaacctactggcgggtcggtgagtttgaccacgagaggaagcagtacttcgtggttgctggtccaaagccagaagggttcggacaagattcgttgaagagtttcttcaagatcgagaaatctggagaggatgcttacaagtttgtgttctgtcctcggacttgcgactctggcaatccaaaatgcagcgatgtcgggatattcatagatgaacttggcgttcgtcgtttggctttaagcgataagccgttcttggttatgttcaaaaaagctaatgtgaccgaagtttcgtccaagactatgtgagaggacaactctcgatcttttactttgactactcataataaaacctctatgttttttttttgataaaacacccgctctctgttttcttgaaaactacaaattgaataaaagctagtgaagcacatgcctatttattaaatcttcatcttctctcaatcttaatgcccgatataaatcaaagggatagagtggacgtccatttaaataaaaccagctaacaatacaagcccctaattattgttgtgtatttaataagaaaaaggaagcttttaaacagtacccgttctctagagaattctgatgatggtagtgatatagaaaatgataaaaataattaatactctagtctctagattgactaataactaatgttttcatttagtctaatgactttagttcagtttctctttacataatctaattgatttttttatatatttaaattctcttattctttaatttgaattttatttttgtttatataatagcaaaagtgactgaatcaatttacaaaatgatatttaggtaatttaaaaaacttttgaaaaattgaatctatgaaaggttagtttgcaaaaattctgcgtagaaatttatagaaaaatattatttttgtcctcaatgcatggaatcagttaagggataattttatgcaaaacaaagaaaggcttatgaaaatgtgtggcgttgcaaaatttttactagaacaaaagcaaagttgtggaaaacattgcgaaacgtgaggaacacactaatgttcaggtacgaaccggaatctttcggtttacctaatatgttatcaaaacagctactcaaagatgggcctgttttgggccaacgagatttgtttcagtcgatatcaacacaaattagtaaattaaagttctacgttttatcggtgaaagtcaacggtttcacagatccctggacctaaacagtttttttaaaaggtataaatttttttgctgaccaatatcgtcttcttcccgatctctcagcttcttccatttacaattctaccctttgcctcttggaacctttgaacgaaa

SEQ ID NO: 10924 - DNA, 2532 bp, Unknown; identical to SEQ ID NO: 10910
  misc_feature (1)..( 2532): cDNA_ID_3038558_gDNA_ID_2214462_Annot_ID_182798 3000 nt of promoter + ATG

SEQ ID NO: 10925 - DNA, 2596 bp, Unknown; identical to SEQ ID NO: 10918
  misc_feature (1)..( 2596): cDNA_ID_1989677_gDNA_ID_2214462_Annot_ID_133012 3000 nt of promoter + ATG

SEQ ID NO: 10926 - DNA, 3000 bp, Unknown; identical to SEQ ID NO: 10917
  misc_feature (1)..( 3000): cDNA_ID_2175085_gDNA_ID_2214462_Annot_ID_133013 3000 nt of promoter + ATG

SEQ ID NO: 10927 - DNA, 3000 bp, Unknown
  misc_feature (1)..( 3000): cDNA_ID_2180565_gDNA_ID_2214466_Annot_ID_133014 3000 nt of promoter + ATG
tgtagcgattatctgttcaagcttttgttgatcggtgactcctctgttggaaaatcgtgtcttcttctccgattcgctgtgagtttgacttgattttgattcttaattgattccgtcgtcgagaattagctcgtgttaggtttcttcttttgtactgtttcgtgattttgggatttgttgctatttctaggatgatgcttacattgacagctacataagcaccattggtgttgacttcgtaagttcattctttgaccttgtttacatacatgatcgagattgttttatcccaaacttacttataatgtggttggttttgcagaaaattaggacgattgagcaggatgggaagacgattaagctgcaaattgtgagttttcaattatataatatgttttggatgattgtgtttactcaattttactgttgctgctctcttttagtgggatactgctggacaggagcgtttcaggaccatcactagcagctattacagaggagctcatggaatcattgtgagcaatctttatattcgctttcttacttgcttttttttggcttacctagactagtgttatgtccctatttccatttctcattttaagtggtttagtctgagattggtattgtaatgttggaatatgaatcattttaatgttgtaatccaccctttaagtgatgaaccttaatgatgataattgcaacagattgtttatgactgtactgagatggaaagcttcaacaatgtgaagcagtggttgagtgagatcgatagatatgccaatgagagtgtttgcaagcttttaatcggtaacaagaatgatatggttgaaagcaaagttgtttccaccgaaactggaagggtaagctcacatccctagttaagttcccagcaatttttccatttatgattttgcttctatcttatgcataacatcctttgcatggtactttcccctttcctcatttgatcatttcatggtttcgcatatctttaaccatgtgatgatattacaaccattgagattgttataccagaatttacggctatgaatgtagatgatctctgaccaaattcccaaagctagatgatctgaatccaccgagtagaaattgcttatttttgcagcagctgttactcctgatacaactgtgaattggttttcttacatttcatctactcaaaatcactgcaggccttagcagatgagcttggaattccctttcttgagaccagtgccaaggattctattaacgttgaacaggcattcttaactattgctggcgagataaaaaagaagtatgttcactatctttaatctttcgccataattttttctgcgaagatttaacatagattaggtttagtaaacttgttctattactatattccttgatcaccattatatacatcaaatcattctctgtgtttttttctgctgcaaagcatcttgattctccactgttttcatgaaataaactattcatgtaaagtttcaaatccgaagtgtgctattctagacttgatgactaatggaaagcaaatcaacaaactaactgctgtatccttgtagcttcctcaagcttgtgtacttaacttctgttgatagattttccatatggttgatatcttgtatcgacatttgctgattcagtctagtttatgtaacatggagaattgagtctaatcatatcgtaactcattttctttgcagaatgggaagccaaacgaatgcaaacaagacatctggtcctggaactgtccaaatgaaaggtcagccaatccaacagaacaatggcggttgctgcggtcagtagtttaaaaaatgttttaatcaaaactatctgagactctttttttacttcctttttaactaagtgttgtgaaaaccaatggctgtttaaaacaactaagaaatgtaatattccatgtcgctgtgtcttgaataagctatggtgttagttgcaagatacttctctttaatatagttcagtcttgactttgaccacacagggatatgcaagcaactcatggttttgaattttgattgtgtatatatattaaaaatagtgatagatattcgttgctgtataggctggaccatgttcattaccatagatatttaaaacttgcagctaagtccatagaatgaggaaaagcaaaaacaacatatgagagataaatctcaataatgtaaatgctgaattatatatacttcaaagatacgagtccaaatcaaattcttccattttcttacgctaaagtatacggatttccaaaagaagatttgttctatttcgtttacaacgcaattctagtttataataactcatcatatactcatgtggtttcaaaataccccaaatgcatgtttttctagaaacaatcagttttctgattttgatgaaatcaatcatacctagattcattcatttactcccacaattttagaagaaaatctcattcctgcacatccttatttaaaaaataaaataaatcaaaagtgatcttatttgtttgtgtttaagttttataaattcatttttttttgtttgaatgataaaaagacagacaggaaagatctcatgacaacgacagttaaccgacctggtccctctaaaataaagtctgacacagactctcaaactttgtcaaatccaattcttattattattggtaatgagactttttcttcacattctccagatatgtatattcccgagaaaatgagggaaagtatcttctaatcgggaaaaacatctccacgttccttgcccgtctcgtaggttacgcatcagcagctgggttttgtctggcaaaactataaccaaaagcttcctttcttataaattgccttacgttttaaggtgttctcttctcacttcttccccatgattcatcttgactccacaaattcagggcaatctttgattctctttggtctttgatttgaggattaatttgttttctaaaggtgtctgctgattcaattgagtatg

SEQ ID NO: 10928 - DNA, 3000 bp, Unknown
  misc_feature (1)..( 3000): cDNA_ID_2685834_gDNA_ID_2214466_Annot_ID_133015 3000 nt of promoter + ATG
tgattcggcaagaaatctatcaaactatcgtgagtgtaattgatttgcttattttaacagagagagaaatgtttgcgaagacaaatagacgtcgtttattggcttttttagtggctacctctctcagcttccatctctggggtaatgttgagtttttttgctgttttgtggtaaagagcaaaaaaaaaacaaattcgttgtaatttttttttcaaacatcagaatttaccaagaagaaaaatgctcggcgtgaagaaaagaatgaggtaatcaattgtttattattggttttcaacatttggaagatttaatggagttgaaataccaaaaaacttaaatagagaaacttatacatttgtgctttctctgatttgcaggcgaagaaggtgcagcaggtggatctggaagaattaaaataagaaaagattatgtttgatgcagtgaacaaaacgaatgttaatgtgtttagttactttatgttggattccctttgtgtttaaatccaacataactaaatgatatattcatagcagaggaactatcttgctccagatatatagaattagtttactaattgtaaggagacacatttcattggaaagaaatggggacaagtaatgttccaattcctcatcatcacccaacatgttgccatatttagatccgagtatgttttttgacgcatcactttggcatatcatttctttatccacccccatttagattctattaaaggaatctccaatggctgaaacttcagagatggtaaaactaagttttgagacttttgatacctgaagatgtttgtctacctccacaaaaaagtttggatttgtctttcgcacattttcttaaatacggtttcactattataatgatataaattgataggccttggtgaaataaatcactaaaaatattgtaataattaacatatactgtactatgttttcgagtattatttagatttgcaacgcacaaaaagaaattagttgataacttaatctagtcttctgaatcttctcggttaatgtcatcgaggattacaatgagagaaactataaaagcaaagtcaacattcggatagacagtaaccgaaaaattactcttcccaattaatatgctttgtgccgtatgtttcttgtgcatctgaaaaaaacaacaaaacaacaacaatgactcaattaacacgatcatataactagctagtccggtttatacaatttacagacaatttgatcagtgtaattacctgagcaacaatggcatcagatttgccggcgtagacgacacaagaccggtcgatccaacttcctttaacatggaagtcgcaaatcttcatttctttattatgagccaaaaagatgtctagttttggcttcattatttgaatcattgaagatcgtttcaatgtgtataatagatcactttggtctgtactcttccctctatatactagccacctatcatgcaagctcaccttctacaatttttatgttataagaaaaaaaagttgtggatcagattttattggatgatctatgacgatttaacatactcgaatgagtgatgatgattttgatattatttacaattagttgatagacgtattgaaaaagtgtacctccatgcaagttataagagcatgtttgtgtatatatgatttgcataatgaaattttttttttgtatcaccatgaaaaaattgtgcctctccatgcaagttataaagaattgtagttgatagacgtatacttacattttctctcaaagtcaagattggagtatcgtatgcgtccaataaaatccttttgtcgctgatgctaaacaaaggttccttgactttgaaaaggagattgccgttaacgtccgtgacggcgaagttaccatcggttaaagtcatcaccttccgtacgattcccaactcgatagggtacggtgcacagaaattagggctaacgatcgccatctttttgaagatctctctctgttttttttttctcttttacgattcttgtataaggtggagatttgtgttcgtttctcaatctttttagttatttataattaggatattccaagtattgtgtgaaacaaatcttcgtgtttttaattttgtgtttttggctatatatgttttgtttatttttagaacttatcttattttaaatctgctagccaagttgcaagctgcaaacacgttagcgttactacactttttttttttggttatataaaaaaaaatagtttgatggaaaaaaaatattataaattgaggaaatatcttcttttttgccagaaaaggaaattagaagaaacgtaaaattagaaggtaacttttggtaggattaatatgacttaattaaaaatgatatgaatggagtatgaaaaagagaatgattttgttgataaaatatactgtcatataaaattggaaaatccatgcatattcaatcaaagtttttcttttctttttcaatatacctttttaatccgctttaaatacttcattatatttaattcctcacatcttgatcacggattataaatcaaatttatgtaaaattatcttctctaaaaaaataaaaataaaaattgagacatatacatgagtaataaaatccaaacctttaataacagggccaggacgttaacgacggttaagttagatagacaagattttgagctcggcccatttatcaaaaagcccaaataagaagacacacacacgtaaagaaatcagtgagacaaggtcaaagcttctttattgtctcgggaaaaacaacaaggaattaaacaaatattaaaaaaactgggaacaaaaaaatccagtagaagtcgtggggttcaatgttcatgtaaattgattgacacgccccctaaacccaaacctctctttttttttgtttcttatattatagagaaaaagagctttttcccggaaagttgttctcatcttggaaaatcaaatctcggaaacgcagtcttcagctaaatcatg

SEQ ID NO: 10929 - DNA, 3000 bp, Unknown
  misc_feature (1)..( 3000): cDNA_ID_2716933_gDNA_ID_2214466_Annot_ID_133018 3000 nt of promoter + ATG
tcagtttgtctccaagatttgactctggtgattatgttccacgtaaaactgcttatataagtctttgaaacataaagcaagagtcttgtgacaattcataaacacaaacataggttctgccaaaataattctacaggaatgcaaacagaaaagagactaaagattaaaaatctaagcaaggactatcttaaattattttgttgacttaaacacaatttaaatctctcaaccttaatcatccagctgactctaaaccaaactataaaccaccataactcgagattttttgccaccgatatacgattttaaaaggaaatttgtatatacctcgtcgctccaacgtcgccggagccgtggtctccagtgagctatgcatcttactattcgcagcaatagattttggatttagattgcgtctgagagatggagagaaatcgaaggatatcagtttaaatttgaaggaaaacgaagtagatggtaatggtggcccaatctcatgtatttataggcccaaattttaagaaatatttattattttcttctttttttgtttcaataatatatattacctgtttcgacgaaaaaaaataaaaatatttattacctttgatatatgtatgttttagaaaatatattaatttcttttggattcatttcctttaaagaatttgtatattcattcatcactatccattaaagagtaaaagttaaatattatagtaactggatttttcttctatcaaagtgttacttataaaattcttttttttttaattaaatataatccaatttttttctcattttgtctatttaatcctactatattatttgggaagtacattttaaatgtaaccttaatttttgtaattaattacataggtgtgccattaaaaataaaatttcaaagagtaaattaattcatctctttaaggattaaaaagtcaaatactaatttaattaatttaatttaattagaaaaacgaaatacattattaatttctaaaaaagtaaccaatcaaaatcaacatattagatttgatatctaaattatcatattaattttttattaattattatacttcacttctcatctttatatgattctatttttccgaaacaaataatatcatcatatcatcggtatatcaaaaaaaattagaattattttgcatataccatgatttgaatttttaaaaacgaatataaactgttttatacatgaaaaaatattataacgggttaaaaatagatttaagaaaactttcgactgagtaacgggtcataatttgtatatttattcaatttcatacatattattttgaaaatttataatcttatatactacaataattaataacatattagatatttttaatgtgtatgatgtgattcaatctttaatacaagctataaaatcttagaattgacaggtttagatcgatattaatacaagatggtatgctatagatgaaactctaaaattaacaattaaaatacaagtgtataatcttaaacactaaacaatataaacaatatcaacaaaatatataatactcgcagtgtactatacatttaaaatcaaataaaataatatcatatatttataaatcatctttacaaaaaaagtttttaatttaactaaaatataaacctacccgcggtataccgcgggttaatatctagtacctagtataaatcaatttgattgctacttagtgctaatattaaaggaaaatgaagtttcactttatttcaagggatccacttgacattttgctttatgtaaatttttatttaaattatacatatttaacattataattaattgaattttagagatctagtttattgtgtgataaagaataaagtttagtgctaatttataaaataataatttataaagtcatgacatgtataaaaagaaaaaaaatctttcactattgtggctccatttggaattttgttttagttagattttatacactaattgcaaaagtaacacctaatttttttttttacaaaactcgtttttggaccaaattttaatcggataaaacggatgaccatgcgtaatgcaaagataccgtatgttcctttagtgtgaagcataactatgaccagtgaccaccacatttagtggcatgaaccatgttgtcccataaataatcatgtaaagtgaaactaattttttggataaataataataagtgcaagaagaaaggtaagtaagtttcaattaaagaatcatgagacaaaaacacatggtctacagattccaacacatgcaaccaaaattgaagtaatttatttttgtctaattgataaacaaaagtaaaagaaaaagacaaaaaacggaatttgttaacgccgttaagcagccgcttcccccacccgtgacgttgaggatatgatcaaatcaaagaattcaatataaaccggatttattaaaccacggttcaattagtccacgcattggtttaacgccggtttggttcgttctatccgtcagccactgggctctatcgttagagaaagagagagagggacagatctgtgaagttgggatctttctttttcactttcttcgttgtctctctctgtctacacgcttgtgcttgtgttgtgtttgtgcgccactttctatctctactgttttcttctctcgtcacggcttaacttttgcaatcttttagctgaagctaatttcaacaagttgttatttttgctttcaattttcttactttttgatctctcttttccacgaaacctcttataatagatttctcatttctgggtctaaaatctactttctatttttgggcattgatttttattcttagataaactagattgaaggcaaagaaaccatttttttttttttttttttctagattctctctaggtttccctaaatttctcaactactcctaaagagttttgttacgtttctgtgtgattctcctttttttcttgacgactccaaatttcgtttttgcgtaa

SEQ ID NO: 10930 - DNA, 3000 bp, Unknown
  misc_feature (1)..( 3000): cDNA_ID_3055875_gDNA_ID_2214466_Annot_ID_133020 3000 nt of promoter + ATG
aagctgattcaacaacaacaacaacccaagcaagaatccaattcacatagagcttaactgcaatcgcaatcgagataatcgttactagggttacgaaaccttggaaatacgaagaggcgtaatcgaattctacaccgggaatggtctcaataagcttaaccaacaagaaagctaaaatccctggaatcagaaaaccccctaaaactataagattcgatgaggtcaaagtagcgagaagaggtaaaaacgaagcgaagctcgatttcactgcagagttcaatttcacaggtctaccatagaatccttgaaacacactataagcgattgatccaatagctaagagattgaagacggtgataacaacgatgtaaccgattacaagtaagaccgttgttttggtatcgatgtcatcatcgttgttgttgtggagtccgccgcggaggagagagacggtgttgtgagaagcggatgattgatcggtgatgagaaggaagacggaagggtaaactgtgatggagaagcagagagggaggaggaagagaacggagagagctaggaagtgacgtgagtgtgcgttgatgattcgttttgattctgataagattatccagagattcaatggaggaggagatagagatggagttggagtcgccattgaagcgtaagttagtagaagaagaattttttttttttttttttgtttcgtcaaagaagaattttctttttagaacagggagtatatgatatatctgagagtattctgactatttaattcatgaaaaagttaaacgcccaagtaataaaatacaatatatagcaaaaatcatacggaagaaataatacaaagaaagcaggtgaaaaaataatacaaaattacaagagtagcaacacacaaaggagaaagaaagtcatcagaagatgttcttgaatgggttggttagtgagtcctttagattggagtagaggccatagagcgagtactgcttcagatttgcaacctcataccacgaattcaacgcggtgtagtgcttatccgtgcccgaaaacgccaattggatccccaagctacaatctacttgtcctccttggttcttgcagttttgcggcttgatcgcacattcttctttgttgaggcacacgaatttcgaatctccagaacacttcgagcatccgtctttcttccagaacatgttctcaagccttcctttctggaactcaagaacctagaattcacccaagatatatgacgattacataactaataagagatggaaactttctataagaaaaatgaaaatgaaggttgatatgagcttatccaattacaagggtgaagcttgtcacgatgtgattgctgtctgcaaccataattgggagtgatcttgcagcgtattttgcaccagcgaatgctaccatatatcccttggaagcatcctggaatcacaaagtatcatcagacaaacaaataatttgataggctaacacattcatgacctctacttccgaggataaacaaaaatcgtatagtaatgttcgggagaaactgtgacgaagctactactaaaatcactttttccagaggtatctacactgaaagtctaatgatatacacattacaagttaacctgatttccacctacttcgtcagaaaccaaactcttaatctataggaatctaacatggcaagtctctgttttgaacctttcatctcactgaaacaaatgcagaaaggaaccagatcgtccaagaacagagcttaaaacctaaaccttcgttacctacgggaaaattgaatctaccaatccaagtaatctcgacaattagcttagaattccagagctaacattctaagccaggatttagacaagtcaactaatctgggcatatgattccgatctatactaaatttccttaagagtgacctaatccattctaatctgatcaaaaacctgcaatcgaaaccctaattcaccaagataaaccagagatgagaacgaaccgggcggaaactggaggaactagaggtattgatggtaaggagtgtgatctcatcgactttaggtctgaacacggcgacctcagagtttccgttgagcgagagatggcgatgatcgcagggagagtactgaacggatttggatcgatttgtactgaagaaagaatctttcgcagcgaaggcaatgccgaaagtgaatccatcgccgatcgcaacagtagaatctgaacaaggcgagtagacttgattattgtcgccggcctccgtcaatgatgacgtcagcaccgccgcgaagaggcaacagagaagaaagaatctagccatctgtcagaaaagctcccttcaaaattttcgaaaactccgattcaaggacatgtcttcaaatatcattaatcaaataagcctttaaatatttgggcctgacttcatgcggcccaaaacaaaatatgcttttttaattatataaaaatatacttagaggcactaatttagatattattgaaacctgaataatttctttagatttttcatatttttaaaactcttgatttcgtgttggataagagaagtagattcgttgaattagggatttgttttttattttccaaaaacaatgttcaattatgtgctgtattataaaaatagcgtcaaatctgagctggcaaatacaattattattttggtgccaagtgggtaacttgaattgaaatcgttaaacaaatcccacctaacagtttgttcactgctaatcctatgtcattaaccacaccgtaacagattaattacgaaatctgaaccgtttattttaagtaatcatggacccacgttaatgaacggataagatcaatccgacatttcttgcgatttgagaatcccgattccgcatttctgtctttgtctcttgcttgtttagtctctcctctcctcctcgtcctcaatcatcatcatctgagaattcgcagcttttgcttcttcgatagaaaatctaattatcatcaatcatg

SEQ ID NO: 10931 - DNA, 3000 bp, Unknown
  misc_feature (1)..( 3000): cDNA_ID_2716924_gDNA_ID_2214466_Annot_ID_133022 3000 nt of promoter + ATG
cgtggatgtaatgatgtactattggttaaagtaggctcagctttaaggttgcaactagaactaaccacagctctataaaacctaatcaataattcattactttgttttttctataaatggggggattcatgaatggtccagaatgagaattttcaaagggtttttgatcaacaattatgtatagcaggagagtgtattttatacaaaataaatgagagtggttccatggtatagaacaagatggtgtatcccgtcgagcaaatcagctctacatgtcggccacggaggatccaaatccaatatcaaatgagaacttgatgcaagttaactccttcttgcgtccatcaagcatcttcatttttagtgagtatgaaccctatgagaaagaaaaggattagactggtccttccttagatgcagaaacacaaaacgaaagtttggtatgacaaacatataactatagaaaccataaccagcaaatcttgacaacaagaaggttaaacttcttcactttagccgcttaatagacataatacttccacatggaactcataatatgctatcgaaaccaagttaaacctcttctcagtctatttcagttatccaactaaacagattcgattacactaggcaatttgttatgactgcaatagaattacatcaacttcaaatgagcataatgcatcatcatgtcattatatccaaaatgcttcgtattaatcaacaaaacccgcatagataagtagaaaaaacttacaggaggggtatatccgggaagaacttgcgagtgcgctaccaagaaatctccaatggccacaggacaacttgtctcatcacaaagatcatgtgtctcagaatgaatatgccatccaaagtaggaaacttcgatcaccaacttgccgctcgagatctcagtgtcttcatataaaacaaacccaaataaaaaaacccatcataccagtaaacccattacatacatcaaatgcaaaactataaacacaagtaatagcctcataggtaaatttgagtatacctgtgttagcagaaattctgaaagtagctggctcgcctctagctataggataaggagttatatcaactccttgtacttttacttcatactcttcgttattatctgcaaccaaacaatcaaaagttccccacaaatcgaattcattataacgcaacaagaggtcaaaatcaacattggatctttctatctaaatcttatcgcaaaattatagctaactcaatcaaaatactacaaggaaacaattggaaatcatgaatcaagttaggctttttgggaatcgaaagacgaaacataccgcagtagtgaacatcggtggctgcaacaatcgttgaaaccaagagaaaataagagatagcgagagatgagaatcccgtgaacttagacatgattgatgataattagattttctatcgaagaagcaaaagctgcgaattctcagatgatgatgattgaggacgaggaggagaggagagactaaacaagcaagagacaaagacagaaatgcggaatcgggattctcaaatcgcaagaaatgtcggattgatcttatccgttcattaacgtgggtccatgattacttaaaataaacggttcagatttcgtaattaatctgttacggtgtggttaatgacataggattagcagtgaacaaactgttaggtgggatttgtttaacgatttcaattcaagttacccacttggcaccaaaataataattgtatttgccagctcagatttgacgctatttttataatacagcacataattgaacattgtttttggaaaataaaaaacaaatccctaattcaacgaatctacttctcttatccaacacgaaatcaagagttttaaaaatatgaaaaatctaaagaaattattcaggtttcaataatatctaaattagtgcctctaagtatatttttatataattaaaaaagcatattttgttttgggccgcatgaagtcaggcccaaatatttaaaggcttatttgattaatgatatttgaagacatgtccttgaatcggagttttcgaaaattttgaagggagcttttctgacagatggctagattctttcttctctgttgcctcttcgcggcggtgctgacgtcatcattgacggaggccggcgacaataatcaagtctactcgccttgttcagattctactgttgcgatcggcgatggattcactttcggcattgccttcgctgcgaaagattctttcttcagtacaaatcgatccaaatccgttcagtactctccctgcgatcatcgccatctctcgctcaacggaaactctgaggtcgccgtgttcagacctaaagtcgatgagatcacactccttaccatcaatacctctagttcctccagtttccgcccggttcgttctcatctctggtttatcttggtgaattagggtttcgattgcaggtttttgatcagattagaatggattaggtcactcttaaggaaatttagtatagatcggaatcatatgcccagattagttgacttgtctaaatcctggcttagaatgttagctctggaattctaagctaattgtcgagattacttggattggtagattcaattttcccgtaggtaacgaaggtttaggttttaagctctgttcttggacgatctggttcctttctgcatttgtttcagtgagatgaaaggttcaaaacagagacttgccatgttagattcctatagattaagagtttggtttctgacgaagtaggtggaaatcaggttaacttgtaatgtgtatatcattagactttcagtgtagatacctctggaaaaagtgattttagtagtagcttcgtcacagtttctcccgaacattactatacgatttttgtttatcctcggaagtagaggtcatgaatgtgttagcctatcaaattatttgtttgtctgatgatactttgtgattccaggatgcttccaagggatat

SEQ ID NO: 10932 - DNA, 3000 bp, Unknown
  misc_feature (1)..( 3000): cDNA_ID_2716902_gDNA_ID_2214466_Annot_ID_182848 3000 nt of promoter + ATG
cggccactgaacttcttcgtccataaacaccctgaaacacctcatagccatttcttccatatttcatttcattagttgatactaacaacctacgattaaccactttcccaggggtttcgttctcgtcgtatttacggagttctagtgatggtaacattacaggtaacgtcttgtttatattctggtctgaaggaactgataagacttttgactctgaatttgttttctcgttttcctctcctaatcctccactaggatctgacttcttctctacctgctcatttttagtaccatcctctcctgatgctgagacacgaggagctgaatttttatctctcttcttctcatttacaataccatccaaacctttgtctttcgaaaacctcaggaagacacagaccacaacaacaagaagacccacaagagagatggccaataaccacattgatgaaaaaaaaagcttggtctcttgaagaatacaaagtttttgctatttgattctcttgctctgtttgttcttgtgtagtgatttatgctgtgaccccctctctgtttttatagccgagagatgacttctctgctctgctttttcctttacgtcaacatcttcttcatccaaccccacacgcttaagagcttgatttatccatttttggatagagcttttgcagttttctgtcaccatcacattcgctctagctttttgttgattgagtaaggaggagtcttgtgtatgtggaacgatttagaattatttttactatacaaagaatatacaagaagtggtttctagtagcacacacgtttaagaattcaaatccaactaattttttggttttagcttgctttggttgtccttttctagtgctcattgagtaaggaggagtcatgtgtatgtgggatcaatttagaaatacttttactaatccgagttagagtgaaatgaagacattaaacaaaaacacttggtagtctctaaagcttttttgctgattgggtgatggacgtgtcatgatgtgtatgtgcaacgatttagaattttcttttgctaatctgagtaagagtgaaatcaagacgtttaagtaaaacacttgggagtctctaaagcttttttgctgatggacgtgtatgtgcaacgatttagaattttcttttgttaatctgagtaagagtgaaatcaaaacgtttaagtaaaacacttgggagtctctaaagcttttttgctgatggaagtgtatatgcaacgatttagaattttcttttgctaatctgacagagtgaaacgaagacgttcatgaaaacaccaggagataatgaggtggcagatagggccatttttgttggttgtgtaaaattatttatactagtgtcaaaatgggtttcttttaatactctaatttgctaattgttaatacttattaggagattgataaatattttttaatttagaagttacatatctttactaattgatatttttgataattgatatattttatactagttttataaaatgatatattccggactacatatttctgataattgatattttttaaagttaattattatttttattcaaaaaagtttctaattatgtgacaaaaatatgtggtgttgtactgaatactctctaattaaaagctagcctatatggtattgttataagttgtgtgtacacataaataaatataatatatatagtaactttttaatctatctatatcttgtaattccctttattttctcgccgtctccattcaattttattcctttcatctttttaattttattttattaactatgcatttgaattttgtttttcaattttttgtagtactcttctctgttttagatttcagtattttttttttatgctaagatatattttctgctcttctgagatttgataatctatcattttaattatttacagtttgatgacatatcttaacataaaatatgttattttttgtgagatatcttgagatatgttattggacctcgtaactttgtcaaatgttttggctttttgctatgaaatggaaattaaaagtaaaaaatgtcaccaactgttttaaccgctaatattaataaaatgataaaattttggcaatgtcctattaaattttttatctaacaaataataatacataaatttaataaaattgaataacttaagaaattaaaataatcattgagatacaaaattgaaacactagatttaaattctaaattctttcaaattcaaaaccaagccttcttctttttagcatcctattaatataacatggaaaaagctgaactgaacataatatgctaatatagaacagtaaagtctgttattctattttgtattaatactgtactggtttctgtaaaagtatatatcaaccttgagaaagagtagagcttaacgaaaataagtaaaaataaagcctggtgaaaaagaaaagaaaagaaagaagtaaaaataaagcccatgaggttaatgacgggaaacgacgtagaaagtggaggtcaggcaataaaagcatttccatcgtgatcagatgagaggaaaagtatgagagaaatagaaacggcacactacaaaaataagtacttcaaatctctatatacaaaactcctttgacatatgttttttaatgactggttcatcatttttcattgatttaaaattttaaataaattatattaaaatattatacttaaaagactcaatgagtttctcattgataaagatgctttaaggggtgttttttaaaaatgtaaatctttattaattaaagaaacatacaaagtaaaccatcattaatgagttttgtagtttttcaaaaaattatactatattgaatagttacatgtgattaggagattgaaaaaaatacaaatgaactaaatcacctattggaaaaacaaaacgtgttttttttttaatcactgtggcaatttcgtagtttgataaagaaaggtcttctttaaaagcagggcgagaga

SEQ ID NO: 10933 - DNA, 3000 bp, Unknown
  misc_feature (1)..( 3000): cDNA_ID_2716918_gDNA_ID_2214466_Annot_ID_182843 3000 nt of promoter + ATG
tgttcttctggtaaacccgagcggtttgtagctggtcagttccgcctctgataaaggagctagctcgacccacatgactctcgatgtcatcaagctgagctccctggtgctctaccagcacggccatgtctagaaacacctggtgaagctccctgagattcttctcaatgtctttaaccgcatcatgcctttcttgaatctcgttaatggtgtctaacacccttcctcttccttgttcttgtattgctttctgcaagaatctctcactctctcctgcaacaaaaacagtatcaatgtcgcaccaccactcatgtaacaacatgtctaagtatccagagatcaattccagctctaacagctaggaactagcacaacataagatatacaaatccattttcatagtctaaacgcaaaatctgaagttactgttcttcacaaccacaacactgtatactaagaagcctggaatcagtgttcggaaaccaattggtcatcatatgttaacctagatgatgattctacttgaatctggaagtgatttgaatggaagattaaactaaccagtggaaatcagtcgatctagggttcgttcatccggattctcgccggtgacggtgaagtacctcctctgtacagtttctctatactcggacgagataagctccctcaatcggttgaaactatccatagagtccatcaatttcttcctgagaccattgaggacagaggtcctggttcgatcggaggaagaaccaggtccacagccagggagactccgattagcagcattggcacgatctagcgcctcgagtttaactttaatcatcttcgccttcttcaacgcgactccaacgtcaccgtccattttagaccggagatctttaacggctttagcattgtgaagcgtcttgctctgctcgtgacatgaagagagtgtttcgttgagccgatctagctcctttagctcttctttcacagattcaacatcttcgaagaacttgtcgaggttcacaccaccggttgatcccgcgggattcgccatctgaactccgtcgccaccgccggcaacgtctcggcgaggggatggttctccgctgcggaagcgagagaatgagctggaaaacaaatcgttcatttaaaattcgaaaaatagagaaatctagagagagatttcagatcggaatgaatcaacgggaagacttaaagaatggaaaaatgagaagaagtcgtacagattcaagtaggcggttttattgaaaagtccaaaaggaggattatgaggtaagagaggaagaagtcaaacaagtaagtctctattggttgacttggaagcttctgagaaagtaacaatggcggagaagggaaggtgaagttgaaagcgaaaccgtgtgcccttgtcccgtacgtgtaagtatatacggtaacagatcccaaaatcatatataaattggagaaagaaaaaaacattcgtaatttgaatgatttttaaaattttattttgtcggctttggatactttaagtttatcatccaaaggatacattagcccatacgaaacacttattgataaattgacttcagcagaaaacatttaaaaaaacaaaaatgttactgtatatcaaattaatttacataatttagaatcgtccatcgaaccaaatttaaagaagcccaccaaatccttgcttttctccgttaaagggccaagcctaaacccatagcccagtctttgagcaccggaaagcaattgtaatacttcgattgttcgatttgtaagatatacaacatcctaacaaccatacaccgatatacataaagaacaagtcaaatgttcaatatgaacaaccatataaaaatagaatcactttcctccctaatctataggatacccatatgttgtataaatcgttgattccaagtttcctatttaaagatctcaaacaaacaaaaaatatacaacatttttgcaaaactaattgttcctgatttgagatattttgtcatcagctggtaggttaataaatcagacatgaagatcatcccattgatgtccattgccttggtcatattcatgacgtcatttccggctcccatcaaagtagccggtggtgtgggtaattgtgaaaaggacatgcaatggtgcatagacaaaactgaattctttactcacggttacatttatgagcgttgttgttataatatgataatgaaaaaaaaatgtatgtgtttgtttctcaagtcccccaagctaaagatagctgctcgcaacgttaacaatgcgtgtggtcgtggtggtcttccaaaggatgcattctctgagttcaagtgttaaatatatagatacataaaagtaaataattaacaacaataaagcaaacatatttttgatcagatttgtactatgtagtttaatggtttgtactttgtagtcgttatgtttaataacttgtcaattgtccttatagttttgatagaagttagaacacataatatataagaacaattgtctagagagactaatgactaattaaactttgatttatcatgtagcttagttacaaacaacaagtattgcttcaaaaagtataatccttttgagttcctcccaaaagagccacctccattgccatcctttccacattagagtttaccaaattctaaattaacagagcaaaagtgaaaaatcaacaaatatatgcgtcgaaagccaatttttacataattttgtgtctgcataatttaactccattaaaaaagcatggagaaacttttaaataatttaattatgactttctaagtggggtccagaccataaaacgctgcgttttaagtgaaattatcggttcaaccggccggtccggttctaagaacatcggtcgatctagttgctcctatatgaacaacagaagacctaaaccctaactccccccctctctctctctctctgctccatttctctcactttcttcacatctctgaagctcttcgtcacgcatctaca

SEQ ID NO: 10934 - DNA, 3000 bp, Unknown
  misc_feature (1)..( 3000): cDNA_ID_1014176_gDNA_ID_2214466_Annot_ID_182840 3000 nt of promoter + ATG
aatgtttttttgaaagctacaccatcaacgaggaaagagtctcgcatattgccaccaggaacctgcagagcaaaccttgacattagcttagatgcatcattaacttggcttcacagtatagacacaaatagaaatgtgtttaccttcttgatcccaatcagatttagcctgtcgtcattcccaatggccataacagcatcaacaaccattgtagcaaaaaactccttttctccaccgataagcttagatgagagagtcgtagcagcacatttagccaataaacctttcttttcctctacactcttcccctcaatgctaacagcgagttctttaaccttggcaattgcctacatcaataattaatagtgagtaaggcaacaaaagaaccaataaatcaaaaagacttgtaattatactaacgagaaaaaattacaaaccaaagtgcttgcagtgcggtaactcctaattagattctgagcgtgaacaccatcctcaataaatggcttcgcttccttcaaaaactctgctgcaagaagaaccactgtagttgtcccatcacccacctaaccaaacaacaacaacaacagaagattcagtgttcatgaactcagtcactcattctaagatctgaatactagatcgcacttaatataaacactagagatctaatatggaatcgctaattagctcaagatcagtccaattacgattttttcgaaaactcagattgggaattaaaaaattgaaataaaacaaagacctcggagtcttgggatttggcgatatcgacgaggatcttagcagcaggatgaacaatgtcgaggagcttcatgatggtagcaccatcgttagaaatggtgacggatcctttatcgtcgtgaatgagtttgtccatccctcgtggcccgagcgtggttcgaactacatctccaacagcagtgcaagcgttgatgttgcttactagttgcgctttgccctgagatgtgtccgtcccttccttcagcagtatgatctgcggttgctgctcatcaaaccaaaaccaaagtagtggcacgttagtcagtttatagcacagagagtgagatagagagagaaagtgtgtgtagatgcgacttaccatcatcgatgccattgtagatgcgtgacgaagagcttcagagatgtgaagaaagtgagagaaatggagcagagagagagagagagggggggagttagggtttaggtcttctgttgttcatataggagcaactagatcgaccgatgttcttagaaccggaccggccggttgaaccgataatttcacttaaaacgcagcgttttatggtctggaccccacttagaaagtcataattaaattatttaaaagtttctccatgcttttttaatggagttaaattatgcagacacaaaattatgtaaaaattggctttcgacgcatatatttgttgatttttcacttttgctctgttaatttagaatttggtaaactctaatgtggaaaggatggcaatggaggtggctcttttgggaggaactcaaaaggattatactttttgaagcaatacttgttgtttgtaactaagctacatgataaatcaaagtttaattagtcattagtctctctagacaattgttcttatatattatgtgttctaacttctatcaaaactataaggacaattgacaagttattaaacataacgactacaaagtacaaaccattaaactacatagtacaaatctgatcaaaaatatgtttgctttattgttgttaattatttacttttatgtatctatatatttaacacttgaactcagagaatgcatcctttggaagaccaccacgaccacacgcattgttaacgttgcgagcagctatctttagcttgggggacttgagaaacaaacacatacatttttttttcattatcatattataacaacaacgctcataaatgtaaccgtgagtaaagaattcagttttgtctatgcaccattgcatgtccttttcacaattacccacaccaccggctactttgatgggagccggaaatgacgtcatgaatatgaccaaggcaatggacatcaatgggatgatcttcatgtctgatttattaacctaccagctgatgacaaaatatctcaaatcaggaacaattagttttgcaaaaatgttgtatattttttgtttgtttgagatctttaaataggaaacttggaatcaacgatttatacaacatatgggtatcctatagattagggaggaaagtgattctatttttatatggttgttcatattgaacatttgacttgttctttatgtatatcggtgtatggttgttaggatgttgtatatcttacaaatcgaacaatcgaagtattacaattgctttccggtgctcaaagactgggctatgggtttaggcttggccctttaacggagaaaagcaaggatttggtgggcttctttaaatttggttcgatggacgattctaaattatgtaaattaatttgatatacagtaacatttttgtttttttaaatgttttctgctgaagtcaatttatcaataagtgtttcgtatgggctaatgtatcctttggatgataaacttaaagtatccaaagccgacaaaataaaattttaaaaatcattcaaattacgaatgtttttttctttctccaatttatatatgattttgggatctgttaccgtatatacttacacgtacgggacaagggcacacggtttcgctttcaacttcaccttcccttctccgccattgttactttctcagaagcttccaagtcaaccaatagagacttacttgtttgacttcttcctctcttacctcataatcctccttttggacttttcaataaaaccgcctacttgaatctgtacgacttcttctcatttttccattctttaagtcttcccgttgattcattccgatctgaaatctctctctagatttctctatttttcgaattttaaatg

SEQ ID NO: 10935 - DNA, 3000 bp, Unknown; identical to SEQ ID NO: 10931
  misc_feature (1)..( 3000): cDNA_ID_1688917_gDNA_ID_2214466_Annot_ID_182838 3000 nt of promoter + ATG

SEQ ID NO: 10936 - DNA, 3000 bp, Unknown; identical to SEQ ID NO: 10930
  misc_feature (1)..( 3000): cDNA_ID_3055875_gDNA_ID_2214466_Annot_ID_182836 3000 nt of promoter + ATG

SEQ ID NO: 10937 - DNA, 3000 bp, Unknown; identical to SEQ ID NO: 10929
  misc_feature (1)..( 3000): cDNA_ID_2716933_gDNA_ID_2214466_Annot_ID_182833 3000 nt of promoter + ATG

SEQ ID NO: 10938 - DNA, 3000 bp, Unknown; identical to SEQ ID NO: 10928
  misc_feature (1)..( 3000): cDNA_ID_2685834_gDNA_ID_2214466_Annot_ID_182828 3000 nt of promoter + ATG

SEQ ID NO: 10939 - DNA, 3000 bp, Unknown; identical to SEQ ID NO: 10927
  misc_feature (1)..( 3000): cDNA_ID_3038783_gDNA_ID_2214466_Annot_ID_182827 3000 nt of promoter + ATG

SEQ ID NO: 10940 - DNA, 3000 bp, Unknown
  misc_feature (1)..( 3000): cDNA_ID_3038736_gDNA_ID_2214466_Annot_ID_182857 3000 nt of promoter + ATG
tttcagttgatttctttgtctcttcatccccctctttgtccatgactattcttgatggagcttcggttttggtttcagtcgatttctttgtctcttcatcaatcatttcattggcttcaatctctaaacctctgattgtttcatatgttcttgtgtcttttgtctctacactatcctcctcctctctagcctcatccatgaccacaacttctggagctttggtttcggttctctctgataaatcatctgcagagttgttgtctccttctttgatgaactcgcctatttctaaaagcttctgcgcttttaattcgccttcttcattaacattgtctgctatctcagcttctgaaactttctttgcagcttctttcaccattgcagcatctacttcttttgaaaccaatttatcttccggagcttctctcgcggtttgctccaatgtaacagcttttaagttactcgtctctggtttttctttaatctcagcttcttctaaggctttcttttctgtattttcaggtttatcggattccgagtcagtaacaatctttggtttgatttctaaaggccccagctttccatcaatttccttgaccagatttgttagtgatcttgcattacgagcttcagataacctagtagacaactgcaacataccacaaaaagttttaagcaaaaagtcatgttttgcgctcaaagcagtttagctcagaaaggttgaaatggagaaaaatgtatttgctgatatttcacctgctgtatctgttcagctcggggtttgagatcatccagagatgcttccttgtaaatactccgaagaatgtacatcaaatgagagctaacattatccaaatgatgttgttggacctcacattgatgtacatcagagagacaaccaacagaatgaaatggacagttgacaagtttcataggacatacggttatacaatgcctatccatatcacgtctcatgatactctctgagcagttctgctcacacggaatgatcttgaacgggcaaacagaatcgtgattctccatctgattcgcacaaaacaccgcagtacaaccctcattctcacagttcattgttctatacccacaattcatggcgtgctcggcgagttctccttcggtttggaatttcatctcacaatgtgcactgcttttaaaatcaacgtttttaagcaaagtctgagcgataccttctctatgatcagtcaaccaaaacccgcttatctccatctcttgcgcgaaatcatcgatattatcttctctcctttcgctaagcatccaacccgaaacccggctgaacaaattccgcttagaagtggcgaaatcatcgatgaaatcagatataatgtcaaaaggatcatgagaagcttcaatctcagaacctccttgaagaacaatgtgttcagccacaaaggtttcgcttctacgagtcaagtactctatcatttcttttcgaatgtcagcagcaacagaaccaggactcctgaagatatctccggtagtgttatcgacacaagcagtggctaaaccagggagaaaaacctgagcaatcttgtgaactacttgtgtatcgtaaagatcacagtgaaaggaaggtcctccttctttctgatcttcaatactctcaagatccgacacaggaggatccattgcctgtatatcaaaaatcgtctgcagaaacacacacaaattgaatagccaaatatcatcactagatcagattaaaaaaaatgcaaagcattgaaataagacacaaactccataaacaccattaatcaaaatctctactttttttttcttctggaatcgctagatcagtagaatcctaaaatccgatcaacagccaatgatcacgatccgtaaattgacaaattattaacgaaagtttcagaattgagtcaaattacaagcaaaaagttcaactgttggattgataaagaaatgtcaaaacaaaaaaacgagaattaccctagaaagaaatcgtgtcctaaacagacaatgacaaatcggagaaaggaactaacgaaagcctgtaaggaaatctgacggtgagatcaaaatggaacaagaatggaatgagagaaagagagagagagagaagcacctctctggttttggcgcaataaacgggtctctttttctcttttaccacaacttcgtcgcctcttctattaaaaacggactctctcctcctttatttttatttttttataactggtttctttcctacaacatttttgtagttagtactgtacagtgattattagtgattttacaagcccaataaactatttagaactaaacaaatctaatggaattttaataacattttttttcttatctaatcaccaacccaatgaagaaacaaatttaccctttaaattttttcatgtcacaaagacacttcattattaattatccacaattatactactacacatcaaatacaatcaagaataacaaacataattaccaattaaaaaaaaacaattttctcttgcgcattttccaaattagcaaatcctttatgttgtttttttgaaacatttttaactagcaaatcggtcttatgactagtgactaaaaaagttaaattccaatagatctttgaaactgtttaatatatcatcgaacaatactaacaatagaatagatgatgaatatattattaaattatcaaacttagatataaatctaaattataacacgttacaatactaatacaaaccactatatgatagtatattttttggaacatacaaatcatcgtatattttcaccaatttttttgtagggtttatgttaataagtaataactgattttttaacgattgttatatggatttaactgtttttttttttcttatgataaaaaatgaaacagtgtcactgtaagatttgggtcccttttttaatttcacaagacggagaggaaattaaagaaggaaaagcacgacctttgccgacttccttctgttaatc

SEQ ID NO: 10941 - DNA, 3000 bp, Unknown
  misc_feature (1)..( 3000): cDNA_ID_2716879_gDNA_ID_2214466_Annot_ID_182856 3000 nt of promoter + ATG
tgaagcacatgctccaaatagtaccagatattgcttgaatagagctaccattccctccgtcttcagaaggataagaaatcctctaaaataaaagaaattaaatataatgttagccactttatcaatatcaatcatgccacaacaaaaggtaaacctcccgtctactgaagttacaagatgatccgaagttggtggcagaaatcaatacctgatgaataatatcacccatagacgatgttgagagggaaaacagagcaaaacggtcatgatacgcactgacagcaagaaagagaccactgcaaaatgcattacaggagtcaaaattactggttgctattcaagatacaaaaaatgtaagctttaacattaaggtgtggcttagaaacatgaacgctccaattcaattctctcaacaatcgaatagtgagtacttgggcaaaggccaaaacatacaaaagaaaaaagaaacagctagcaattatggttattttaaaagtagtatctaagtcatcaataggataatgaagtaacaaaatcatggtttttgaaaacttgcctggaatctattgtgagcattcttccgagttgaatccttgagttacctggagtagaaagttgaacatgttgtattggcgagaacctacaccaaacagcagtgaaatgagcaacggtgacattaggtttccgggataaataagagtacatgggatctaaacctgtgcatttcattgctaaatgagagaaatgagagctttccagaatcagaaagaacagccagaaggtcttttcccatctgcaaaagataacagatggttgacatatcaaatcatatagatctgcattcctgttactaacaaaacaaaaagcttggttgtcaccaatttaaaaaaaatctttgccggagtaaaatacctgatcaatcaaatacagtataccgtgcttaaatggaaaatgcttacctgcaaactattcgaataaagcttgctactctgaggtatgacagccaaatccttaattgttccaaatacatactgttcacacaccgattcaacaatcccgtcttcaccaataaccaccaattctatgcaggtctcctggtaagacaaaagaaattccatttctagttactgctaaaacaacaaaagcacacactacagacctaagcatttctcactgtatttctgctctacagactctaaatccatttgaaataagcttttataacaacatcctgatgcaactaccatacccacaaaaaaaagtatacaactttttactctttcaacaatgccctcaacataaaaaacagcaagcaagtgaaacaagtgcagatagcatatcaactccacaaaatcccaatccctaaaggagagatatttaacaaaaaaaaaagcagttcccacaagacaaatcagaatccagaatcgaaaagtagagatcagaggaagaagaaggaactgagaccttgccgaaaactatgtcgcgggaggaaggggagcggaagtagccataagcaacctggagaacgacgctggggcggaggatgcacttagctaggtagtgatccccagcagaggaaggggaagaggaaggaggaggcgtaggagccgccgtggcaggtgatgattgagactgagcggaagattcatcctccggagccgccatgattaacagaaggaagtcggcaaaggtcgtgcttttccttctttaatttcctctccgtcttgtgaaattaaaaaagggacccaaatcttacagtgacactgtttcattttttatcataagaaaaaaaaaaacagttaaatccatataacaatcgttaaaaaatcagttattacttattaacataaaccctacaaaaaaattggtgaaaatatacgatgatttgtatgttccaaaaaatatactatcatatagtggtttgtattagtattgtaacgtgttataatttagatttatatctaagtttgataatttaataatatattcatcatctattctattgttagtattgttcgatgatatattaaacagtttcaaagatctattggaatttaacttttttagtcactagtcataagaccgatttgctagttaaaaatgtttcaaaaaaacaacataaaggatttgctaatttggaaaatgcgcaagagaaaattgtttttttttaattggtaattatgtttgttattcttgattgtatttgatgtgtagtagtataattgtggataattaataatgaagtgtctttgtgacatgaaaaaatttaaagggtaaatttgtttcttcattgggttggtgattagataagaaaaaaaatgttattaaaattccattagatttgtttagttctaaatagtttattgggcttgtaaaatcactaataatcactgtacagtactaactacaaaaatgttgtaggaaagaaaccagttataaaaaaataaaaataaaggaggagagagtccgtttttaatagaagaggcgacgaagttgtggtaaaagagaaaaagagacccgtttattgcgccaaaaccagagaggtgcttctctctctctctctttctctcattccattcttgttccattttgatctcaccgtcagatttccttacaggctttcgttagttcctttctccgatttgtcattgtctgtttaggacacgatttctttctagggtaattctcgtttttttgttttgacatttctttatcaatccaacagttgaactttttgcttgtaatttgactcaattctgaaactttcgttaataatttgtcaatttacggatcgtgatcattggctgttgatcggattttaggattctactgatctagcgattccagaagaaaaaaaaagtagagattttgattaatggtgtttatggagtttgtgtcttatttcaatgctttgcattttttttaatctgatctagtgatgatatttggctattcaatttgtgtgtgtttctgcagacgatttttgatatacaggcaatg

SEQ ID NO: 10942 - DNA, 3000 bp, Unknown
  misc_feature (1)..( 3000): cDNA_ID_3038740_gDNA_ID_2214466_Annot_ID_182855 3000 nt of promoter + ATG
ataattgtggataattaataatgaagtgtctttgtgacatgaaaaaatttaaagggtaaatttgtttcttcattgggttggtgattagataagaaaaaaaatgttattaaaattccattagatttgtttagttctaaatagtttattgggcttgtaaaatcactaataatcactgtacagtactaactacaaaaatgttgtaggaaagaaaccagttataaaaaaataaaaataaaggaggagagagtccgtttttaatagaagaggcgacgaagttgtggtaaaagagaaaaagagacccgtttattgcgccaaaaccagagaggtgcttctctctctctctctttctctcattccattcttgttccattttgatctcaccgtcagatttccttacaggctttcgttagttcctttctccgatttgtcattgtctgtttaggacacgatttctttctagggtaattctcgtttttttgttttgacatttctttatcaatccaacagttgaactttttgcttgtaatttgactcaattctgaaactttcgttaataatttgtcaatttacggatcgtgatcattggctgttgatcggattttaggattctactgatctagcgattccagaagaaaaaaaaagtagagattttgattaatggtgtttatggagtttgtgtcttatttcaatgctttgcattttttttaatctgatctagtgatgatatttggctattcaatttgtgtgtgtttctgcagacgatttttgatatacaggcaatggatcctcctgtgtcggatcttgagagtattgaagatcagaaagaaggaggaccttcctttcactgtgatctttacgatacacaagtagttcacaagattgctcaggtttttctccctggtttagccactgcttgtgtcgataacactaccggagatatcttcaggagtcctggttctgttgctgctgacattcgaaaagaaatgatagagtacttgactcgtagaagcgaaacctttgtggctgaacacattgttcttcaaggaggttctgagattgaagcttctcatgatccttttgacattatatctgatttcatcgatgatttcgccacttctaagcggaatttgttcagccgggtttcgggttggatgcttagcgaaaggagagaagataatatcgatgatttcgcgcaagagatggagataagcgggttttggttgactgatcatagagaaggtatcgctcagactttgcttaaaaacgttgattttaaaagcagtgcacattgtgagatgaaattccaaaccgaaggagaactcgccgagcacgccatgaattgtgggtatagaacaatgaactgtgagaatgagggttgtactgcggtgttttgtgcgaatcagatggagaatcacgattctgtttgcccgttcaagatcattccgtgtgagcagaactgctcagagagtatcatgagacgtgatatggataggcattgtataaccgtatgtcctatgaaacttgtcaactgtccatttcattctgttggttgtctctctgatgtacatcaatgtgaggtccaacaacatcatttggataatgttagctctcatttgatgtacattcttcggagtatttacaaggaagcatctctggatgatctcaaaccccgagctgaacagatacagcaggtgaaatatcagcaaatacatttttctccatttcaacctttctgagctaaactgctttgagcgcaaaacatgactttttgcttaaaactttttgtggtatgttgcagttgtctactaggttatctgaagctcgtaatgcaagatcactaacaaatctggtcaaggaaattgatggaaagctggggcctttagaaatcaaaccaaagattgttactgactcggaatccgataaacctgaaaatacagaaaagaaagccttagaagaagctgagattaaagaaaaaccagagacgagtaacttaaaagctgttacattggagcaaaccgcgagagaagctccggaagataaattggtttcaaaagaagtagatgctgcaatggtgaaagaagctgcaaagaaagtttcagaagctgagatagcagacaatgttaatgaagaaggcgaattaaaagcgcagaagcttttagaaataggcgagttcatcaaagaaggagacaacaactctgcagatgatttatcagagagaaccgaaaccaaagctccagaagttgtggtcatggatgaggctagagaggaggaggatagtgtagagacaaaagacacaagaacatatgaaacaatcagaggtttagagattgaagccaatgaaatgattgatgaagagacaaagaaatcgactgaaaccaaaaccgaagctccatcaagaatagtcatggacaaagagggggatgaagagacaaagaaatcaactgaaacagaaaccgaagctccatcgagaatagtcatggagacagagaaggatgaagagactatgaactctagggctcgtgcttcggatgaagctgaagcactgtcaaagagctctcaaggtttttctacggtgcaagctgaaaccgtaccccatatgtcttaacatcttttgttgagacagttcaaactcttgaagctagcatggagtgtatgttttcttttcatttaaccaaagattgtttcttttgtctgtctgaaaatatttgagtcatcaaatgtatccaattttgtattgcttaatcaattgattggttttttgccgtaattcatcaattcattatgattgtcctatgtgtccaattctgattaagcttttcaaaccggaatcaagatctcacccaaaaaaaaattaatttattaattaaccgggtttggtctatgtatattcttcttccgaaccggaaagaggattggacacaaacacaagtcaaacaaatttcgttgtgcaaacgaaagtaagcagagcaaagagtttttgtgtggctagtggcatcaatg

SEQ ID NO: 10943 - DNA, 3000 bp, Unknown
  misc_feature (1)..( 3000): cDNA_ID_4361228_gDNA_ID_2214466_Annot_ID_182853 3000 nt of promoter + ATG
caaatcttaaaagattttctttccaatggataatttgattgaccaattaattctatttatttttggttaatttagtttttattttttggcaccatattcaaatatcaagtaattagatttatattttcggttattatgcaggctgttgaaataggcaagaggttagccgagaaacactttatccaccatgtctttgggtacgtacatatatataaatcgtgtcctttttttctttggtttacataattgaatattcttgatttagtgaaatgttcataaactgtatgtttgttgaatagagagaacgagtttgaagatggaaatcattactaccgtttcctagagcacgagccgtttgtttcaaaatgttacaattttagaggttctaccaacgacatggagccccaaagtgcagccattgttgggcagaagctattcaaaatcatgacagctattctcgagtcttattcttccaatgaccacactagtgttgattacatgagaatcagccagagtgaagaattccgaaggtagaatttggactcaagagtgcttaaacggattttagtctaggaatgcttactttagttctatcgacattaatttggttatgctttaattgtgtataaacgaaggtacttgaatttggctcaagacttccaccgtttgaatcttgtggaactctcaacggaagagaagttagcattttttttgaatttgtacaacgcaatggtgattcatgctttgatcagtatcggacgtcccgaggggttgatcgcaagaaggtcattctttacggattttcagtatgttgtaggaggctactcttattcacttagctccatccgaaatgacatccttcgtcgcggtcgaaaaccctcttatccatttatcaggccaccttttaataacggcaagacacggcatgaggtaattttagcgttccatgtttgtttgtattttactcatatcggtgattttcggattatcctatagttttaattctatggtttaatgtcagcttggtcttctaaaactgaatccattagtacattttggcttatgcgatgggaccaaatcaagtcctgtggtgaggtttttcacaccgcaaggagtcgaagctgagctcaaacgagcagctagagagttttttcaaaatggtggaattgaggttgtcttggacaagaggaccatacatctatcaagaatcatcaagtggtaatcaattctctttacaataatgtctacattgaaatttataaatagtgagacctaatgagacttatatgagtcattttggttattagtctaatgagctaagaaaggatatacattgatgtgtatatgtttgttgcggtaggtacaaagaggatttcagtgaagagaagaaaatgttgaagtggataatgggttatatagattcaaatgatgcaggtcttttaacccatctgcttggtgatggaggtggttcttttaacatcgtttaccaagattatgattggtctaccaacaattgaaatttaacaacaactcttctttttggtggtatattgacattaaactattggtccataaattttatgttaaaagtcatctatttgttattcatgagatttattcatgaatcacaggtatagtactactatctgaatcccggattttggatctttactctataagaatcgaagacaatagatgatgaaagaaaacttaattactactattcactattttaaagacaaacaaattcaaattaatatgcatatatagaatcgtacgcctttggtgtgttcctaatatacacacaacttattatttggaacaaaaaaaaaaataatcatttaactaaaatactatccggataatgtcatatatatgaattatcattcatctatgaatatatgtcaatttattcttacgtggttgaagtagaagcctcttctttttggagaaatgagtagaagctttttatgttatcataacatcatcgtcttacttttctccttttctttctttttcttcacatttttactttctttggtatcgaaaccttaaactttcaagctaattccgagaaatgaaattttatactaaaaacgtccatgattcaagattattacaagaaaaattgacatgaattatcgttttgctctggtaacaaaatcactacgtacttaaagcaaatttgaaatatcatttctgtcttctgatgacaataagttaacggtttggtagaactttttgtagggaaacttgtgaagatagagttagcttttagatgcaggtaacgtataaacttatttgaacggttagattgagaaacgaacaaaatacattggatgcaatatcttcctttgtactttgcaagtgttgtatataaagaaaaaaaaagtgttgtatataagtaactcatattctgatattccccacttccatttcttataaacaacataatttgagtataatcttcattttaattatatatcaaacaatagaaccttaagtttttgattataatctctgcctaatcggcagctaaactcatataacccattgtttagcccagttatataactttggaagttgcataatcagcttaactattttctactacaaaaaactaaacatttttctttttgagctcatcaaattcaactaaaattgtctctcagcttcttttttcccttttcctttatagtgagtggcgttttaaaactaaaagcaaacggatcaagatagagaaagccacgatcaaagcaaaaccataagcaaacaaacaccaaaccactaaaagaataccgcacacaacttctttctatcacatgaatctccttttaacaaataaaataataataaagtaaggattatgcatatcttattgcacgtggccggtgccctttgagacgtatcaccctctacatgcaatataaaaagcattgcaaatgaaccaaagtttgatcacatccatcacttataactaaaaacacaaatcaagataaa

SEQ ID NO: 10944 - DNA, 3000 bp, Unknown
  misc_feature (1)..( 3000): cDNA_ID_2716895_gDNA_ID_2214466_Annot_ID_182850 3000 nt of promoter + ATG
aaaaagatttggtccggtcggagagagatctgaacgaaagaaagtcatcgtcactcccagaaagaaagaaactcaaaggtatgagaagactatccgactcgtagctgcttctggatacgaattgtttctccactatctcaatttgtctccgtctgctaagaaaataaaacaatttgtaattctagggtttgatcctctctctttcaatcgtccctaatttactggtagtttggattgtaatatcttaatcccgcggattatactaagattacaagttcgagaattgattcattcactgcaaatttccttcgtttgctttgatttcttggaaacttctgataacaaatcgtttctgagaacatgtttttcttcttcttgtgattgtgtctttcaaagcatacttctccaattctctttggtttcttccttgtgatttttgaataaattgtgttattttggtttccttttagcttgatgttgttgttttgaaatctcaggttacaatggcgaagctaaggcctagacagttggaactgagcaagactgttccttccaagttgggttttgatggagaagaagacgcttgggtctttgttaaaaagcagaaaatcttcattgtcttgccttctcttccacttcctcaacaacagcatttcactttggagaaacctgcaatatctcctcaattagaagctgggtttagagaaagcatggaggttacgcaagatagtacctttgttcacactgtggtgccttctcttcctctgcctgaaactcctcaatcacaagctgagttaagagacgctcttgcggatacacactttaccactcctgttcccactgtggtggtacctgctcttcctctacctgaacaattcattttgcacaagcctgaaacttctcattcgcaagttcagttcagagattgtattgcgaatacgcataaaactactcctcttcacacagtggtgcattctcttccggtaactgaacattccactttgcagaagcctacatcttcccagtcacaagttgagttaagagagtctattgcggatactcatggaactactcctcttcaaacagagatttcttctcttccattacctcaacacttcgttttgcagaagcccgcaacttctcaatcacaagcggatacacacgaaactactcttcttcacacaatactgccttctcttcctgtacctgaactatgtactttgcagaagcctgcaacttctcaatcacaagctgagttaagagcgaatacgcgcaaagctactcttgttcacgcagcagcgatgccttctcttcctgtacctgaacattacagtctacagaagccttcaacttctcaatcacaagctgagttaagagcgaagacgcgcaaagctactcttgttcacgcagcagcgataccttctcttcctgtacctgaacattacagtctactcaagccttcaacttctcaatcacaagctgaggtaagaacgttgacacacaaagctacccatgttcacacagcgatgccttccctttctgtaactgaacattgcactttgcagaagcctgcaacttctcaatcgcaagctgaaactagtcgtgttcaaactgtggaacctgaggcctgtcctgatttcacctcagtagacaaaccggagatagttatgagtcgcagtctcacaaccaggaaagctccagcaccaaagagatcactgcaagaaagtaggaagaatcaggatagaagagtggagatccacaggaggcgtgcgggtcacaagcccataaggtttccaagagtgatgtgtagctctgttgttatggataatgagaagctgagagtgttgaatctggagaagaaggttgagaaagcgggagggttgaacgaatgggttggatctataggattagggagagagtttgagaggatgttgagaggacagaggatgagtaagtttcagatggcgaatttgacaatggagaagcttaagcagatgggtgctttagccgttgggccaagaagaaagcttatacatgcaataggttgtgtctatcacccacattgtctacgtgcttcctttaactgagaactatctgttagagtttagttgaggccaataaaacttagcttacgctttattgatgttcaactagtattgttttggttattgatactctttggaccatatatgtaaaacagagcaacaatccactgtttgatgtgatcattgcatcgtgctattttgtatttgactatttggggatcagtcgtctattagcgttgcacatgcaatatcattatattgcttcttcttctttttttcaatcactaaaggatctagaaccagaaacaaaaagtccaaaattcaggttaatcattatagttttgctaattggaaacgtatgcaatgactaaacataaaatttatagtagaaacactagaaccctaattcttcaatttcaacataaatctttcaatttgagtggaatcattcaaaacttgattcccctaacttgaaagtaattatttgaatgtaagaattaaaaaaagcgtattttgtaaagtatcacgactaaaacatgctagttgagttaaaccttcataaaaaatgaaacatattatttgagtttcgagaaagaaaaaaaaaaaacattttatttgagttgtcgcagacacgatcacgatgtaccctatatatagttccaattagcattatttatcccatcaacaacaactattatgtcagaaatattgaattagtaaaagaaacaaatcttatctgggccatccatttgcacacagaccaatggacgtagagcgtggtaggcacgagccagatgtgaggtaccttgaggtgccacgtcacattgaggaatctttggcggggtttcattgtttacctataaaaatggcggccgcaaagtttcgtacgtctccgatgtttcaatcgtgaaatcgaaacaaacaaaataattaaaaaaagaaataagaggaggcg

SEQ ID NO: 10945 - DNA, 3000 bp, Unknown; identical to SEQ ID NO: 10934
  misc_feature (1)..( 3000): cDNA_ID_1014176_gDNA_ID_2214466_Annot_ID_133024 3000 nt of promoter + ATG

SEQ ID NO: 10946 - DNA, 3000 bp, Unknown; identical to SEQ ID NO: 10933
  misc_feature (1)..( 3000): cDNA_ID_2716918_gDNA_ID_2214466_Annot_ID_133025 3000 nt of promoter + ATG

SEQ ID NO: 10947 - DNA, 3000 bp, Unknown
  misc_feature (1)..( 3000): cDNA_ID_1375432_gDNA_ID_2214466_Annot_ID_133026 3000 nt of promoter + ATG
tccgatgatttaggggttagtgcgatttaggtctcttcctgtaatttttcgcgattctctgtataatttgtgtggttggtgtgaggagaatcttggaattgggaatggaatctccgatcaaatgttgcgactgtggatgcgattgttgttcttcctcccctggttcatggattcgatctgtgaagaagagaagacacgacgaattacagaccgagaaacgattctcgataccggagctggacgacctagacatgttctctaatcctagagtccaaattgagaacgaatgtgaattactacgcgagactgttagcaatcaacagcaaacgattcaggatttgtatcatgagcttgagcaagagcgtattgcttcatcaactgctgcagatgaaacagtaaagatgattcagacgttggagcgtgaaaaagcaaaaatcgacttggaactgaaacagcttcagcgtagtgttgacgaaacattgaattatgaaaaccaagagattgaggcattggaaaatatggtttatcaaagggatcagacgattcaggctcttacgtttgaaactcaggcttataagcacagaatgatgagttttgggctaaccgaagcagaagctgatggtgagaggagcttgcttagtcgtaacccgagcatgatcgactttagttctgaatatgactgccctacacaagattaccctcctcttaaatgcaatattaatgagaaccaagaccctcttgaggctgatatctatgttgcagatgatgagaactatccaccagctgattctcctcatgggagagtacatttaaagactttggatcgaagactcagccagatggagacgaatcctagctttactcagttgaatagagggagggatgtttcagagaaggggatggttggtgagagtcctaggcgtcaaagacattttaggaggatttcccctactggttcatcaagttcacacttgggagcatctaaagaactaagacctgatgtttttgttgattccccgaggtcccaaagctacagctctaagaaaatggaagatgtctcgtatacagagaataataatgctaaagatgacttgtcggaaataggagatgacatgagtgatagagtttataccattgattctgttcatcacagcagtgtggctcatagtggcggtgtagcggagcagaagattgaggatggtgcttctgatggcaatgttgttttcccgagagaacacacggatcttggtgatcctgatataacgaaactctacatgaggcttcaagcactggaggctgacagggaatcaatgaaacatgcgcttctctctatgaggactgaaaaggctcaaatggtactgttgaaagaaattgctcaacacttgtcaaaggaagttgtccctcaacggagattgcctctacgtaaagcatctattgctgggccattgacttttacgccggtctttaaggtgattgtcatgtttctgtatgatcacaaagcaacttcgtctaaagctgtctcttgttttctactgttctcactctaacttgtttctgtaattttgattcttattcctctgcagtggatcacatcttttgtttcctggaaaagaaaggctcgtcgaagcaagtaagtaacctgtaacaaattttggttactctatgcttcacatacctatcacaagagaaagatctgtgaatctctttgagaaataactattgtcatccattttcaaaccggtgctctcttgcactataatctcgtccttaatattcgaaaaacaaggcaatgtttcacatgatagtttagaaattactgttggattttagggagctgcttatgaaacttatgctggtctctgttccaatgcaaatacgcagatacatgtatgggatgtcaggaaacaacatcggcttgcaaatgcttctagaaaaagtccctcggtcaaggaaatggcgatgtcttaggagcacgcaagtgtgaaacagatccaatcctttcaagccaacaaaatcactctcctgactctagattcgaagcacataatgtcaaatactgatgtgggattggcgaggtaacatttgtcggcctttcttcaacttgaattggattctcgttcttgggttgcagagaaaatgtatttgctgtgcgattttcaatctgttttcctcaatattttaactgttgtataaaagaattgggttgaagaatgatataactcagaggctatacaatctttgtatggtttctaacatgaattgtttcattcatggattcttttttcttttttttatcaatattttggagatggattcatcacataaataagtgaaggaaaatgtaaaatgttcccgtttcaaacctcatttcccacacttgggaaaaggaaaataaaaatatttgttgtcagcattcctcctatatatttgttgaccttaaaatgaaacaaaagaaattttccatgaaatataatagaatgttctgtttgctgaccatgagttgaatagagttaacaaaaagaaaaaaaagtttgtaatcgaccatggacatattttggaaggatcaaaattcagaccatgttctaaagccgagttgctgctgagagtaaaaaacaatatatagatttaacatatttgctctagtctcttgttcaaaaaaagatggtctagaaatcttcgatattgaatttttcgattaccaaaaataaaaataattaggaggggacttacataaaattgttattttattcagtatacgtgaagagtgatttcatttcattgacaaataaacagacacgtgtcatgttttgatagtgaatatttctttgtctaaaaaacatatgttagtggaattcaaaagcgaagaccaattaagtaaacggagccgccatttcttacttccaccacatgtttctcttcttcttcatctttactattattctagatcatcattatatgaatatatatacgtacacaaaatcatacgtttttccacaaatg

SEQ ID NO: 10948 - DNA, 3000 bp, Unknown
  misc_feature (1)..( 3000): cDNA_ID_2716914_gDNA_ID_2214466_Annot_ID_133027 3000 nt of promoter + ATG
ttagataaaaaattatatcaatttataaaaaatcaccttaattttttagataaaaaattatatcaattataaaaaatgtaacctaaagtacatttaaaaaaaatatataaaacatggtgaaaaacaacaaaaaatcatctatggttattcgaacatggggcgattgaaaagttccttatggtgtttcgccactaaagaattagtattttcaaaatatcaccttatgttttgctatataatatctgtcctaaagcttaggttttacttgccttatggtaggttgtttgtttccactaaaaaaatgaaatatggacctctcatttattagagttaaaacaaactctcattttttacttacacaaatacgaataaataccttttgcgtttttttgaaatacaacatcttaactatcgtttacctaaaccgtttattacaaatctctctgagattacagaaaacataaaagtttaattttttctattaaaatatataattaaatgtttcaacgaataaatacctcggcgttttgaattcgcctcaccggcaccactccattcatcctccacataagcagcgaccaactgatccgcctgtttttgttcaactttcttccatccatggtggacatcggagttacatttagaggtttcaaagctattgtaatccacatattccatcggatcattagtgagtgttaataggtttgtgaatcttttttattctgtttttgtgtttgtatttaaatggagttttaatgaattaaaatattacatcgaatatgttgttattcaattaggattttaaaaagttagtgaaagtgtgatgttattgatttaagatttatagaaagaatttaatattttcataaatctgaaattattgaatttattcttttataaagtcaattaaagttttgtgttattcatttaaaacaaaagaatttatgattgttaataaattaaaatataattttattgttgattagtatagaacatatataactaataatataataatttaattcatcaacaatcatagattttttttgttttaattcaataacacaaaacttttattgattttataaaattatgaatccaataacttcatatttatgaagactttagattacttttacaaatcttaaactaatcagaaaaattgattgaatcactaaaattctatttaacttacaaactaataacatccctttactttctataatttattagagtcatcaaaattctttgtaaaataagaatctgtaataccctctaaacttttctaaagtttgtcactctttccttgatttttcgacaatcttctaccccggttttaaaagaagtaaactaataccaaagtagacttttttttatcccaaactacgaaattatcacattgatgaaaaagacacaccgttttattttattttgttttccgattgataatttagttcattagtatttttttcaatctcctaatcacatgtgactattcaatatatagttaaaaaaaaattaaaaactacaaaacctcttgatgaggtgcaaaacatatactttttgatgctatttgaaaaactacaaaacctcattctagaaaaagctctttctctaaaaatatttcttctcggttgtcgatgtcacgtcgaccaacaagaatttccccaatgggtaaattaacttttaaaaaaaaactcgtccaatttttctccttcaccacaatctcctaaaaactcgttcggctcttttgccacaaagaaacaaatcagggatacaatgagctctaaacttcataatttttctttcgtttccatttctcatacctataattctaaaatatatgaaaaaattattataaaatatattaatatatcaaattttggactaaataaaatttaacccatgatataaaacggggcatgatctagtactacattatttttaaaaatatgaccatagtcaatgtattataattactcaaatcaacacactcaatatgaaactacacaaatccttttcttcataaatacaatctgacagaagttcattaaatcctaaattcgtgacttgtcttacattttgcaacaaatcaaccatatataaacacaaaagtacaaattgcaaatacaaaaaacaattaaaagaaaacttttttgctgaattcgaacaagaaagttgacttcacaaaatttgctggttgtattggtctattggatatgggccttaaaagaacatttgaaattatgaacccgagatattttttttgatttttgaggtcatgccgccatgtactttgttcgtaggttattgacttatgacacctcactcaatcaaatatcagccgttgatctttagccaatacctcatcttgacgttcattcaggatcgtctcctcgtttataccaaaaatagtctccctgacaaccatcatcgggaacaggagacagagtctgacagacagaagagagactccatgagaatccttctcctccgtttattatagacaaaaaaaaataaaaatccagatgaataaaacagatttttagggtttccaaaaatcaaacaattatcaaaacctttttttcaatacatacaatttgaattcattctctacaattacgaaaattccttaataccttttttgtcctcttttttttgtttgtttacgcgatagaaaaaacgtttctcgttctgtttctctgtttcgtggacgggagacaaaattctctccaatttctgggtcgccaaggggtaagtaaggtttcatcaatttgcgttttcggatttttgttttctctcttgatccagattctgaaattgagttttactgtgttgtttccgcagaattggcttcagctggattttttttttttttttttcctgagaagcttccgatgatttaggggttagtgcgatttaggtctcttcctgtaatttttcgcgattctctgtataatttgtgtggttggtgtgaggagaatcttggaattgggaatg

SEQ ID NO: 10949 - DNA, 3000 bp, Unknown; identical to SEQ ID NO: 10932
  misc_feature (1)..( 3000): cDNA_ID_2716902_gDNA_ID_2214466_Annot_ID_133030 3000 nt of promoter + ATG

SEQ ID NO: 10950 - DNA, 3000 bp, Unknown; identical to SEQ ID NO: 10944
  misc_feature (1)..( 3000): cDNA_ID_2716895_gDNA_ID_2214466_Annot_ID_133032 3000 nt of promoter + ATG

SEQ ID NO: 10951 - DNA, 3000 bp, Unknown
  misc_feature (1)..( 3000): cDNA_ID_2716891_gDNA_ID_2214466_Annot_ID_133033 3000 nt of promoter + ATG
gttttgaatatcacacgtaccttcttcctcccgcaatccaagtaatcaatgagaatctcgaccatctcggcgccggagaaacagttcttaacaatcttcatcttcatcaaacgatccttaatcggtagcttctgtctcaaaaccctaacgaatctcatcatctcatcaacaacaacaacaacatccttattattactctcttcgtcgaatccatacatcaccggcaacggtgcatcgccgcaacacttctccttcaaaaactccttaaccctccgatcaaattcaccactgtttctcagagaattcaacgccattaatcctccgaagtgtttctcgttgaagaaaatctgaggaacttgagaactccctgttctttcaaccagctctttctctcttgacgaatacacgtcgatgttgatctccgagaaatcaaatcctcgttcccggagaaacaatctgacggcggttgaatctcggcagttagatctggagaagaaagttatacgacctttgatttcttcttcgtttttcatcttcacgagaactttcactccagagattttgaactcggtcacgtcatcgatcgagtcgtcgtcatcgtcgttctctagcaaaaccgagatgcgtttcgaaatcgcgttcccgctttggcgtatgaatttcatcaaatcgccggtgaatttctctttcggatgcaataattcttctaaagagacacgacggccacgtggcggttcaagtttcggtagctgaggatgtggtgggagataaggatcatcgattgagatttctttcatcggactttgagagacggcttcaggaatgggtgtggcgggatgtacgtgatcactgatgggatttgaatttgaatatggaggtgaaacaatatccgaagagatagtgtaacttttgccgtttgttactttctcagattttctcggattttgacaattgtttttactttcctcaaacctcattgaggtttttttctagatatgagaagttcatctctggaagagttctttgtacctaaaacaaaacgttgaaatgagagatatatagaaacagatttcaactagttaggaaagaattgaagataagcaattttggtaagtgtacaatttaattagataatgcattagtccacagtcaacttacaattataactcagttataaacttgtcaaatttaagcttcatatatactaaaatcataatgtttattttcatatgagaaatgaaccaaaccaaatgaaattatccaaatcaagattgaaccatatgttaaaaccagttatctctagcttgtacaaaagaaaaaaaaaaatacaaaaacaaagtcagaaccgaaatatatacaatcaaacaaaccacatagaaagaaaacctcgatagcaattttaaatttccctagcattttcttcatttttgttggatttaaaactctgattgttctaaactcagcccaacacttccataactatgatcacataaggacgtgtttgttttaaaaagggcctgttaaggaagagccaaataaatatgtaggaatatgcttaatcaagctatgtttacctggtagtagggtacccccatgaaataatagcattgtctttctcaacaatgatcatacaaaaaaacatatgataacatctcgacgaatgaaaatgtttattgtacacgatgtacattcgaaacatcgctgaagttaaggtctacggcaataatagtccatataaaacaacacactggaaataaatatccatgaccagacaataagcatatatatcgatttcatcatcatcactttgagaaaatgaagacaactgaaatgtaattaaggatgattgatataaagaagaagaagataaataataacaacgttgtatagtcttgtagaccttcacctttgtagagagacgagtgcaatggatatttacagacactctatatgaaaaacatcttgcaaattgaaagaaaaacaaaagaaaaaaacgaaacatcttgaaaagtgataaccgacatgtttttttttttttttttcatacgaccataccatagagcaagctaccccatttttctaaaatacataaagctaccatatattagagatgttattttatataaaataacattttataatgatgtggtataaaataacatctctaatatatggcagctttatttattttataaatgaaaccaaattatgttactttttgttcatttcattttgagtgaatccctcaaatactgtttactatttttatttttaaatctgtaataaagatcattgcagattttaacaaaaaaaaatcattgtagcaaattaatgttaattacatactgtacttgtcaaaaaagtgcaaaacttataaatgaaggtggataagtattgttctactatttttagtatacattattcacatttaaagtaatgtgacaacaatatattacaaaatctaagcattaacttctgtatgaaatttcctaaaatttatgaaatttgcattttcatttacattatttaaacttttaggatagtaatatagaaaaaaagttcaaaacaaacttaaggacatttcgaagcagagtagagaagccaaaaagttcaccgaagacgtcccacaccgtcacggtcacagtcacgtgtaatacacgtggagagttttaattggtgacagcatctgaagagtcgtatatgtcgcattctcattagcctgtcacgtttctcagacgaacactcagggaaacatataaatctgaatccaaatagtaattggaattacaatagaaacccttaatttagtgaaaatatcgtaattatcctatcgaaaagtgagaaagagtaagcagagaaataagcgattgatctctccttctgcaagttctctatttcttccctcacttcttcttcttcttctcccctttcattgttctctctgttcggcgctctcttctacttctctcgatccgaccgtgaatcactatcggagcaatg

SEQ ID NO: 10952 - DNA, 3000 bp, Unknown; identical to SEQ ID NO: 10943
  misc_feature (1)..( 3000): cDNA_ID_2716883_gDNA_ID_2214466_Annot_ID_133035 3000 nt of promoter + ATG

SEQ ID NO: 10953 - DNA, 3000 bp, Unknown; identical to SEQ ID NO: 10941
  misc_feature (1)..( 3000): cDNA_ID_2716879_gDNA_ID_2214466_Annot_ID_133037 3000 nt of promoter + ATG

SEQ ID NO: 10954 - DNA, 3000 bp, Unknown; identical to SEQ ID NO: 10940
  misc_feature (1)..( 3000): cDNA_ID_2716875_gDNA_ID_2214466_Annot_ID_133038 3000 nt of promoter + ATG

SEQ ID NO: 10955 - DNA, 3000 bp, Unknown
  misc_feature (1)..( 3000): cDNA_ID_2716978_gDNA_ID_2214467_Annot_ID_133040 3000 nt of promoter + ATG
atgtgtacacaataagaggctagacactatcgatgaactgtgaatatatgttatgctctagttatgttgtataatgatcactttaactagcagaccaaaactttttgaggtgtatagcaaacatgaagacaagtagatccataaattatagtttcccacaaaattcgatgagaccatgcatagggggtttggtacgacgaatatcttttgatgtgtattatatatgacaagtagatctcagtttttttcttttcctattaagttgttttacaaaattaattagtactcagcatctagtactagcaacattttacaatatgttccaagtggatgatcacgcattaattactccgagtaattaatgcatgtgaatcagaatttgtgtatacgcaccaagcagatgcaaagctgatttgaaacatcagaggtgtgatatacaagaacttcgtcttgtttaccttacttgaagaatcacattcataatcctcaagatatatatcttacaagaatttttcttatgaaagtttttttttatgtaatagattgttccctattgtccatactttatcatgacgacacaccctacaaccatacgcatttttattttccaatctctactttcccatatgaagaaatcaagaatgagataaatcatatagttgacacactattggaacgaatataaaaatgaaattaaaatagaggatctatatataacgtaagcatgtaaaaagttatgacataatttaattgagaaaaaggtcgaaaaaggagctgacctgcagacgtaatctgtcgacaaatatcaatctatatatattgagtctttgatcaccacatgtggtcctaaatttcgaaccaacgcatagaaatgaattagaaagtatagcatatagcaacctttggccgctccaaacgatcatgctttacttttttgattgtgtcctattacctaaagatgcttttactatataattgagttttacaattattaagtgaataccgacaagcgacacaagcaaattaaagtataagaattttatatgagaaactaatttgacttttgttgtacgtagcacacaagaccatgatgcaccaagaaaaagaaaaaaaaaacagagtgaaacttgaatcgttatccatcaatattagttatttgtttcaactaatggaggatctaaaggcacataatacgtcataccacttgaaatttagtggagactgaaaacttaagcattacgttttgatgtttgtaccaaactaccaatagtgttgttataaaatgagagtatgcatctttaatgtagatgtgttggcatatttgaaagcgttttttcaacactttccagagatccaatttcattcggattctatgattcttgatttcgtccgattacttattcgaaaagaattttgtgaaacaaatgtatcgtaaaatttaatcccaaaatttgttgaatgctatatggaatctaaaacacatgatgtgaaaccaaagtgtacatctcatggctcaaaatggtttgcataagcaaaaatcatctttttgactaagttagtggagcctttatgagccactccttaaacttttaaatcgagcttatatattataagcaatgcttacacatgttaaggaaccattggttaacatagttcaaaaaatttactagacaaagaataaaaataaagaattttatgtattggccacatagagttattgtttgtctcccattgcttttgttgacgcatgacatccacatgaaaatatcattctcatccaaaactgttgtctcactcacatatcatccaagcaaactataactttcacaaaggagatgtcaatttacatgaaaaaggcttttatttaaggtgaagtgcggataagaatagtgattcaaacgaacaaacacagtcatggatcgatctattccattactagaacaaggatctttaattataacccattcaatctaaagttattattagccaacacagtagtcaaaaaatagggaagataaagcaacattcagtttcctatacacacaaaattttactagataacaagagtcgatcgacaataacatggacaaacgtacatctacaagtgggacaatgaacgatttgaatcatacgtacatatacacccattgtaattcacgactgaaagaaatgggacaaagaatctctaggcaacactatctcccaacagcaaacaaattactatttccgagaagaacaaaaaatgtgactcacactcacttaaggttttgaaattacaagattttagaaattggaatggacatgtatatgtattgtcggtgtgttgtcttataacctcttaatgggaatcggattcaaaacaaaccctctcattccacgtttgtcaagcacgtgcttcttcaagaatttgaaattttggtttaacggtacactcgatttgatcagaacgagacaattaattacaattaaatacaaatttagttactgtcggtagttttttttttccgaatgcttcctgtcgcatatattgttttggttctatgaactcttattagcatataccagaatctgttgaaccatacaaatttactatattttctcggtgactctctatatagcagcaaaccattagcgagactagattatgaaccttctaaacattaactaaaatactcagtttcaagcccaatcaatatcaatatatagcccgcagatgccgatcaaatgggcctgtccaacggcccattaataaaacgggggttaaaaatgtaaatacaagaagatagatgtttggtgagtcctaaaaatcgtaaaccagatttccaaatttctctccgtctcatctttgtctcggtctctctctcgagtgtgtgtgtgtctaaaggcaaagagagagatttgagaaaactgaattacaaaaaaaaaaaaaaaagacaacgaaaaaaaagacatcaaatttgcgaaagttgaaatcgaaaacggtgaatacaagttcccgcc

SEQ ID NO: 10956 - DNA, 3000 bp, Unknown
  misc_feature (1)..( 3000): cDNA_ID_2716970_gDNA_ID_2214467_Annot_ID_133042 3000 nt of promoter + ATG
gaacgcaagcaacacaaagacatcaacgagcaaaaaagtgatagaatctatccaaactgtgagtgatgggacgagcgaggaggatgaagaagagcaagaagaagaaagagcgaaggagatgagtggaaaacagagagtggacaagtctgaagaggaagaagaagaaggtgaagaagagaatgatggaaaggcaatattcaagtggaatactcataagaagaaaaggtctagatactcttttacgtgttcttcgtctgactctagagctcaaagttccaatggaagtagacgaaaatgaagaaggtgaggtgagatctgagtttgactttggtctcttcttctacgtgtttgtgtgtcttcttgccaatgtaacttatcccaatctaacatgtaatagtaatacatgtattttaattggtctctggttaagtttagctttttgttgttgttttaaggtactactaccaatgtatatgtttcttatgtagaatgatttattcgggattgaaaaacccttttcacctaaaagaaaacatacagcatgtaataatttgttcagaagatctaagagaccaattcattttttgagctactctaaatgtgcccttgccaaaatagcatccaaaccactgtctatgagtacaatacaaactaataaaagataaatacactcacaaattcatcttcatcattctctcttaaatcatcatcatcatccacattatatacgttcttatccaaaggtccaagtaactttggacaattcgtgaatatcactttgatttcctcaatgcctttaagagagatcatatttccatcaatgttcaacatcttgaaacttcctttcttgacaacaacacgagccaagcgcaatgctccttctcttctcaagtcattgtagctcatatcaacatattctaactcccaatcttccatactctttacaatctcaacacatccctcatcttttagatcattttcagacaaattcaactttttcagatgtctctttgctgccaaacaaactgcgatagctgtagccgcctcataagttatgttatttccagccatttctataacttgaagagatggagcggagttcttgagagcgtttactaaagctatagcacctccattctctagatttgtataacttagattaattacagtcaagaaactgaagcttgaaaatggtttgctcatagaaactccaacttttatatgagtacaagtctcgaatgcagtctcctctatagtatcctcattggttaagctagtgtccaccatattcaccaggagctcctttatttttttctcccaagtgaaccagaagcccaattcttatagttaaccatagataaatacagtttctattttgaataataataacagaggtgttataggaccatagaacctaaactccaacaaaatctgttgttatttattattgaatttaaaatcttcaagatattgacaagatatgtctaaaaatttgtatcattggttgaaatgtgtaagccatcttaaagagtttaattgatcccattagtagatattttactcaatatgttatgaaaagaatgataggtaattaaatcagaggaattgtataaaatccacttaaaatcaaattacataaggaaactttcgatataaaacaaagtttcctaaaacagtatgatttcatatctatctgtaggtcgggctcttgtatcaaacttaatataaacaaatgggcctcttatcccagtggtgaacaccaaatataatcttctgatgaacaccaaatatttttcactaaatccgatttcattctttgtaaacgaatttgtatttcaacatgttactattttgttctgtagagtttatcaagctaatgtttttttttttatgtagacgcctaatttattaaataaacgttatcttagcatcaacatcctcttattacgtacagctctactcatcctaaatattcattgagatggatgttttccgtattttaacgatagtttacaaaataagtaatattttagagactttttggaccgttgtggtaggccacaaagtaaacgtgtatgagctttgaacaaaatgcaaagagataccaatgttatattttattaatgcgagcacatgaaatgaaatcttgtgattcaccacgagcacgcttagcatccgaaagctttaatgcaatttttcattgaagaagcaaagaaaagtgaggaaacgtaaacactacttaaaaagagcctccaaataatatgaagtttaagatataataattaaagttattaatgttaattagaacaggtttggttatgtagggtttgatgtttgatctcgatccataggtgtgatttttagttcatgatggaccaaaagatttcatcgaggaaatagtgttagaaaaacccacatatatataaaataatatcgtcatatatgtatcaatccattgattggtttcacattatctaccaataaaatgtgaaaaaaatattaggaaatcgaaagattagaattcatatactaaaggttgaaaaatgaaaatagtaaagcttagattgatcttttcaaaccgcatatcaaaaggggtttttcaaccaccattaggtaaattaccgaatcaacaacataccaaaattacataaatcataatatcacattctgatactttgtggaagaaattacaaatgtaataatgttttcgtttgaggaaattgaacgaagacaaaagaaccgggccggtcataattccactttaccaatgtagaccgcaacagaaataacggaataagataataattttttgtcgtcttagaaaaaataaacaaaagagacaaaacaagttcatcatcagctacctctctgacctgttcctctaattctctcattcttcaaattctctggagctggagggtcaacccacccccctccttcttccaacctaaacctctcttttatgctaacttcttctctaccaccgtcgtctccgccgcc

SEQ ID NO: 10957 - DNA, 3000 bp, Unknown
  misc_feature (1)..( 3000): cDNA_ID_3038809_gDNA_ID_2214467_Annot_ID_182879 3000 nt of promoter + ATG
cacacaaaaataaaaagccattacatttcaatcaagaagatatcatattacgagtccaaaagtacctgcagacagctttaaaattatactcatttctttaaaatatatctatttatgtataaatggaaattgtgtttttgtctactatttgacaatataagatactaatagcaaactattgggtatggacaaacaaacagacaataataatttaaatggggtatatattgaaataatatggtataagaaaaattaaatccaagtaatatacttggaagcacgttgagctgtgcgggtttcttggtgttggaccactcgttttggttctagttttctttcttcctttttttttggtatgtcaacgttttggttctatagtttagtctgattattttatcggagtatttactttgaaaagtattatttattatcaactacgagttgcttttttcgttttttttttacgtgaagagtaaaaaattattactaaattttgttaagattagaatttacgatttggtgttaatcttattttcaggttttctgatatatatatacctatgcaatcataactagaagaataagaatcaatagctaaatagatatttgtgtcaattattcctaagttcaaaacttttttttttatagttcaaaacctatcaaaaacatattccctaaacaatgataaacgaaacaaaccaactaaagtaaaccgaaccaagatcttgttagcttgattctatcatcagtttctctaatccgtgactgttgtctgaagaggcaaataactctagactcctcctttagcctcagtttgctgcttctccgcaacagcctttgataatccaaacatatatcttgaaaaaccaaaatatattactattaacaaagtcataagtagtggttcagtgatcaagatctattatgagtttagtaaataatgaagaaagataaccttcttaatggttttgttgaaacagttcttgtgatcatccatttcttaacctcgtctacaactgcacattaccaaattcgaattcgaattgaaaccatgttttttataaaaaaattcgaattacaacatagcgaatataatagtaaaacaaacaatttaattaaacatattttttcttttatgtaatccatttaaatgttcaattgaatcccagtagtcattttccacaagaacaagaattagaggaccaaaagatgatatgcattccatggtgtctcaaaacaaatgggcctttagttataatgcccacttgtctctcctacaatatatgggcagcacagaacattagcaagtggccgcttaacattaaaagaaaaaaaaccaactcaacgaccccgttcaacgatttcatcttcgttctttaatttatgaaaatttacttaagataaacaatttagtataacattttttttatattaattaggttttttaattttgtaagatcttgaaatttattagaacaatttaagagtatatataatgtagaaactggtatgataatacccatatgtgaccaaataaataaaaatttgataccatttgaactaaaaacattacaatttaacttatatggatctgatatggaatatgaatacatataaaagcaaaaaatcttaaagtaatcaacgagtcaaactttaggtggctatatgatcaatataaaaaaaaggtagaagaaaaagaagaaaaaatcttttagaaaaaaataaaacttttaagtggctatgttttgagagaaataaatattcagctaaggaaccatatctgccaaattaatcaagtttgacttaacaataacatgtgtccaaagtaaaacaataacaataaccaaaaaaaaaacatccgcctaattactgccataacccataaatgataaaatgaatgacagattgtaatccgttatgaacagctcaatgtcttcacactccttcttctttatttatccatctttctatgcatttctgtaaaacctaaacatttacatacaaaacttaatccacataaaatattataaccatgtccaagcgacgcatttgctgcatagtttccggaatcatctttgtcctcttcgtaatcttcatgaccgctttgatccttgcacaagtgttcaaaccaaaacatccgatactacaaaccgtctcttcaactgttgatggcatatctacaaatatatcactaccatacgaggtccaactaaatttcactcttacgctggagatgctgctcaagaatcctaacgttgcggattttgaatacaagacagtggaaaacttggtttattacagggatacactagtcggaaatctcacacttccttcgagcacattacctgccaaaggttcagtgcttttgccatgtcctctatttctccagctcgataaatttgtcgcgaatttaggtgatatcgtgcaagatgtattgcatggaaaaattgtgatggagacaagagcaaaaatgccaggaaaaatcactttgttgggaatctttaagatacctttggattcaatatcgcattgcaatctcgtactcggctttccttcaatggtagtggaggaccaagtgtgtgatctcaaaactaagctgtaaatagttttttcaggtaaacatttaggcttaagagagcagtttaattctagctagtttcctgtaataataaagattgtagtgctcttgatcgctgttctttaatcaactccatttttgtgagttcttgaaattaaatgtattcctttgaatttgaaataatgaatttgattcaaaaatctgaattattttatttttacctccatttgaaaaaaggaaaaatagtgtattattattattattattttatgacaaataatttggagaagacttgaaaacacgaaatcaacggatagcgacatcatgaaacagagttagaaaagcgtgcctcctttttttagtatctatctttctctctttcggatcattctctcctctgattccgaatcgggtaaattatt

SEQ ID NO: 10958 - DNA, 3000 bp, Unknown
  misc_feature (1)..( 3000): cDNA_ID_1442595_gDNA_ID_2214467_Annot_ID_182885 3000 nt of promoter + ATG
agaatagaaaaaaagaatgggctttttctgagctaaagaaaccaaaaaaggtgaaataaacgaagaagaagaagaagcagaggaattatttgttataaaaaaggattttctaaaaagagtttcatggctggattcacggttggagttttatttagaattttaaaaattgaatcaaaccactctcttgctcttatacgacaaagacagaagagaccatcttttgtttggttagctagatcttagttcacacttaaaaacgctcagcatcatcatcaaataaagcagacaaaaacagattgtatgaattagcacatggagaaaatgggtccattggatttgatatcttattggctctatcctgatatttccatctctagattagcaattcgattggatgatgtgtataaagctgatcaacttcatgaattgttatatataaaaaaagagataactagctattctttgtgttggtgaaagaataaaaacaaattttcattttacgtcatgacttgagcataacgaaccctaataaattatgatctctcccaactctgctttaatttccactttgggcagaactcagaagcatacgtgtgaaagaaacaatacacaactagtgcagttgggaaaatcataaccctttgtttctctcagaaaccactttgatatttacgagtgatgattgttatgtaacgtctacgacacctacacatatgctagcaatcatgtgttgaaacacgatataaaacattctcctaagttcacgatataactgttttgatttctttcgacgcaatcatgtcaattaatttacacaaactactaatttaaaggaaattttaattgctttaggttttactacttaaagtagtttcatcaatatttttttggttagaggtcatgttgatagatgtcgtataggaaattcactctacaaatgcttactataagtttaggttttaactcaaaatgtttcaacaaaataaaatcatatattttttactatcctattaaaaaagagagagggtctgcctaataaagaaatgcaacaaacataagaaaagaccaagtgtgcgttgaagaacgagaaaaaatggtcttggtctcatgcacatcaccacatgttgatcttacgccgtggtcgtccacttgcctcttgtttctgaatttttgtttagttgtccctgctttttcctattttttcctgtaagaaccctaatgtttccatatgtctcatttcttgttttgcataatttaatgggctcaatgaagttaatgggcctaagagtgctacgacccaatagcacttgaagatatgtccttcaaggacttcctaagctctgttcaggtcaacatgactaactttctgcttcacaggtttatggaaattaatcaaacatttggtgttttaatttgaacttttattttctttagcatgaactcatgagacttcttgtgtcaaagaagcgactaattataaacaggggagggacaaacaacagagattcatatttgagaaaaagaaataaacaaaaaagcatgagaacatgatgaattagtattggctaaatacaggacttaacatgaaggctatggtacgcgatatatgactcaaagaatggtgcagccgcttccactttcataggtagtaacagacacaacatcacaactgttgcagtaaggtggcttgcatacatgctttggtggttcaggtgctggtggaggctttggtttttcaggctctggaggctttggtggctcaggaggttttggtggtggtccaacgctaatgatcacaggtttctgtttaatctttttcagccttgttgctacgcagaccggatccattgtccccaccacggtaagtatactatttccttcatctaatgaaatatgattcacacctgcaccaaatctcatgttcaagatgatatgttaagacttaagagcacatatttcttgagtcttttttcgttcattaccttctatctctgtgactgcttccatgattgcgctgttgcattttccacagtttatatccaccttgatctcaactttctgctcacaaccacaacaaaaactcaaacattcggtgtcggatttgaaaaggaactagtactaggatgtttaccttgacagtcatgatggattagccaagatcgagaaaaatggattaaaggaatgaagaaggaagagaagaagttattaaaaacatgtgaagacaaacagagatgacagattggaataatgttgaagcagttgaggttgtgtttggtcagtattgttaattaaataatcaagagattacaccatctacgtgcttagatgcatgtttttgtataattgaataagaggttttgggaatttgcttagttggtattcagccaccatcttatggacttacttgggacattattgtggatggaatttgtttaatcttgaaaatttatgaatatattattgagtcccatattctatctaattttgtacgttcttgaccccaaatgtttatttatttattttaatattgtatatgttatgatcatgcaaatgcatggatagagaaattccaagccggtttaaggttttggttttatttctatcccggtttggatttagctgaaccaaacaaacctcttgagttctttcaccagtaaacaaccaaaatcatcaatcatttcgagtttggtgattattagagtttgaaggtgtttttgttatggtgagtgtcatcctataaactataggctaattaatgtgtccaacaaaacaaaactctttttaaacaccaaattttaaccaacgatcagaacacctaaacctaattatggcaaaattttaaaattaacacatctatggcccctctccataattatctcttctccattggttttccattggttaaatcttctttacgtagatatataaattgagaaacaatgttaaagtattttctcaaactcatcaataacatcttacaaacaacaacaatcaacaatg

SEQ ID NO: 10959 - DNA, 3000 bp, Unknown
  misc_feature (1)..( 3000): cDNA_ID_3038800_gDNA_ID_2214467_Annot_ID_182889 3000 nt of promoter + ATG
ccagatttaacttgtcgttttttgttatgtactcttcaagattactttggtcgttcctgttttattgtctaggaatgtaaataaaacaaaattaatgctagttaagctcagataaacaaagttagaactagaagatgtgtatgttctgtgtcggtagaaaaacaataaaaacaaaatatttgaatttagatatgtttgggcctttacacgtttgtgtgtgtgtgtttgttcacagtttgtttggatggaacattgcctggatatcacttgcaccgtggacatggatctggagctaatagctggctcattcaattggaggtttagtgaattatttgttgtcgatgaaacactagttaaagtcttcattgttgatgtttgatgtttttgtatcagggaggaggatggtgcaacaacatcaggacctgtgtatacaggaagactactcgacgtggttcctctaattatatggagaaacagcttcagtttacaggaatactgagtgacaaagctcaagaaaatcctggtttgtctcaatctttgtttaagttttgttcatgttagtgtaatgttaatattgaaaatcatatattctcattgtcatgtgctttacttctgcagactttttcaactggaatagagttaagcttcgttactgcgatggcgcttctttcagtggagatggccagaatcaggttgaaatcaatcattttttgagttactagagttcataagagacccattgttgtgatttggaacaacttgctagtttctaggcctttggaactctgtagtctataatcgtcaaggctgttattagccacagagaacgcttgatgtgatcttagttctgtagaattgagcagccattggttttgtgtaacatctgtgaactaatgcaaataaaattctttaccttaactttttcaggctgcacaacttcagtttagaggagagcgtatctggagagccgcaatagatgatttgaaggcgaatggaatgcgatacgccaatcaggttttgacacttaaccttctataagagtctgtatctcttccatagcataatatcaagggcaggaatggatttaactatttatattctgtcaggcacttctctccggatgctctgctggtggtttagcagcaatcttgcgctgcgatgagtttaggaacttattccctggatcaaccaaagtcaagtgcttgagtgatgcaggcttgttcttggacacgttagtttatttctcccaagtcaaagattgtattaaagctagttcattttcccttaccttagtaactactactgactcctttgtttctgtaattatagtgccgatgtttcaggcggccgcacaatcaggaacttatacaatggtgtcgtagaattgcaggttggattcctctttcttcacttgaaagtttcttactttacatttaaagagcacaagaaacttaagaaatcttcttcacaatttacagagtgtgaagaacaatcttccacgtatatgcacaaaccatcttgatccaacctcggtatcttatcttttgttctctcattctgatgctgttgcaaaccggtcattcgaagtcttgtgttttgataactcatatatctgtacagtgtttcttcccacaaaatctgatcagtcaaatgaaaactccactttttatcgtcaacgcagcatatgatacatggcaggttatgttttttctccctttgaaaagtgccacattgctactaaagaacagaaagttgatggttaggctgacaagtctctgtaatggtttttaaacagattcaaagcagtatagctccaacatcagctgatcctagtggattttggcatgactgcagactaaaccatggaaaatgtactcctgcacagttgagattcttgcaaggttgttctatagatcataaaaacttgtggacttcaccctttaaagcatcattgtatcactctaatcgtttaatcttttattcgagaacaggattcagggaacagatgcttagagtagtcaagggcttctcaatgtctagacagaatggattgttcatcaattcttgctttgctcactgccaaaccgagagacaagatacttggtttgccgatgattctcctgttatcaggaaaaaggtaaaacctcactcaaatctttcccacacaaacaaagtaacacacaaggaaagcctgtttccactttctagatcttgactttgtctatggaatgtttgtaggcggtggcaatagctgtaggagattggtatttcgatagagcggaagtgaagttagtcgattgcccatacccgtgtgacaagagctgccacaacttggtgttcagatgattgtttgactatgttctttattctctctcatatatacataccttagaaaatttctttctttcaaaaggaaagattttgtatcctttggtagtaaccaatgcctcattggtatatgattaagtgtatcgtggaaaatcataataaaaaaacaaaacaaaacaaagtttgcttaaaaagagttcaatgtaatcaatcacagagaaatgctctttcttttgttttgttttctaattttctttgcaaatgcaagtagttgatcaaatatattagaaatgtcaacattggtaccaaaagaattcaagcctaactaattcttttatgtattataagtgtccaacaaaagcagataatggataagaataataataaaatagtaaaagatagagagaaagtgaaaagagtaagaatatacagagtgtgttgacaacttgacaccctgtttttgtggggggtgtgagtgacagctatctagtgttccccactttgtgtgtgtatatgtgtgagtgttttttttacacctatcatttgctttcaatttctcccagtcaaaatactaacttcttcaacaacttctggaataataatctgaattcttgaagttgaaccctgtccattacttttctccttcttctcctgccttctgaatcttcttcc

SEQ ID NO: 10960 - DNA, 3000 bp, Unknown
  misc_feature (1)..( 3000): cDNA_ID_2704744_gDNA_ID_2214467_Annot_ID_182881 3000 nt of promoter + ATG
cacctcgtctctttacctagctgcactcgtggccagtttcgtcgcgtccgccacctgttctaaacttggacgcaggccgacgatgcagtttgcttctatcttcttcttgattggtgtcggtctcactgcaggagccgttaacctcgtcatgttgatcattggaagactctttcttggctttggtgttggatttggcaatcaggcagtgcctcttttcctgtctgagattgctccagcacagctccgaggaggtctcaacattgtattccaactcatggttacaatcggaatcctaattgccaacattgtcaactacttcactgccacggttcacccttacggatggaggattgctctcggtggagctggaattcccgctgttatcctcctcttcggttcactacttatcattgagactcccacaagtctcatcgagcgcaacaagaacgaagaaggaaaagaagccctaaggaagatcagaggagttgatgatatcaatgacgagtatgagtctatcgtccatgcatgtgacatcgcgagtcaagtcaaggacccttacaggaaactgttgaagcccgcgagtcgcccaccgttcatcatcggaatgcttctccagcttttccaacaatttaccggaatcaatgcgattatgttctatgcgccggtcttattccaaactgttgggttcggaagcgacgcagcccttctctctgcggttatcaccggatcgatcaatgttctcgccacgttcgttgggatttacctcgttgacagaaccggcaggaggttccttcttctccaatcttccgttcacatgctcatctgccaggttctaattaaatctctcatctctttgtttcttatgcctcaagtaacttaaaggtaggtttcttgtcccagaagtaaactaactaacctcttaaaacagttgatcattggaatcatcctagcaaaggacttgggcgtaacgggaacactcgggaggccacaagccctagtagtggtgatctttgtgtgcgtttacgtgatgggatttgcatggtcatggggacctttgggatggctaattcctagcgagacgtttcctctagaaacacgtagcgcaggattcgctgttgcagtctcatgcaacatgttcttcacttttgtaatcgctcaagccttcctatcgatgctttgcgggatgagatctggaatattcttcttcttcagcggttggatcattgtgatgggactgtttgcgtttttcttcataccagagacaaaaggaatcgccattgatgacatgagggagagtgtgtggaagccacattggttctggaaaaggtatatgcttccagaggacgaccaccatgacatagagaagagaaatgcttgaaaacacgagtctgttgatttgtgtctttttcccctgtttctgttttttttttttttttttgggggggtattctttgattctttcgcacttcttttgtttcgtgggaacgaatagttcaataagaccaacttgttgattcaggttaggtattatcaattaaattccatggaaacaaagtttttgaaaatcacattcctgagtactatatattatttagatgttctcattattaccgttttctctttgctcaatgtcttctaccaaacgcaactgctaatttcacattaggggagagagcgatcttctgcgtttgcagaatcgctacatcaagaactactgtaaaaaaaattcaaattttcgatagtttcaaacgccaatgttaaaatgttataaccctgagataaaaccttcttccaaaatctcattattttattttaaaaatctcaattgggataaattagctagataaaatatatgtgtaatttctagcacactcagataatatgatgattattttttaggtttatcttgaatcgaattgtaatgtaggattgagaattatagcagcttctttgagaaaaagacagcaaaaggaatggagataatctcgtagatgattgcaaaggaatttctccaaaaaataagaatacaataatatctgagataagtgaaagtgtttaccaccatccctcgagctcaacccccaatttatatttgacaacttgtaatgcacgtgattgtattgtcaaataaatgtgcacaaactgtaatttaataacaatgaccgtattatagtgattagggcacttagattaagtggctctgcacttgtatgtttatcttccaacttaccgtgagtcctttttggtcactctcctcatgatgtatacgtagccatcacttataaattccatgtattttgaactaatttcagatttaaaacgcaattcttttttacaacaaagattgaaaattcaaatatgaaggtggcctgtaatccaataattaatattatagctcaacttaagatttagataattattattgacttaatcacttaattgtgagaaatgtggatagagcactcaaacaaaaaatagcaatatgtcaaacatttaccctctagcctcctttgtttttttctaaacttcaatttgtgaatgtcatcagcatcacatcagttttttccatagttgggggaaatattattagttttttcattgaggcaaaagatgaggtactaattctagatttataccacacttaagtagtgaactatataagaaaattgccttttttataattatataattcactatataaatataaacatgtacgcaaaatctaaagtttttaagtattctttaatctcagtgataaaaataattgtcaattctttgttttgtgaaagaattctttctttgttcattcgcctaattagtcgtgtaaatcaaaaataggagattcaccaatgagatgtaacctttcgtacgactcttaattaataaaactcccattaaaaaataaatataactttattgtgctatatatagcgcatcattagcgtgcaatatttctcaattccttaccacaaagctaaggataaagaaaataaatagtaa

SEQ ID NO: 10961 - DNA, 3000 bp, Unknown; identical to SEQ ID NO: 10957
  misc_feature (1)..( 3000): cDNA_ID_2716962_gDNA_ID_2214467_Annot_ID_133044 3000 nt of promoter + ATG

SEQ ID NO: 10962 - DNA, 3000 bp, Unknown; identical to SEQ ID NO: 10960
  misc_feature (1)..( 3000): cDNA_ID_2704744_gDNA_ID_2214467_Annot_ID_133046 3000 nt of promoter + ATG

SEQ ID NO: 10963 - DNA, 3000 bp, Unknown; identical to SEQ ID NO: 10958
  misc_feature (1)..( 3000): cDNA_ID_1442595_gDNA_ID_2214467_Annot_ID_133048 3000 nt of promoter + ATG

SEQ ID NO: 10964 - DNA, 3000 bp, Unknown; identical to SEQ ID NO: 10956
  misc_feature (1)..( 3000): cDNA_ID_2716970_gDNA_ID_2214467_Annot_ID_182876 3000 nt of promoter + ATG

SEQ ID NO: 10965 - DNA, 3000 bp, Unknown
  misc_feature (1)..( 3000): cDNA_ID_3041106_gDNA_ID_2214468_Annot_ID_182903 3000 nt of promoter + ATG
ggtatgttatcgatttgtatgtaattttcgatcaccataattgtaaactaagttaatcactcgtttgccaaaaaaaaaaaaagttaatcacttaaaaaattgccacattttctttccaggagcaaacccttccatgtacgcgtcatgcatcaaaagtcaaggtacttatgattattggcttttgtacttatggaataggacatttcgaccctactgctccattgttcttatgttttcttctgcattgttgtgaccttcaggctcaagcaaatgcttgtggtggggcttgcaaaacctttcagccaaatgatgcagatcatgagcatggtaagataaatcacagtcaaagatgaaatgtaactctttcggttttcattgttggttctaggaatctcttagcgtgatcacccttattgacttttttgtttcattttcagcttccgggagctccaacgctaactcattgcaaagaaatgagaaagccaacagtaaaaggttgggtctctcttgatgtttcaaccattgtcttataaaaacttttggacaatcttgttatcctggatttcttgcttttctttataggagagtttctggaaggaagaatcccgccaattccgaggtattagatataattggcagatcgggagagacatgtcagatggaagacaacattgacaacaagaagttggtctctgatagtgacaatgatgctgaaaaccatataaatgacaatgtccaaagcaaaaggtttatttattcaaagcgattagataacgtaaatatatatttgtatttcactatcttatttttgcttcttcttttttgggttgtttttgctacagatattgtgcaggaagacagagtagcagttctaagactcgagaagccagccaaacagaaaccttgcaaaaggtggttgacgccaaagaaattaagggggatgcaaggtttgtttaactgcctttttccactttcaaatttgggaatagcattcaaagtggatgaagaatagtggaactgacttgtgagtatacactttctctgtttcaaacaggttttctttgacaaagcattctgactggttaaaatctcaagaacctgagccatctgaaagcctatacgagtcaaggttggttaactgtcctttttccagtttcaaattttggactaacatctaaagcctgtgaagactattggaaatgactagtgattttgcactctttgtttcaagcaggttccctttgagaaggcgttctgcccggttaaaatctcaagaacctgagccatctgaaagcttccatgactcaatagagacaaccaagaggaggaggtcggcaataaggttaggctctgtttataactactgtacccttctgaaggttgatatagtgcgatatgatcttttgcaggtctgctatgtttaatatccaagagctgggcgttattcaaaacttgaacggtttacctgatgatcaagagattgctgcaaaggccaggtttgtagaagcacatgttatttccttttccactaacatatccctgaaccaagtacacttatgccatttgcggtgttttctttttctttctttgtggatgtcatttcagatgctctgcacgtgaacagtctaccgggtctaaacccgaagcagtagaaccacatgacacaaaagagataatcgggaaaagcaggttttgtagtgatagataattgtctgtattctgcagtattacagactaaagtgttaagactgttatctaatgcgattttattttccgcaggatatctttgagaagacagtctgcgaggtttaatttccaagagctgggcgtgactgaaaacttgaatggtccacatgatgatcaaacgattgctgcaaatgccaggtttgtagtagcttcacatgttctttccttttccaatcctcttgacttataacttattcataaaccaagtacatttatgctacttcctctgatttctttatggatgtcattttagatgctgtgcaagtgaacagtctatcgggtctaaacccgaagcagtagaaccacatgacattgaagagagaatcgggaaaatcaggtttgtagtgaatatagatcaattttctatattccgttaaagtaaagacgtaagaatttttatctaaactggtatacttgacagagtctcttcaagaagacaatctgcaaacattgaaactccgagagccatcaaagaacctgcaaatccgcctttgcatgatgacaatgttgaggagtctagtcagatatcatgttcagtttcaatggagcttaaaagagaatcaaagaagaaaccaacaggcgacgaatcagaggaaatgagaaaaacaactgttggaagaccttcaaggcaagctgctgaaaaaatcaaatcgtacaaggaaccttcacttaaggagaagatgcgagggggcttctgagtcttgctaagatcgaataccctctcgtcagcctcgtatgtattggattctgcgacttcacttttgttcagtgagctattgctcaatgctgtagatcacaatgtatattcgtagttgcttgtagataaagctagcgagtggtcttgctactgtacatgaagcggattggacggtttaattcggtttgatggagaacccctctgtgtactctgctaagtaaattctttcacaatctcatttgtaaaggggtgaaataatattttcttcatttttttcttacagtaaataaattagtaaaaacaagctctctaattatatcatgggtaataaaactcgagcggtggtaaaacaaaaacctgacagttttgagttgacaacgaaccccataattcaaagattgggagacagtgaaaagtacacaagtgaatcacggtacgcaatctaccgccttatttcttaaaagataattctaaggatttttgttcttttcttgttgttttcctataaaaggtttaataattgttactttaaaggttttgatttatcagataaacga

SEQ ID NO: 10966 - DNA, 3000 bp, Unknown
  misc_feature (1)..( 3000): cDNA_ID_3038861_gDNA_ID_2214468_Annot_ID_182915 3000 nt of promoter + ATG
ggcttcttcatcacaaccgcaaacaccaacttcccggcaaaatccatctcgctctgcggtggataggctaaccactcgaactcttgaaccatcctcgctatcatcaaatgcacatgtaccgtcgccattcccatccccggacagatcctacggccaacaccaaaaggcatcatcttcactccagcaactcctgttatatcggcgtcttcccgccctgataagaaccggtcagggtcgaacttttttggctctgaccagatcttcgggtcttcactaattccgggaagataaaactcaatgttgaccccgacagggatgttatagccagagagagtcgttggttccgttacaccgtgacttaatgtaaagtaagtcggtggatgtcgccggagaatctctttgactacagcttgtaacaagaccattttgtccacgtctctttcatcgaccgcacgatctccaaccgttgatttaatctcatcgtacagtcgagattgaatctcgggattcgctatcaactctgcgattccccactcgatcgccgccccagtcgtgtccgtaccggcattgagaaactccgaacagagcgttacaagatcttcatcagacggcgtcgtttcacttccttcgatgattctaagatcaaagagtgtatcaagatacgagaaagacgataccgttgcggtccgaatcgccttccgtcgtttctcgatgaatccgacgacgaaatctacaagttcccgacgaagcttaagagcacgatttctctcattgtagttaaacggcgttaagatcggaaggtaatcgtggagttttggatcaacggcgtttaatatcgccgtcatcaactgatccatcttctcaattgattcctcttccatctcaactccaaaacagatatctaataaaacacaaaacgcagcgtatctgctgttttgcagaacccagacgagtccatcgttgtctctagcttcagatttgattctctcgatgagtttatccatggcggattttctaacagaaccaaactccttgagccgattcgagctaagcatgttctgaaccatgttccgtctcaatgacctccacacaggtccatacatagcggaatgaactgtgatttcactggagctgaagattttccgggtcggagtttcaacgggtcgggtcgcgaattgtgctccacgttcgattaacgcttcgtgggcgagactggcgtcggagatgatgatcattgttcgagtaccaagcctgagagtaagaatcggaccgtagatctttacgagatcctcgacgtactcgaaaaactgtttcccggagcgcgtgaactgaaataagtttccgatcaccggccatcctggtgggccgggcgggagatttaaatggttcgaattgtgtttccggtacgtaatggttttaagtaaaccggatatgataatcgctagaatggttaagaagacattactagataataagtccagagaaataggagaaaatgataagaatgacatttttaaaaatcttcacctcctctagtgttttcttttagcttcggatgaattgaagaagaagaaaagaggaagctttataattataagactgaaatatttttgtagtaggcaaataatttttgttaggttaatcgtcaatgttataaagccgtaacggtcgttacttgacttgtaaatcttaatttgatgtttgttttcctatttcttcgtataattatctttttaacgccttcgcattattgcttaccatttctatttgcgatatagtttcatttatttacatgtataataatcatattagacgtgtatacagcatgttatagcaatcggttatatgttatatggagtataaaatcattacttagaaacagttagacgttatataatctgatggaaattgagaatgggctcagcattatatggaaacgtttcttataagttactgcaaaaaccacgcaagattgattgcttaaaaagctgatttggccgatcagctcgagaggataacgagttacaatggttgaaaacatataacatgttgtagtgttttttaagtggtaagaggaggcaacatgctatgtgttatagaatattgacttagttaggttttaaagtggttataattttacaaattagtaccgacatatcttttggattgaagtggtacatatgtattgaggaacggacattcgaagagcaccgggaaatggtgcaaaaagtagtgtgtgctttttttttcttttacttttttttttagtcatgtattttctattttcaagtattccggggtttagtgattaattttaatatgctgaaattattattttttaggtaaaaactaatgagaaatatactattataaatcaagggggaaacgattgcggaatttttctgaaccgacagagtgttgcaggtaattttggtcttttataaattcaacttggataattcaggtgacatggctttgaagattattgatgttgatgtttaatacaattcaaattgttgataaacacctgtggattatttagtagtttgtgactttttgttgttaagacggtgacatataattgtgcacaactagagataagttcttctaccgtccaaaatttaactttatataagaaaaacatttcgtacattatatctaatacgaaaaacagtattttgaataatttaactttagttaaatttctaaattagcgttaagataaagaattattatggaaaaatattttggtaaatattttgattgacctcagattattttgccttgattttttttttttttggttgccgataaatacaaatagataacactaaacaaaataaagtacaaaaggaaaaaaacgacaacttcgtaccaaaccaaaacagtgtcgtattaattgattggtgtggcgaaacaaatccgtcgttttgctccgttgatcggcaggtgatcaccagaagcctcgtcaccgtctctttctctcccccctttttcatg

SEQ ID NO: 10967 - DNA, 3000 bp, Unknown
  misc_feature (1)..( 3000): cDNA_ID_3041147_gDNA_ID_2214468_Annot_ID_182926 3000 nt of promoter + ATG
tgtgttggacaattagaggagcctagactagagagagtagaggttgatgtaatgtttacagaagctagtgaagtccattttcagtgtagtcaatagaatctcactttcttgcttttgaagatgttgcaacttgaaatagtttctttctccatctttgttgactgacttcttctttctgaaagattgtatcttgattttcagaattagattttgacattctttttacagatatagaatattttgtaatcctcccaaaaacaaatattcgaaagccactaaataaagacaacccaacaaatataactgtacaaaattgtagaatggtttgacaaaagtatttatcaacttttgaattttgatcatagtgacatgtatctaatagtgatttgttaaaatggataataccgtagaagataaagatggcaataaagtttgtgaataaatgaatttttttatatttccataaaatttagaaaagggatgatactttagattagatgctaaaaacagcagcaagtatttggcatcttgcaagatcggatattgttatacacctccaccaataaaagcacaaatcaagtttgctttattccttttcgttatatcgaatatttgtaaatgtccaatttgttaagtcataactaaaaacatggataacgttggtgttgttcgtttggcagcaaaaacaatggaatttgatcacaaggagctgaaattcaaaacgattgtcttaattgttccgattgatagattctatgcccactgatttaaaatgggcctcatattaaaagcccgtttaaatcagttgtctcgaaaattgactttttggtccattttgaactatgatttggagttgcaataaattgaaaacagcatgtaattcatctcttcaattgttttgtgataagaaaatgatatcaaaaacgttttctatgtaagggtgtgttttgcacaaaaaatggtcagggtgtgtagtctttgtccgtaattttcagcagaatcaggtcgtgatatcagaagctcttctgtgttcacacctattgattctgctagagaaggatccatggcattctctgcatcaagataagcgcaataacctggtacaagcaagtcctttttagataaataaaaagctaatggagtgaagaacaaaagcaagtcagaatcaaactgtaacttcacaaaatcgaatcttagccagagcaagccaaaacgcttcttcttccattcagctacaaagcaagataagagtaaacacaagagacattcgtttagtcaggagcttgggcaaatcatcaatgctactctaaaggagataactttattttggttggattgttgtcctagtttcttcatctgaaaaatcaaatctttctttcttatactcaagctaagaattgttgagaaacattagagacgaagagaacctgagataagtaagagaagaaacggaatctctgaatcggactggcccatgagagtcgacccattccccgttcttcttcaagcggctcctccttcgctgttcagtttcaattccacagttctgtcttcgatctccagtttccgccatggtcattgtccttaaccagaagtggatacataaaaatcgaaaaccgtattaaaccgatcggttcaaggctaatggaatctaatttaacggaacctattaataatctaattattgggtaatgttagagtacaagcctattaacaaaccctaactttacccatataaattcttgcacacaagtttactttttctttttctttgctttcttctgtatttgccgccgcttctctgctctccagctccggtcaatccgtacaggtacgttctggttacattcaaaacggcacttcaccataaatgaaaacataggagaatttcataaaagaagttgtgaaattcatctcttttaattatagatgcagctcgattttggatctctcttgatgttcctgcatctctctagattgtatcaatacccaaatgttgaaatttaacggcataattgaaattgaatcctcatttgtagttactcgagactcttatgtcaattgttggttctttcatagtttattagtcagaagttgatgtatctgcatttctctgatttgtataaagtagtataatgtgaatgttctctgatggtttgtctgaatttgggcaggtaagtcaaaaagttgtgaaagatgggtcgtgttcgtaccaaaacggttaagaagtcttcacgtcaggtgattgagaagtactactcacggatgacactagacttccacaccaacaagaagatcttggaagaagttgcaatcatcccatcgaaaaggctacgcaacaagattgctggattctccactcacttgatgaaacgtatccaaaagggtccagtccgtggaatctccctcaagctacaagaggaagagcgtgaaaggcgaatggactttgttcccgatgagtcagccattaaaatcgatgatgttaaggtggacaaagagacactagagatgcttgcttctttgggaatgtctgatattgctgggatttctcaagtggagacacaacaagctatggcacctgctgtgtttggacgtcccgcaggaagataccaacgctaagtttattgggtttcaatcaaagatttcggagacgagagtttggtttattggtctagtatggattcaacatcgtttcctttgatttaagattaatgtcgtttcctttgatttaagattaatgtctggaatttatagcttttgctttgttttaacctttttttttggtccattttgaactatgatttggagttgcaatcaattgaaaacagcatgtaattcatctcttcaattgttttgtggtaagaaaatgatatcaaaaacgttttctaaattccaagggtgtgtagtctttgtacgtaatattcatgatgagtcaggggcataacggtccagttacttattaatttcccgaatacgtggaaaaataggttttggctcgaa

SEQ ID NO: 10968 - DNA, 3000 bp, Unknown
  misc_feature (1)..( 3000): cDNA_ID_3038846_gDNA_ID_2214468_Annot_ID_182930 3000 nt of promoter + ATG
tccccagttgagatccctggtgttagcaatatggatttcttgaatatggcattcaatgctcggaaaagaaagcttggtcagccagagcttgatccaatccaggtgccttatcgaattaaatgacttggatttggtttgcactgtttcttacttgttgttgtttgctaaatggtcccaattgtagaactgtctatgtattatgtcttactgatatcacatggctcatgcagttctacagccacttggtatcaaaactcgaagttgtgaatatgaagaccgattttctcaacagaaatgtcaatgaaggatttagtggtggtgaaaggaaacgcaatgagattctacagttagcggtaatggttctgcttcccttgtttctcagtatccataaggactgcatatgataagaaacaaatgtgattagagaaggtagtggattactaagcttgttccatgctacagtgtgcaaaaccacaaggctaatagttaggaatttcaggatatctgggtagattagcttaagcagttacaggttttaccataagtagacgcggttattgcatggcagttagtattctattacaagtatttgactgcagttttagctaaaaagacatggcatgttatatgtcttcatatctctttatattttcctgatcttgaaatatctgcctcccaaggagtggtcatttctggtttatcgataacatgagaacactattagtctcctattctttgtaagcaatatatggaaagaggtcatggaagtacgctaatgcaacgttttcctgtccttgcaggtccttggagctgagttggctatactggacgagattgattcagggttggatgttgatgctcttcaagatgtggcaaaggcggtgaacgggcttttgacaccaaaaaactctgttctgatgataacgcactaccaacgcctacttgactacatcaaaccaactctcatacatatcatggtgagcattgttgccaaaccagccttctttactggctacacaatgatcatatatattttggtaagctcatgtatgtttccttgggtttcaggagaatgggagaatcattaaaaccggagacaactccttggccaaactactggaaaaggaaggctacaaagcgatatccggttagttatcgcggatcatacatataacctgtcttccttctttgagagaccatggttattatatgggacaaatacaatggaagctaaagctgatgattggaaactgaaatctatcactacaatctttgacccgtagttttggtttgcaatttgcatgacaaactactttattgggatgtgaacagtattccacacctttttgtaactaacaagtttaaaattcagttaataaattttgttattataaatgctcttataaagtttgagactttaagtggatcaaatccaatcaaacctagtggttacttacattacttgagaaatttgacaaaataaaatttaatttgattattctatcgcctgctgctgctggaacgagttggtaatagaaaacaaattcataatttatgacaagaagaacgcaaaattcgctgatgattattaaacccaaacgcgtttttcaaactcgttcaatcaatttccttcatcatcttcatcttcttcgtaattgacttatcgaacaagattacacctccctttagctttttatgcaaatgtagtgcttttaagcattctctcgatttccctcccttattttccgacaaataccaaaccaatattgttccttttcttttcaatcccagatcgatctctttgttttcagacaatttctgttgtctggattcggttcattgcatcgttctttgtgttgggttcgtttaaactttcgattttcccattttgaaaattttgatttttttcttgtggcagattgattgttgttgtgcaagattcatccgttgcatcgacccgagtagggtttttgcttgttccatcggtgttcggagtttttaaaatcattgcctgatccggagtgatcaaatcctatatattgtcgttgcacaagagaaccaagtcttagattataaagagatttgactttcacttttagtgtctatgatcattaggaatgagatcagatcaggtcaatttgtgttcttttgatcagatcttgatgtggaaagcttgatgctgttgattataagtagagagatattttgatgggtaatgcttgcgttggaccaaacatttctggaaatggtttcttgcaaactgttacggctgcaatgtggaggccacggatcggagctgagcaagcttcttcttcttcccatggtaatggacaagtttctaaagaagcagcttcagaaccagctactgatcaagtccagaataaaccccctgagcctatcacaatgccaagctcaaagaccaatcccgaaactaaactgaaacccgatctagagatccaacctgaagaaaagaaggagaaagttcttgcagaagaaaccaagcagaaagttgttcctgaagaaagtaagcaggaagttcctcctgaagaaagtaagcgggaagttgttgtgcagccggagtcagcaaaaccagaaacaaagtctgaatccaagccagagacaacaaaaccagaaacaacgtctgaaaccaagccagagacgaaagctgaacctcagaagcctaaacatatgaggagagtgtccagtgcagggcttagaactgagtcagtgttgcagaggaaaactgaaaactttaaggagttctattcattagggaggaaacttggacaagggcaatttgggacgacgtttttatgccttgagaaaggtactgggaacgaatatgcgtgcaagtcgatttccaagaggaagcttttgactgatgaggatgttgaagatgtgagaagagagattcagataatgcatcacttggctggtcatccgaatgttatatctattaaaggtgcttatgaggatgttgttgcggtacatcttgtgatg

SEQ ID NO: 10969 - DNA, 3000 bp, Unknown
  misc_feature (1)..( 3000): cDNA_ID_2990859_gDNA_ID_2214468_Annot_ID_182928 3000 nt of promoter + ATG
agtagagaaaagtcatatcagcatgcctataggggagaaaccacttactccatctgaagccatgccatctacatcatatatttctaatggtgacgcctctcagggtacttctaatgggtctctggaaactgaaagaaacaagtttgttgctttccccattgaagctgttcagcaaagtaatatggcctctgagccaacttcaaagttcatccaagggactgagaaatcgagtatttcttctggcaagccaacctcagaagagaaacgtatccctctggaagagcctaaaaaacctgctgctgtatttcccaatatctccttttcaccgcctgccacgggcttattaaatcaaaacagtggtgcatctgcagacatcaagttagaaaagactagcaggttggtggcatgatatttttcctctcagcttgataggcttttatatcactacttgtgcctaagtgagcctcatccatattggttatgattttttttttctggtttactcgcttccgactctctttcttgatgttacagcactgcgtttggagtatcagaggcttgggcaaagccaactgaatcaaagaaaacgttcagcaacagtgcttctggagctgagtcatctacctcagctgcaccaaccctcaatggtagtatattctcagctggagcaaacgctgtcactccacctccgagtaatggctctcttacttcaagcccttccttcccaccttctatttcaaatataccttctgataattctgtgggtgatatgccgtccactgttcaatcttttgctgctactcacaattcctctagtatatttggaaagttgcctaccagtaacgacagcaactcacaatcaacttcagcatctcccctctcttccacatcacctttcaagtttgggcaacctgcagctccgttttctgcgccagcagtgtctgaatctagcggtcagatctcaaaggagactgaagtaaaaaacgccacatttggaaatacaagcactttcaagtttggaggtatggcttcagcagaccagagcactggcatcgtttttggtgctaaatctgcggaaaataaaagcagacctggttttgtgtttgggagctcctccgttgttggtggcagcacattaaacccttctactgctgcagcttcagcacctgagagctctggaagtttaatatttggtgtgacatcgtcctcaacccctgggacagagaccagcaaaatttctgcgagttctgcagctactaatactggaaatagtgtatttggcacttcctcttttgcatttacaagctctggtagtagcatggttggtggtgtatctgcaagtactggaagcagtgtttttggattcaatgctgtttcatcagcttctgctactagctctcaatctcaggcctcaaatctttttggtgctggaaatgctcagacgggtaatactgggagcggaaccacaacatcaactcaaagcatcccctttcagtttggttcatctccatcagctccttcatttggtttgtctgggaactcttctcttgcatcaaacagttctccatttggattttctaagtcggaacctgctgtatttacttctgtgtcaactcctcaattgagttcgacaaactcctctgcaagctctagtagtacaatgagctctcccctatttgggacaagctggcaagctcccaactcttctccaaactctggtccagtcttcagttcctcgttcaccacatcttcaactcctaccaccttttcctttggaggatcttctgctgctactgtttcgagcactactactcccatttttggtgcatctaccaacaacaccccgtcaccttcacctatctttggtttcgggtcaacccctcctaccactccccagcagccggtatttggtaactcagggactccatcacagtctctgtttggtaactcaactcctgggtttgcatttggtgcacctaataatggaaatggtatcaacaataaccaacaagtgagcatggaagacagtatggcagaagacacagaccaagctaatagagcatctatggtagccccaatgtttggacaagcagcagtctcgatgcctcaaccaaactttgccttcggtggaggagcagcaacgcagcctccatcaatggcaaaccccttccagtttggaggccaaccaatggcaagcacgttacagaacgcatcacctttccaggcatcacagagtctagagttccaaggaggtgggagcttttcactaggcagcactggaggtggcgataagtcaggccgcagaatcttcaaagcaaagaaatccaccaggaagaaataagaaaaacacattgttcaagagtcattttatcagccttatggtctttttgttcgctatatactccgggaaccttggggattacgagcatatcgtcgtttaatgaaagaggtaaagtatgagaatgtgtatcgtttatgctcttgatcgtctctgtcattttagtatgagtcaggattttgggggtcaaattgttcagggttataaaagttgtaggaaagttttgtaattttcagaaagtactggtgtctgtaagagtaatatagctctgtgcctctgtctttcgcttctttttctttttgtccttataaaaaaacacactttattgtagctgtttgttaaactcttttctctcttcagttctggttttagtggtttaaattaataattgcctcattacaacttggtttacccaaatcaaatcgaaccaaaccaaaattgaataaatccaattcgatgatcttcaaggaagcttcttttagttgaccaattccattaaatccaatccaattcgatcaagtaaataaacaaattctcaatccttttattagagaagccttcttctccaaagtctcgatttctctttattcttccaaattcttttgtctctctgtatcatccaaaattcccagatttattcacggagttagaagaagaagatg

SEQ ID NO: 10970 - DNA, 3000 bp, Unknown
  misc_feature (1)..( 3000): cDNA_ID_2034861_gDNA_ID_2214468_Annot_ID_182916 3000 nt of promoter + ATG
gttaccaaatttggaaggcccgcatgcaaaagtatatagatcccaaactctctctggcttggtacacttcagtaatgcatcaaacacattacgtctctgcaaatgtaagttttgaaggttagacagaatttacggagaaatgactaaggcagcataagaggaagtgagagtttcacctgcttggtgcgaggacgaaagccataaacaattatcctcatgtctttgcctgcaagatgaaagtgatcataacatataatgtcaagtaaagatacaagacgcatcaaataaagatgtaagagaagtagaaaacacttcaaccaacatcactgtgggaagatgtccattgtccaagataatattgggacgtcaagaatcaaggaaaaaaaacatgaaacacaattcaacgtcatagcgaatattaagctatgacgtgaaaaccaggtgaaacaaaacttaggggaaatcaaatctagcaaacaataaaatccggtcacataccagtgacctgtaaaagacgtcttggtggaatcttgtcagactgacggggacttgattgaactttcagaacctatgaacacatcacccatcaatcagaaaatgcacagacttaacaatataaaaccctagagcctaacttaaatagtattaatcaaatagctctgtccccaggggtgtatagcaactgaccattttgttaaacttctcaatagttgccaatggaattgtaccaagtggaatgacttttctggttccttcactcttcacaaaagagaaacaaagaatatattgatcaacagtacttaaaaactaaaggcctaatcctgaaatagtgaaatataagtaagttcaagatctgtataattacattggccagaaaaaatagatcaaatgcatataagaaacagaggaaagataatatcataccaaaaaaagaatacggaaattagtcaccaaaagggttcctgcctcatcggtgttaataagcacaactccataaccctgcaaataaagtccaaaatcatattacttcaacaacatattcttcacactagtatcatggacaaatgcaaattgcataccaagtctcaaattcaatagccggatatggtaacaaaaattcaaataaaagagacactttgaccaactctacctcgacgatgaccctctccgattccagcaagcaactcaaattcgagaaagaacctgaccctgaagttgactgcgaccaatcaaaagagaaccaaagcagaaattgtttgagcaatcaatttcaatacaataaccaaattatgagctttttggatacgaaaaaagaaacgacattcacgtgatgtctgtgtaattgtgggttaaaaggggaaaaagcgtgaatcaggagagaattgagagcaaattacatcgagtttggtccattcaagcgtgtcccaactaccggtaccatccatcttttctgattccgaagaataatcacgcagcgaccttactcgcccagacggtggtctcggcggcgtcatgaaaaaggggggagagaaagagacggtgacgaggcttctggtgatcacctgccgatcaacggagcaaaacgacggatttgtttcgccacaccaatcaattaatacgacactgttttggtttggtacgaagttgtcgtttttttccttttgtactttattttgtttagtgttatctatttgtatttatcggcaaccaaaaaaaaaaaaaatcaaggcaaaataatctgaggtcaatcaaaatatttaccaaaatatttttccataataattctttatcttaacgctaatttagaaatttaactaaagttaaattattcaaaatactgtttttcgtattagatataatgtacgaaatgtttttcttatataaagttaaattttggacggtagaagaacttatctctagttgtgcacaattatatgtcaccgtcttaacaacaaaaagtcacaaactactaaataatccacaggtgtttatcaacaatttgaattgtattaaacatcaacatcaataatcttcaaagccatgtcacctgaattatccaagttgaatttataaaagaccaaaattacctgcaacactctgtcggttcagaaaaattccgcaatcgtttcccccttgatttataatagtatatttctcattagtttttacctaaaaaataataatttcagcatattaaaattaatcactaaaccccggaatacttgaaaatagaaaatacatgactaaaaaaaaaagtaaaagaaaaaaaaagcacacactactttttgcaccatttcccggtgctcttcgaatgtccgttcctcaatacatatgtaccacttcaatccaaaagatatgtcggtactaatttgtaaaattataaccactttaaaacctaactaagtcaatattctataacacatagcatgttgcctcctcttaccacttaaaaaacactacaacatgttatatgttttcaaccattgtaactcgttatcctctcgagctgatcggccaaatcagctttttaagcaatcaatcttgcgtggtttttgcagtaacttataagaaacgtttccatataatgctgagcccattctcaatttccatcagattatataacgtctaactgtttctaagtaatgattttatactccatataacatataaccgattgctataacatgctgtatacacgtctaatatgattattatacatgtaaataaatgaaactatatcgcaaatagaaatggtaagcaataatgcgaaggcgttaaaaagataattatacgaagaaataggaaaacaaacatcaaattaagatttacaagtcaagtaacgaccgttacggctttataacattgacgattaacctaacaaaaattatttgcctactacaaaaatatttcagtcttataattataaagcttcctcttttcttcttcttcaattcatccgaagctaaaagaaaacactagaggaggtgaagatttttaaaa

SEQ ID NO: 10971 - DNA, 3000 bp, Unknown
  misc_feature (1)..( 3000): cDNA_ID_2033137_gDNA_ID_2214468_Annot_ID_182913 3000 nt of promoter + ATG
tgtacacaaactcgctaagctagctgtatatttatgtaattaattattacatttgctgagtaattttacggcaaaatatgacatattttggacatgccacgtagaaaagcatgtgatgatgatatatactgtatatagagtagatctgtgtaagtgagtcagtggtaatatctaactaaaaaagtacagaaatggaaagatctatatgatctctctcgcaggatctcaatctctggcccttttttttgtcaacccttcttcctctcttattatgttcttctctctcttttcttttggttactgtaatttgtttttttgtttattgacattgacacgttttcttgcttcgatttttacggaaagagagatatgtatatgaggaattaggataagtcgatgtaattttgtaaggccacgaaaccatacgatcacaatcaaacaatctgtagcatttagaatccatcaattataatcgatgttgaagtttcggtggtccaatatacttacggttgttaaaactttggccaaaacgaatcgtctaaaagcaataccagatttaaatggaatgtaaatggaaaaggaatcgagaaataagaacaactgatcttaaagtctcacaatgtcctacaaattaaaaatgcacttgtaataatagtaataataattaattatattaaaaaaactccttgcaataaaatcataatttatgtaattcaaaatagatcttgtctgaattagtttcaacatatttcctagaaatgcaaagattaatgaacaaaagcaggacatatataataaatcagattagagaacttctagatctagttctattacttagtcaatcgattaaaagttctatacactcagaaaaaaaaggatatatattcataatatagacagtttaacaacttgagttgaaggaaagattctcacatatattttcgaggcataagacacgatggccctaccattacaggatgataacaaggaacgaacattgtagacacaagaatcactgttacaggttggtaacaaagaaaacgaacctaaattgataagaatgaacgtgtcttttttttttttttttttggcaatccaaattttgttgcatatgcataggattccaaatcatttctgtttgttcttttgtttcgaccgtgtttttttgttaactttaaattatataagttagatgcataaaattagtacacacccatatagaagaagacaaataatcatgtgtctatcacatgaaattaaactgtttgagtatatatattagaccggaatttaatatgtaattttactaattaaaaaatgctttcaaattcgtaataagtcgcaaatcaaatttcgttgttacatttttaaaagaaagtatttcttcttttcaaggaaatattttttaaacaagatcaataaaatacgtattctaaatatagattaactctcttgttccatgtgtatctgtgtttggtgatgtaaagagctcatttacagacatttctttttcttgtaaagcggatatattgtaatgatcgcatgtgaaacgtaattacgtaaagcgacatgcaaatctgagttatggtatattaattacagtttttgtattgacgtgaattttaaaaatgaatttgtttagcatccactgccgttttaacattttattcgttgtaatgtacaatgtcgacaaagaaagcaagtgaaacgtaacgtgcatggcctccaaatcatgaacttattcgtaaaatatcatttctataataatatagtttagctatatatcgcaataataaatagaaaaaccataaaattccaaagaatatattaccaatcgacaccaaaaagtaaagataagggtcataatgggctctcccttggatggtttagaatcttcgtaaccaattgtctccctagtccctattatagctttgagagatgaacgagtaatactgtatcaatcatacaatatatatatatatatattaatttgacatatatattagagctaaccaaaaacaaatatcgcaatagcttagattagtgaatgatagttaattgttacatttgataactcattattagaccgccaagagtcccatcaaactagcaggttcatgcggccacgccgggaccaagatctggttcttttatttcccataacaagaatctttttcattttatttatattatagagaacttttaaagcagtctggttatgttggatctggaggaaaatcaggaaagtacatttgattttttaaatgtactcatatgaaaatgtaaacaaaacatgaataatcctttatatatgggagtgggacctagattttttttgttgctatttaacaaaacaacatttctccaacattctgaaaaacaggatcacttgttttgtttcactgtacagtagaagagttttcactaactagtaaactaattaattagtgatttttatttttttttaatcaactcaggcctaattgagataacttgttcgtgggtatcaggcccaatataaagtattctaaggcctactcaataatatctccaatatttttattttcggacagatcatttatttatttttgtaatattttgttttttcttctcgtaaaaccctaaaatatacaaaaccctcaaattcagtctaccagcgaggatcgatgtcggagctcacagtatctcctttcacgcattaactcaatttatctgctaaaccctaaatagcttcacgccgtttttctaattctcaatcaaagcttcaccgccgccgtgtgttgttctttctccgagtcgtgttctctaatctcaggtgaagcttctttcttcaatttgcctttggtttcgtttcgaaaaatcatgtcttttctaagatttatctccggtgctaatcagaattagtcggtatctaatgggtttctgaattatctgtctggtttggtatcagtgtttaattgtaattgagttgtttggttcgtttaggtgataaggatcaag

SEQ ID NO: 10972 - DNA, 3000 bp, Unknown
  misc_feature (1)..( 3000): cDNA_ID_3610508_gDNA_ID_2214468_Annot_ID_182908 3000 nt of promoter + ATG
agtgttttcgagattgaagacaagggaccaagaatggtacttctacagtgcattagataagaagtatggaaacggtgctaggatgaaccgagcaactaacagagggtactggaaagctactggaaaagacagagaaatccgccgtgacattctgcttctcggtatgaaaaagacacttgttttccacagtgggcgtgcaccagacgggcttcggactaattgggttatgcatgagtatcgccttgtggaatatgaaaccgagaaaaacggaaacctggtggtactgtattgtccaaattactttcgaatttggtttatctgataatttccaaaagatctcaattctttgtttgggtgcagcaagatgcatatgtgttgtgtagagtcttccacaagaataacattgggccaccaagtgggaacagatatgctccgttcatggaagaggaatgggctgatgatgaaggagctctgattccaggaatagacgttaagctcaggctagagccgccgccagtagccaatggaaacgaccagatggaccaggtttgtgatttcttcttactctggcttcattacccaaaccttattagtttcattcaatatttcttgtatgcaaaaaactctgttgaaatactctctttcttagttttccattgggctgagtgagtttatttaactgcattagtctatttatgaaccaatctactatttcaacgttatttagtgcaaatgtacaaatttatctgatgcatcatttctcttgtttcacaagatattatatttattatctgcaaaactctgtgttgaagtgaagcttctcctaataactgtttcagcgggctgtgacgctagtaactccatttagtctgtaaccaactcttgtagaaatcaaccttataggtttatctgatgaatcaactctcttgatttagaagatatctgaattttcggtggtcttttttttttttgtttcttgggctttattcttaatcatactgattacaagatcgttcaaactttgcatcctcatttgaccagcaattttactgtgcatcatatgaactcacttaattgatcagtaaatgttgaccagaagtagaatgatttgttgttttagtgaaaatgcagttttaatccttcatcagcaaaattgattgaagcatttggtttcagataatttatgcgtcgtctggggttcacttgtaatttgttgtaggaaatccagtcagccagcaagagtctcatcaacatcaatgagccaccgagagagacagctccactggatatcgaatcggaccaacagaatcatcatgagaatgacctcaagccggaggagcataacaacaataataattatgatgaaaacgaggaaacactcaaacgcgagcagatggaagaagaggagcgtcctcctcgacctgtatgcgttctcaacaaagaagctccattacctcttctgcaatacaaacgtagacgccaaagcgagtccaacaacaactcaagcaggaacacacaggaccattgttcgtccacaacaacaactgtcgacaatacaaccactttaatctcatcatctgccgctgccaccaacactgccatctctgcattgcttgagttctcactcatgggtatctccgacaagaaagaaaagccgcagcaaccgctacgtcctcacaaggaacctttgcctcctcaaactccacttgcatctcctgaagagaaggttaatgatctccagaaggagattcaccagatgtctgttgaaagagaaactttcaagcttgaaatgatgagtgcagaagctatgatcagtattctccagtcaaggatcgatgcgctgcgtcaggagaacgaggaactcaagaagaacaatgctaatggacaataaaggctctaaaaacatctctccaggttacttcttattgcccttcgccttttatttagctttaatctccctaatactatgacccatctacatagctcctctagacagattgcgaactgtgtgaatctctgttgtaacataggataaaacggattcgagcccctgagctgagtgttttatccttcttctttttttgtgtggatgttcttgcatcttttgagaacattttttaggttgctccattgtcatatatcatctatctatctagtcttttcagacaaaaactatctttaagttgtctcgagaatgttgtcttcataacacactgagccttctctggggtagtagtggttaggtacgagggcataattgtcatttcctttgcattatcatttagatttccagacaagaagaactttctttgtttaaaataattgggaattatgttcggtctccggtaataccgtggttaatggtaaggatattttcggctaggattacgaatgtggatgcgtcagcgacgttagaagactttcgttacacgtaatttgcaataattttaaaaaagcgaaaaagtgtttggtacgattttttcaacttcaaatatattctctatttatttactctattcaaacaaaattgcatatagtatagaattttagtcatcttgatatttattgaagtggataaatcttcatttgcgcgaaccaaccaactacctcaacaaattctagagactttaaaattgatgactagtgcaagacttccacgtgtcagtttaataaagactgtcacccgaaaacagtcacagccagtcacatgatatgctctcgcggcacactttcctggaatattaaaacctcacggcgtgaaacttctttcgcacattttctagctacggtcgcttagctccgattggttcgtcgtcaccatcactcgtcttcaacgatttgcttcttttttttttctctctatttagtcccattttcctcaatttctaaaccccttatttcgaaatcattgttttgctctttcttttgattcgaattcgacagaacagctcttttaagttattcataaaccttgtgtttgagttttggtccatcgagtat

SEQ ID NO: 10973 - DNA, 3000 bp, Unknown
  misc_feature (1)..( 3000): cDNA_ID_2034846_gDNA_ID_2214468_Annot_ID_182909 3000 nt of promoter + ATG
catgttacctggcaggttacaaaacatgttacctggcaggttacaaaacaagtatgaaacatcttttgattttgaagcacgaaaaagtaaaatatcttattatcttttatggatcaatttaaaacatgtgtgttgaatcttgtcatgcaggtgctaaactttgtttgaaagagaagaggattcacgagcgaacagctcaatataataggaattgtcagcttctcttacatgaagctgtgagttttttctttttctttttgtgtcttactaaattatttttttattaactactttttaagcgatgaattgaatttattgtcactatttttctttcttcttaattatacagctgattttgtgtgaaagtagaaaagaacaaatgattgaagctatgcgggatggagattttactacgcagaagacaatgcaagtttttatttatctttgtttgttccttttaatcttaacttatttgtatcaatctaactcatgtattatcctacgtctatctagactgatcggacggacataatgtgtatccatatttcttggctacgcgtgtccaccttttagagactatgcctttaggtagtagatgttttactacaaaataaacatatttagtcaaataaaataaaatttgagagaatcttctacataagtagctcacagacccaaccaaaggaccattgaataccatatatatatagatacacagacatataaacacacaaatattcgtgtttttttcaaactgtgagagaaaaagaaagagagaaagagatgggagagattgggtttacagagaagcaagaagctttggtgaaggaatcgtgggagatactgaaacaagacatccccaaatacagccttcacttcttctcacagtaaccatatatacttagttatatataagctctttacatgttgtttatatatgcgagctaatgaacaatataattgtgataggatactggagatagcaccagcagcaaaaggcttgttctctttcctaagagactcagatgaagtccctcacaacaatcctaaactcaaagctcatgctgttaaagtcttcaagatggtaattacttactttccgattttccacatctacatatatgtgaatcacttgcatatactgtatcattatcttacacttccttaaaattgaaagtagaatgtttcattatttacagctaagaatctttatttactcattatataccatttatatataatagaaaatagtagtctgaattaacttttcttgtcatttattgacgcagccatgtgcacacaagttgcgattttgtttgaacttggctagttggctttgtcttcttctttgagaataaaaatctcatactagtaaagaatactctgtgatattttatttttaagaacaaacatagatttctctgtcaataaagaattgttactgaagaatccaagtggttcgggtcgctttatggatttttacttttttgctaatcttattataatagaaccatataaaccaaattccgtttactttttaaatttgggtttatgacttggtttggttcaactcacttttggcttctaagactttgcataacatgttttagacagacaaaaaagaaaaagactttgcataacatgtatgaatttttattttattttgtttgtgtgtagacatgtgaaacagctatacagctgagggaggaaggaaaggtggtagtggctgacacaaccctccaatatttaggctcaattcatctcaaaagcggcgttattgaccctcacttcgaggtctgttatgttaaaaaaaaatatatatacacattaattttggctgattttgattttcgatttgaacgcattttaataaggtgtgaatgtgaaagcaggtggtgaaagaagctttgctaaggacattgaaagaggggttgggggagaaatacaatgaagaagtggaaggtgcttggtctcaagcttatgatcacttggctttagccatcaagaccgagatgaaacaagaagagtcataaaaccctattgatcatttgggtatcgcatacatgaatctattccacatacatgatacacatatacgtgtttctgtgtgtgtactatgttgctctctgactttctacagttcactattttaattataaagaaggatcttgtgctatcattagggagatacgtgatactgtagttcttcttgaaattgttattcgtgagaaatatcatggtttgaagtatttattttcacaagatggatgttaacgtggggatcattttacaatcattctacaaataattttacttctccagacacaagattttggatctattttagttcaattttttctttttttaaaaaacagtacactaaaactattttttatattaataatgtggtattagtctgatgcatgataaattttatgaattttaagatttgccccggtaaaaaagataatacacaatttcctagtaatatgttatatataaatctatctacaatgttactcttttttctgaaaatgatgaaattttgtgggccaaatagaacaaaaattcttgaaacagaaaattagttttcattttttaataaaataattatatgtattggaccacaactagacatttataattttatagtaattaagaagcaaatatttgatctaagtaaaatataaagaaaagcaccatatattaaaattatgaaagatttcctatttataaattaagatatcatattgaaggttaattttaagttcataaatggaatagaattcactaagaaaataattaaatttaaaataattgctaacagtaagatctcatcggataaaacttgtataattatgtttattcatgaatcatccttgcacctacgtatccatcttttccatcatctcatctatatatatgtacatttgcaaagctgagaagaaaaaacatcatattgtcgattgagcctatctctttatattatattgggagatg

SEQ ID NO: 10974 - DNA, 3000 bp, Unknown
  misc_feature (1)..( 3000): cDNA_ID_2026721_gDNA_ID_2214468_Annot_ID_182910 3000 nt of promoter + ATG
tacataagaaatcacaattacataagataccagtcgaaaaaacattaatattgtgtagcgtttcgaaaatatactctgtttgaaactttgaatataagcgggttttcactgtaagatgttaaatttagaaggatttttttttaaatctatcgtaatattaatgacagcaataaattgggttatcaaaaatgctaatggcgtttaaaagtttttaggtgttaatttggtaggagatgtatcagttgcgtgtcctacgtgtaattgtgaaagcaacaacgcaaagaaaatgaagccttgatgaaaatatatgtttaaaacaaaattaattgacggaaatagtatgttttaaattaatgttctaattgtacaatagaaaaagcatgtacatgtacaaaactcagttatattgtaatcaaatttattgatctgtaattcatgcttgtttatgacttttttgaccggccgatagagcggcggacgcaactttgggatctgaagatattaaaagaaaatgttcctaaagaattctaatatcgaagttgattctcatcgtttcttactttatttctttatgatctcaaaatcatcaccctttagaaaatttgtttcatgaccagaaaatatgcaagtgttaacatgttttaatttagactgttttcaaaatttacagttgttatttagtaaaatttagcaatgaatacaaacaaaacgatacaccaaattaatgtttgtagtatttactatttagtaaatgcatggtactgtggtagactcgctaagtaaattgcatgtgttacattttaatatgtaaccagtaacctcatgcatgtgtatctctttcaagtttcaacaacctttttgttttttagaagtaaaaacttaaaattctttaattggcggacagaaagataaggcgattactcaccagaccaacaaaattaaatggaaattaaatacatatagagtaattaaatggctctgtgaccaaaacatggaattaatgggcgttattcattagaccagtaaaattgactggaaattaaatatatatagtaatgatacgatggtcctgcgacgaaggaggagccatgtctacgcaactcatccaataagcaacacaagctattcttttttacttctttcatgattgtcagtttcttctttcatttattctatcattgcttgagatatgtattctttaatagaagttaaatagtgtgtacatataccatgttgtcactttttaacaaacaaaaagtcatatggtatcatcatcatgtcgcatgaagaggagctacaacatttcttgattcatgcgttacgtggtctaacaaagggaatgtgatgaattgtcgctctgggagtaatttcgaaacgaaagttttcttacctaaaactctttattaattatctgagtttctgtagagagaaatagcatcaatttaaagcttgaaaagtttaacacatctttgacaaaacaaatttaggaagaccaaaaccaaaataattactatttctctctatctgttttcagtggggggacgaaagacctttctttctttttggtaatgggccgggccgggccggtttaatccaaggcaaatggcaagatccgtagagttttacatacaaactttactctagtgtaaacaagaaagtcagaaaccgcatgcgttatagttagtgaaaggttcgatttctgtcaggtcttcgcatccgtcacgtttgctatctcgaacttcagggagcatattacaaacgtaaaagaaattgatatattacgctaattaatttattcccgttgttgtcaagaaactaatgtcttaattagccttttaggttaaaccctaatttttgtcgatttaagttttgaaaaacgaattttgattgtttggattttggtaaaaggagatcagagttcatcgctggtaccatgttggttaactggctcgccgggagacccagcaataagttttatgctctccaaaagtcaatagacgagctacacaaggtattatcatatatattggcaattgatgtttttaagttcctatttatttttctgtgacattgaatctattttcaaaagcacccaataatgtggttctcattctttttttctgatcactaatgtgtgttcacctcaagacgctcgagtctcttgaacaaaaagaaaaggtttctctgctgccgtacagtacaaggaagcgaaaacatgttacctggcaggttacaaaacatgttacctggcaggttacaaaacaagtatgaaacatcttttgattttgaagcacgaaaaagtaaaatatcttattatcttttatggatcaatttaaaacatgtgtgttgaatcttgtcatgcaggtgctaaactttgtttgaaagagaagaggattcacgagcgaacagctcaatataataggaattgtcagcttctcttacatgaagctgtgagttttttctttttctttttgtgtcttactaaattatttttttattaactactttttaagcgatgaattgaatttattgtcactatttttctttcttcttaattatacagctgattttgtgtgaaagtagaaaagaacaaatgattgaagctatgcgggatggagattttactacgcagaagacaatgcaagtttttatttatctttgtttgttccttttaatcttaacttatttgtatcaatctaactcatgtattatcctacgtctatctagactgatcggacggacataatgtgtatccatatttcttggctacgcgtgtccaccttttagagactatgcctttaggtagtagatgttttactacaaaataaacatatttagtcaaataaaataaaatttgagagaatcttctacataagtagctcacagacccaaccaaaggaccattgaataccatatatatatagatacacagacatataaacacacaaatattcgtgtttttttcaaactgtgagagaaaaagaaagagagaaagagatg

SEQ ID NO: 10975 - DNA, 3000 bp, Unknown
  misc_feature (1)..( 3000): cDNA_ID_3041114_gDNA_ID_2214468_Annot_ID_182906 3000 nt of promoter + ATG
cgttaagagagcgaggagcgcggttgtgtcgttagatttagatctgaatctacctgccccggaagatgagaatcgggtcaacggattaagctttgcttcaaagcaagaacacgaacaagaacatgaacaaacacaacagaagaaacagagagaagaacaaaagtctcttgtcttgtcttctgctcctacattggtggattgccattactaaaatcaaaattcattaatacctaatcaaacaaaattaagcagaaattgatgaaccatttttttaagaaagttactgattccttgctttgtacaagacttgcaagattcttctctcttttttttcctttcttacttccttaatttcaaaggaaaaaccatatattatacaaatatatatactcccattaggcatatgcaatgctttgtaattacatccaagttaatgtaagatcttttggttacacaatataaataataaaaaccacattcgtttactattggggctttctcataaagagaccacattcccaacatccttctttgtatatatttaaatgaatcaactaaaatacatagaaataaaaaatttctctatactattattttcagttgatccattcaaatcattttctaaaaacttatgtcacgttcatgtatacttttagttaaagaatgtttttttttttttggattggaaaaaaaaaaagctcaaaccttttaagaaaataaagctcatgaaaagagcgtgacgggtccaactcttttttttggttaaatttgcaatttaaacagattacttgttcatgttgacattgaaatagcaggtcgagagcgagagatcaaaatgcaatgtattatgcccttaatttatgcttttatatattttgtttattaatgtcacatatcttattatggatatactttgcaacggatcacaaatcttaccctgaaatatgcaacctgttaccggaattgaaatttcataacacactattctcagctcttcaagattcagtgtttcattcgtgaagacgaatgcatgttgttctagtctcgatacgagaaactgcgtttatgaaaataagaaaaagaagaataaattagcatgggcttgatttacacccgtccgtcaccgaaatgggctacaaataaatcatgggcttttaatattctaacttagaagaaatttggcccattgcttaaacacgaggcacaaaccatatattttttttgagccaaaaaaaaaagtcttgatattttagcattttgtcctttttggagacagtggtgtcagatagctgacaacctatataaataaataaataaaatagagttttcttttactcttactttctttattagtttcataataatatgtgtaaaagtaagagttggatatttttcgttttaatttctgccttcgaattagttacgcatacaaagcataagagacaagagacatagcgtaccaaaaaagaagaaaatagtgcaaaaatatcatatagttttctggtacgcctcatcaattccacccccgtacaccataattatatagaatttcaatatcgaaatgtcgacagcaacaaaattcaacatgtcgaataatattgttttaaatattccattttactagaagatgaaaaaaagagagaagaaagtaaccttttgtctttgtcaccttgacttaaacagtaatacaaaccccacaagtaaattattcaagttcaaatcgtagttaatgtttatatttgagaattgcaaatggtttaaacgaaaaccaaactacgaattacaaatttgaagaggacttgtactagaaaataaatagagaaaagaagaataataaatagtaacagaaaatgggaaagatgatgattcgtgtggaccaagtctctcctcccctttagcttgccttattggtaaagtatcctcctgcaagcaaacgtatctgtcactccttttttattttctttcaccttctatcttattctcattaattcttcttttttggtcaacttcatgtatagaaaataataccaaaattttttgatatagtaaaactattagaactgaatttcaaacaaaaataatacaaatttaagcaaaaaaatattaaaaataaattttaaagaatatttttacatataataaatatacatagttgatacttttatataattattaatttatgatattaatgagaccatatatttacatagaacattcaaaataattattatcttattaatctatcgatatatatcactttttatactagtttttggaatcttaataatttattaatttgtagaagttattaatttatagaggttttactgtacatgtcagcatttaacttttgataagcacaaaaccattacatattttccaaccagattattttctatttatcctagcgtttgtaaatctttgaactacaataatttatcaaatacaatataagatttttatactaaagatgtatacaatgcatttaacattaaaggaaacaaataaactctaatcttttaaaaaaatactttaccttttaaaaagagttattaatcacataagcaatatttaatttttcattatttttttcatcatctgtctaacatattactttttaaaaaatatttatcgttggatacttacttttcagaccacacactaggactagtggttcctttattttactgcatagaacgacaacaaaaagctaagcagtaacattttttagggttttattactgcaacactcaaaaatgagaaattattattaaaattgaaaatgaaaaatagtaatcgcaatccgaaattactttttttctagccttctaggaactcgaaaagaaagcaaatttcttgcaattgaaggtacctgcttctctttttctggtttgtctggtttcatattaaaaaaaacattttgacaactatatttctggtttgtctgaaaaaattgagaagaaaacctagaaacaaatacggtcttttttttttcttttt

SEQ ID NO: 10976 - DNA, 3000 bp, Unknown
  misc_feature (1)..( 3000): cDNA_ID_3033293_gDNA_ID_2214469_Annot_ID_182944 3000 nt of promoter + ATG
ctcgagcataagaaacattgaattccatctagtttgaacatccagcgacaaaactaccccctgatcaccttctacgcattgctggaatgcaagccctctcgcttttgaagctttcacgcacttgacactatctctgatcttggttaaagcaccactaataatctttagtccatcttgcacaataagatttaggatgtgtgcacaacattgaacatgaaagagttcacctccacataacaagttgtcatctaaattaagccgctcttttagtatctcttgcatggtgtcattcgctaaagcgttatctagagtaagagtaaatatattctcttcaattccccattcttttagacattcatggattttagtcgccaaagcatcactggtgtgtggaggaggtatgtcacaaaatgacaagatcttgctattcaaagtccagctttcgtcgacgtagtgggcagtcagagttatataaccttcaccagcaattgctgtccaacaatcgaaagctaagcatatcctactctgaatctttgccaaatccatcttcagcttgttcttctcgctatcccaagttttaacaacatctgttgcttctgtgtttctagtgtagtagctataatctggattcagatattgaaaaaaccttcgcagctcttcatattcaacaacagaaaaaggaagatcatgccaaattataaccctactaaacttctctcaaacaacactctaatcaatcttcattcttcctagtctttccatctccatcaattatcatatcagcgacatgcctatattttgacttcttaatgcatctttgatgatgacgcttcataggagatgttcatgtggtaggttcatacacaagtttttcaccacaatagttacatttaactcgattcttgccatcgtcaccttttccagcttgagtaaaatgtttccacatttctgaagttttccttccttcgtttacgagaattttcttgagagttaccttctggtatctctgatgattgctcatggggttgaatcaatatcatcatcgtcatccatcatcatctcttcttcagcagctatttttgactcccagtccagatcttccatattatctatccataaatttaatataaattatagtcaaaaaacaatatatgtatagatcatcgttttagttctaaaataaataaataatatcaaacaacaccaaactgtagacgatatttagtataatctcaaacataactacaagaacgaacacatgaagccaatctattttgtttttactaacataatatttacttatttagcaaaacaaatcatatgatcatcataacatgcatgggcacaaatatcaatatgactataacgtaattacatagtacatactcctagacgaagatgctgtcatgctttcgaattcgataagacacgaacggagacaaaataaaaaccaaggcgatgagacacgagaactcaagaagtaatttaagaagcaaccatagaacgatgacgtctatttataataacaatacatgaagagaaaaagaaaaccctagtcttgggtttatatattttacataattagctgcaaggaaaaataaatattatgcatatattttaccttttacttttatatttaggtaaaatataaactttaatagttattttagatatttttacatatgtagttgtaaagaaaagaaaatattttacatatgtatatataaattttacataatatattaatataaatatatataaattttacttttttgttttgattgtgaaacccatgggtaacccatgatcctaatgggttttacccattaaacccatgactctaatagggtaacccactaaaacccatttatatatatggataaaaaaaatcatacccaaacccattaaaatcatgggcgggttcggataacgtatgggtattgacccattatgacacccctatcggagagcaacgacatcagatcttcgagttgtgttcaagaaataagtttgatccttcaccaagttgctttgtgatggtaagaatctctcttactctgtattaattgatgattattgattgttttgaaattagggtttttttctttcagtaataattaggataatttgatgatggattttgattaattgtatactgtatcttaatctgataattactagagtattcgtaatggaaattattttattgtggatgattgtttgaattactactcaaatggatcttcaatatattaattagttcgattagtttttggggttaaacgcatgaatgttacctatgaaatattgtgtcttaactgtgatattgtgttgtatcttaattgttaaatattttggtttttaccgattaaatttatcaaactttttttgttttcttttgaggtatctatggaggaaacattgatttggacattgatatggactctacagctgcaacatctcagatggtgagtaaggtaatgcattacattgacattagttgacttttgtatttaaattaggtaaaacttgacttgtattgattgtagtgtgtctgttttgtgataaatgtttgtgtgtgtattcaattgatagcttattgtctatttagaggttgattataataggtaagacttgacttacattgacatcattcttaatgtcaatgagttcaatgcttatatgtttttcattaggtaaaaaaataagttttaacattgaatgcttaaacctacaactagaacttaactcaactaaccacaactacaacttaaaatagtcaaagacttaaacctaaccttctatatatcccaagtaaaatcgctgcttaagccacacctttctcctctttattttctcacatcctcctttaaaagtcattgaaactctttcatcctcctttaaaagtcattgaaactctttcatcctccttaatgaatccttatgctaacacgtccggcttcttggatctggtaacaagtcaacaagaaacctccatca

SEQ ID NO: 10977 - DNA, 3000 bp, Unknown
  misc_feature (1)..( 3000): cDNA_ID_3081057_gDNA_ID_2214469_Annot_ID_182955 3000 nt of promoter + ATG
ctctaaaacttccatttcaaatccattaatcactgttagtacccgcagctccttattgggacacttgtgttctttggaccaaggtccatcacatctaaaacaaatccctttccttctcttctcatccaattctgcactggatgccgtctagtctctgatcatttcttccaattggtttgtcactaccatgatttgactcagtcattacagacttcatcttccagttgtttgtagctggtgtataagaactcttgtactcagaccaatgtggatctttattctctttacttaccaactgcaattccttttgcaccactcttctcatcacactcgtctccatagaacgtgccacagccaccatttcaggcagattctgtggtttatgcatgtgtaccagttcctgcatttcacctgtcaggccattcaagaatataccttccaatttctgatcatctaagcctccaacctgtgatgacagatcctcaaacctctgcacatattcagccactgaaccagtctgtttgatgcaaaacaaactctgactaggccctctcagcttcaaattcccgaaccttaacatcaatcctgatttcaacttcaaccaactcacaaaatccccacgactgatagcccaattgtaccaactcaaagcctcgccactgacgctaactgataccaaggctaattgttcagcctcattgtaacctcctgaacgaaaaaacctctcgactctcgcaatccacccatatatcccagatccatcaaacattggcatttctacattcttaagtagattctcgcgaattctaggtctaatcacaccacgacaaggttccagttgagaaacacgtacctggttcctatgatcttgcgatcttggaggaagagtttgacttgtaccacccacttcttgcaccgttgcaatacctggcatcgaattgagtaagagctccaacttcctctcaatcgctccgaattttagatcttgcgaacccattttgtcatccaacgacccaatcttggaatctagggttgataatcttgcatcagaacttctgattttacctcccaaatccccaatctgatcgtacacatccgccaacgaagccgcgtgctcctccgcctgagaaatttcacaaaccggagataaacttgattccatcaccattgcaactactatcgtcttcttcgatcgaacaaaaattcccaaacttcagcgttagattcaatccgagatcacgaacgcaccatttgataacaagaaaactgtaaatcttattatctgaaagagtcaatacaatttgtttgatacaaagagctctagaacacaaatctagatcattactctcacaaacccagacacatacgtcacaggcagttacaaacaaaatgcataaatcttctaaagaaagctaagtctcgatatatacacttcacacgtgtgacgtcttcttcagcgcacgtgctcctcagcaccatcttcattcgcacgtgcttcacgcctcttcctccttgtatacactattaagggcttgtcatcttctttgtcatcatatataaccttcgattagtgacgaagaagacctgcaatttctggcttaattctttcatcatttttttctggttttgatattagtagaaacgcttatatatttttgtttgcgtgatatggacagtaacatactttagttcggttggtttagagtttttagctctttcccacaggtgcatggttcgaatccgatagtaggatgatttttgtatttttgtttttaatacgaaaacgatgtcgtttactgtttgacggaagatgttgatgttgactttgtaccgttaaattgatctgttaattgactatacaatatattttatttggtaaagtcaacaaaaattagtgatttaattgaaaagtcaactaaaaatgatgattttattcaccataagtaaagtggatgatttgttcaccaacttttgcggaattatgaatttaatgacggttttcccggttttaattaaaccaaattaggacgttattaatattaggaaatattaggcaagaaaacactttttaaaaacttaatttggtgtgactcatgatttcggagtaagtgctgaggcgagtcgggaaccggacagggctctgtggcccccggggcatcggggcagacgtggcgacagggggtccgcggtgtcctgttggtcacatctccggagggcaaaggggaaaaacgggagacggggcaggacgcgccggcgggggacgaaggggacggtgaccacagctatagcggaggacgaggagcgcaacaggcgagaggggcgcatgggcccggaggtatccgtcagatactggtggacgggtaccgggtaaaccaagtacgcggggaccatactaacatgggaggcgccggcggagacggtggcgcaacgggtgcaaagaggcgaagtgggacgggaagggaatatctcgccgtaagataaaactgatcctttgccgtcggcacttagggggaataagtggtattaagaacgtgggtcctgggtgtcggtatacaaaatgcgagcgttattgatattaggaaatggtagacaagagagcactgtttaaaaacgtaatttggtaatagagcattttaggaggcagtatgtattttttaaagttttttttatcataaattcctcaaaagttagttaatcatagttagtttcatatggtttgggaataaaatattattttttgcagttttcctaaagtaaaacgacacgaccaattattcgtcactttgacctaaaagtgaaattatcctggcgactgtgttgaaataaacctccgtatccgttctcaatccgtaattcttctcccgtaaatcatattcgtcttgcctagttatccaaaaagtgcccatctaaattccgatcatttgccctccgtgaacttttaacaaacgggcgaacataaaatccctcatttttctttttcccaccggtcagtaatcaatg

SEQ ID NO: 10978 - DNA, 3000 bp, Unknown
  misc_feature (1)..( 3000): cDNA_ID_3081047_gDNA_ID_2214469_Annot_ID_182966 3000 nt of promoter + ATG
cagaagaattgatggtttggagagtaaattcctcttgttaatcagaaagtgattgttttagatgagtagcttagtaagagacttgcagctgtggagaatgatttgaaagctttgaaagagtctcatcccgctgatgtatccattaatgatgtcacatccaacaacaaaggagatgatgccacattcaacaacgataaagaagatgagacacccaataaagaacttgaactacaattaaaaattgtttttcatatttatcatgaattttgatgttgatgaaatattaaattattgattatcgaagtcttgtatggtagaggagaagccataatctcaagatggtttgccttgttagagagtagtgaagaaagttatctacttagtgaagaacaagaaaaagcatgaatgagaaatatctgagctgcttgttctttgtgaaaagaaagatgcaacaaagggtaagaagaagaaagttgcaatcatgcctaaaaaagcatctaagatacctaagaagaagatggccaaggtaaaggaaatgaaggtatcaactccaaaagttttaaagaagacaatgaggagagatgacgactatgttggtgatgtaactgaaaaagttgtagcagatactttgaaaatggcttgcagttttgaagatacattctctaatcctcatgtacagcgggctagtgaagcaatggctatcgtgttgtcgtcaattgaagaccaaattaaaaatttgaatgatggtactactagagagacgagtgactcaactagccgattatataaaacctccttatgtagggaaatccacagtgaagcgcattatcacggatggagcaccatccccttccatacccgagcatcttcaaccagtttcagatgagaaacttcatagtctcatggattggctaggcttgatgagtaagtttctgttttctagttctaaaatccatgatttcggttctcttttatcattttttttcccagagaagaaccatttcaaacaaataattttgatgttcgattgttttggcaaattataactcctagaaaagaccagatggaacacatggttgggtgaaagactatgtaagtattcccttttgtaatttacaattttcagcttgtggaattggtttaaaatttggttttaattgttgtattgattatgttgcaccacatgggaactacaatgactatgtttcctagaaagttcattcgtgatccttataaatacacaaatcaccgcattgctttccttgatcaagttttgataagaaagatgaagaatgactacaacaaacactattcgtctgattttaaaacctacaactggaccggctattatgtgaatcacctcaacggtacaagtcatacagacgcagcgacaaacaataagtggttcactaatgtagatcacctttacggttgtctctttgtcaatgaaaatcattgggtggctttggattttaacttgaagacaaacaggatctacgtttacgacagcattcccacacctgttgaggaattagaaatggttcaacagtgcatgtttttaaggaagataatcccaactatgttgtctgaatatattctagaaaaggaccataagaagagctacgcaatgttggaggtgaagagggttacaaagaagaacccagtgaatgacgatcgaggtgattgtgcaatatatgcgataaaatacattgaatgtttggcacttggaaagtcattcgacggattgtgtgatagaaacatgcaggccttatggatcaatcttggtgtagagatgtttgatgaattaggagagtttgtcggaacacttaactgtgagactcgtcagaaagaattcgagattcctcgccttaatgattcgtagaagctatgtttgtgtttttattttgttatgtggttgttttgggttttgtttcagacattcatggtatgtgtttcaaaatttcatgttattttgtctcagacttcgacgtatatcttttcatttctctcatacttctacgttataggcaagtagaaatgaatttcttactattgagtgactggcttaaaaaccattgcagaaccttaattattttttcatttgtctcagacttctacatcatatgtgactgaatcaaaaaaacgtggcaagacataaaagaggtttaagacaaaaaaatattgaaacaaaatagtagaaaacataagtgactgaatcaaaaaaacgttgcaagacacaaaagatatcaagtctaatagcttaaacatgcaaaacaagacaatagaagaggtttaagtctaaaaattgatgatgtcgtctctctcgaaaggcaattttttgggcgatcgacgccatttgcttgttctccactggagatttttttccgacctgagatgttcgcagaattccttctagagtcttcaacgccggtttttgtctgccaaatgacaatggtagttattcttctcccctctttacgggaggtaatcgtcaaccaaaaccgtcatggatcattctatttaaccctttcaatcatctattcctttttctctcaccactgttttaccaactcgacaaaaaccaacaatcaattatgagtgattttctaagaaagtttgtccaagatctgaatttgggaatcgacgatgctccaaatttcctgtcacaggaattcgtctcacaggcgttcgctgttaaccgcttctcactaatcgtcacaccagtgaatccccgaaaaaaaacctacgagcgttaatcagtcaaatgcctagagtttagggactggcggattcttgcgttgggcgaatcgttggcaatggaaaggtgcaattcaagttccaaacagatgaatcaatgaacttggtcctgcgacgtggtcattcaatgactggatgttgtcaatcaatcgatggtacctgaatatcacagagaatgagatgaagataattcttttctgggtttaaatccaaggtatccctcttcttttcttaaccaatgca

SEQ ID NO: 10979 - DNA, 3000 bp, Unknown
  misc_feature (1)..( 3000): cDNA_ID_3033234_gDNA_ID_2214469_Annot_ID_182968 3000 nt of promoter + ATG
cgtatgctaaacttctgaagtactggaactgatcgctttttgatagttttaggttcaaaactcataaaaccttcttggcacctagaatacgtgtttctcctcttcttggatcaagaaaggcaccaaattctctttgaaacataacaaaacaatagctaaaacgggctaaaaagctgtgttatcacgaagtacagtctagtacggtttgatgaattttgtgatggtggtttgcaggcaattgataaaagcatgatcccaaagaaaatgtgagttcttttgttttcaaatctctcctccagatcaagatttttgttttccttaagaataatcaaagagctaagtagggaggagttgatatgttgcgtttttaatgtcttaggtctcttcgttttgagtcatttaacatgtcgtagtccgtgttttgcgtcttttgggttgtgccttctgtattttgcctgttttaggtaattgtgacgggactggatggttttgagctttttggagtagagaaagggcgagaaaatctgaagcagggagaagactgtgtagaccaatcggtccagtagagggtgatgatccattttggctttcaacagacggtcaaaaatggttgaccgatcgattaaaatctggaccgatcggtctgatttcctaacgcaggatttcggttttccttaactggatttattttcttttttctgtaattgggtattaaaactccaaacacctaattttgtttttaccgttctttttctacaactttttgagagcttttctttgtaagcaactttgggagaaggatccatcctctttgacactttggaaaagatttctaatctttttttcttttatatttcattaatctattatatcttttcaactctttgtgttgtttattttgcttagagtgagtaatcacttaattgggttttgggttctaagtaggggattcaatgaattgatcgtttgattattgtttggagttctttatctttaagttctttgattcacatgttcttaatgtttgaataggttgtatcaccctgttttagagtctaggtttttctatgcatcaaaagtgtttgatagaatgcctaaaccaatgtgaattgaacatttaatttctagccaacaaatgttgacgttagaatgcattctgaacctaatgaacctaatcctaatgtaaatttgactaggaaattacaaatgaaagtttagtagtgaagcagtccaatttagtgattaataacttgattgagaattaggctaaacttgtgttcatgttcgagaatggttctttatgttgaatttcctgtctaatatttccattaatcatggatctctgaaataccctatggccgattgctttttatcatataagtttaatcgtttattttcttgcattttaatttataactctgaatactaaacaaacaatctctttagctttagctaagaacgagtcttgaaaatccttagagtatcttttgtccttgtggatcgacctcgaatatactatctaggggttaagtgtattcagtaattactcaagcaatcagttttaaagatggtcactctcgtttatcagttccaaagcattcttgttcatggacctgaatatcttaggcgatcacttgatgtattcttacaatcattgattcatgagttacaaacattgtggtccgagggagtagttgcatatgatgttcctctaaggaacatttttgtgatgcctgctgttctgatgtagacgattaataattttccagcatatggaatgttatatgggtggacaacgcatggaagactatcatgtccctactatcaggatactattaatgcatttcagcttaagcatggaaaaaagtcttgttggtttgattgtcatcgacggtttgataataggtttttaagatcaattaaacctaaagcactatcatgtcgttgtagtactgaaggttgtcaatccaaatgggtgtgatgctaacaatcaagatgtgatcagaagtcactaagtcaagccaagcaataacaggttttggtgtgttctagcagttctaagtgaacatgcagaaaacaaaaattcaagtagaaacaataaaacactcgaccaacacagctctttgcagagcactggatgaggtcgagtgacaggtcgagtaacagacagaaagtgaaacagggatactcgactgcacagtctgttgccagacaactgggtggtcgagtatcaggtcgagtaacagtaaagaattgcagaaactaagcaacaaatgacaagatgcagtagagtaaacaataaaatcaatcagataaagaattcccgaggatagggtaatcgagtagtttcgttttctcagtttactggtgattgacatgctcaataaataaaccctaaacaacaagttcattaaccaaatctaagtgccaccgcaacagagactctcaagttaacctagtcccagactcaatcaccattgacgagagctaacctaacaggcattacgaatcaacaagttaaagccaaaacgctccctgcaaccaataccttggtacagggtcacgaatctctggaattagtggttcagacatttcatcgaacaccttttgggtgcggaaatgtctgggctcaaatttcagttgatcagaaagcaataggcattaagaacaactaatccagaagggatctatcaatcaatactcaatcacctagcatactgagaattctacactactctaacccatcctcagaaacctattcactactcagacatcataacagaaagcataaacgttgaacaagttgaaaacataataacaacagtgtaacagcaggatgataacagaataaacaacagtaaacgaaatctagaacaaaagttgaatactgaatagataaagagaaatccggattacaaaaggtctagaacacaaggtctgcggaaaaactagataaaaacttttttttttaaacttgttctcgaaaatgtaaagtacatg

SEQ ID NO: 10980 - DNA, 3000 bp, Unknown
  misc_feature (1)..( 3000): cDNA_ID_3033256_gDNA_ID_2214469_Annot_ID_182959 3000 nt of promoter + ATG
gcttgaatcatactctgcatcgtctcttgagatatggtaggatgagtacttatttgatttttcttcaaaataagcttctttctgatcagcagagtagtcttcttcttctgaaccaggctgttttgaccaatcctaaaattcgaaactggggtagcctttaaccatttcttgaagttccaagattgcatggttcagtccttccatcttgtaagttagctccccaatggtatcctcttgagctttgtatccaacttagagtttcagaagttcttcagcaacagaatcatgaatcaagtattcttcttcagcagaggtgttggtgggctgtttaggcactcctggagaataaatcagaataggagtttcctcctcactcaacaacttgctctctaggcttctttcctctaagtgaactactttctgatcttctggtgcaaaccattctgttgtgaaattttcgtcctccttgatagctagtgcagtttccatcttctctagatcaataccatttgaaaaatttttaactcttttttcaaacatccaaagttgatctttcagcttcatcacccttgaagacaatccttctatgactctactttgccatttatttatttttctcatctcataccagtcatcttctgtaggatcttcagtctgagctagcctttctgttgttctcttcatgtggtcaaaagttctcttcagcttgctaacttgagaagtatagttaactcttggtggggttccagcttctgtttcttcatcaacatccatgttctgaaccccaaaattctgaactcctgttgttgatttccatgaagattctctgatgtcaaacttcatcttgatgccttcaaggttcagattaatttttccgttcctgacatctatgactgctccagctgaagctaagaatggtctgcctaggatcaggggatccttgcctttttcatctacgtccaataccacaaaatctgtaggtatctcaacattttcaatcttgacaggcagattttctattaaaccatgaggatgtgctacagaaccgtcagctaagagtaaagctaagttgcagaacttgtattccataatccctagccttttagctgtagagagaggcataagactaacagatgctcccaaatcacaaaggcacctattgaatgtcaatggtcctagagagcatggcagagtgaatgaaccgggatcatcaagcttttcttggatgattttcttcttgtatgtttcttgggtagaggcactgctgatcatctcttgattctgatccttcttgagtttttcaattttgaacttttttccaggatggtgagtattcagcaaaggtgtgtgctttatagtccagatgaattgctgggtggcaggtgcagcaatttgagttgaatccccccccccttcttgaatcatattttcctcagtatggggagtctgacgacttggtggagactcatcttcttggtggatggtgatagcattaccagtagcatagtccttaggattttggactgctttccctggaagttgttgaggatgctccagagcagaggttgatgcaaattgactctccacatacttgatttttgaattcaaagcttcaaacttgacattcagatcgttgtaagaacaaccgatcttgttatgtaattcagctatcttcatgtcaaaagccatggctccagtagcttgtccttggatgatctattgaatgagttgcttaatttcaggatcctgagctgttggggctggttctggttgttgagtgaaccctggtggtggattctgctgttggtagcctccattaaactgttgtttagggacataaccttggttgtactgaacaaaaggcttggactgattctgttgaggtggatacacttgatcttgggggttagctacattagtgcttctttatgagaggtttgggttgggatcgtagttgttgttccccttgttgaaacctcctttgttctgaatgtagcacaactctacagtttgatcattccccccttcttgcatttggaagtgctcttcatcagtgatgtagtgtatctgcttctgctgagccagcaacaacttgtctagcttttcattcagagccttgatatctttgctctttttatcctcactacctccagttcctctcactaagcgatcatagtattcattgtagcacccatcagattgtgctagattttcgaccaacttccatccttctgctacatccttgttcaggaagtttccattggaggcggtgtcgagtagcattctgatctttggtaaagctcctctatagagtgtactcaataatgaagctttcttgaaaccgtgatgggggcactgagtggtgtagcttttaaacctctccatcgcgtttcacaaagcttgtcgtttttctctccttgtgggttggttaggccaatttgtttcgattgagcgattgaatctacgagacgcaacaatctctttctgggttagggtttcttcacataaccttttgtggtttcttgttttgggcggagtttggtggtttctggaaccctagatagagaggagccttagggtggttaatattggcactggtgatttagatatagagaaagagatttgagagatatatgtgtaggtgttagggttttcattactttgtgaattgtggctgtggcattgaatagaggtgtttggggttttgtccctttggtaaaggatgagtgttctctagtgtgaagctaaattggtcttctaagccatctgtgtgagggatggaagtgtagaaggtgctgaaacaactcatttggattagggattggaattggattcgtcttgtggcctttaccgtggtagggatttagatggtagagaaagctagggtagattaaattttttgtaagaggagctttctctgttgttgttggtggggggtgaagaaggttagagagagtgtgtgttctttcttgtatctgatgaggtacagctttcctaatg

SEQ ID NO: 10981 - DNA, 3000 bp, Unknown
  misc_feature (1)..( 3000): cDNA_ID_3033289_gDNA_ID_2214469_Annot_ID_182945 3000 nt of promoter + ATG
tatcaatatgactataacgtaattacatagtacatactcctagacgaagatgctgtcatgctttcgaattcgataagacacgaacggagacaaaataaaaaccaaggcgatgagacacgagaactcaagaagtaatttaagaagcaaccatagaacgatgacgtctatttataataacaatacatgaagagaaaaagaaaaccctagtcttgggtttatatattttacataattagctgcaaggaaaaataaatattatgcatatattttaccttttacttttatatttaggtaaaatataaactttaatagttattttagatatttttacatatgtagttgtaaagaaaagaaaatattttacatatgtatatataaattttacataatatattaatataaatatatataaattttacttttttgttttgattgtgaaacccatgggtaacccatgatcctaatgggttttacccattaaacccatgactctaatagggtaacccactaaaacccatttatatatatggataaaaaaaatcatacccaaacccattaaaatcatgggcgggttcggataacgtatgggtattgacccattatgacacccctatcggagagcaacgacatcagatcttcgagttgtgttcaagaaataagtttgatccttcaccaagttgctttgtgatggtaagaatctctcttactctgtattaattgatgattattgattgttttgaaattagggtttttttctttcagtaataattaggataatttgatgatggattttgattaattgtatactgtatcttaatctgataattactagagtattcgtaatggaaattattttattgtggatgattgtttgaattactactcaaatggatcttcaatatattaattagttcgattagtttttggggttaaacgcatgaatgttacctatgaaatattgtgtcttaactgtgatattgtgttgtatcttaattgttaaatattttggtttttaccgattaaatttatcaaactttttttgttttcttttgaggtatctatggaggaaacattgatttggacattgatatggactctacagctgcaacatctcagatggtgagtaaggtaatgcattacattgacattagttgacttttgtatttaaattaggtaaaacttgacttgtattgattgtagtgtgtctgttttgtgataaatgtttgtgtgtgtattcaattgatagcttattgtctatttagaggttgattataataggtaagacttgacttacattgacatcattcttaatgtcaatgagttcaatgcttatatgtttttcattaggtaaaaaaataagttttaacattgaatgcttaaacctacaactagaacttaactcaactaaccacaactacaacttaaaatagtcaaagacttaaacctaaccttctatatatcccaagtaaaatcgctgcttaagccacacctttctcctctttattttctcacatcctcctttaaaagtcattgaaactctttcatcctcctttaaaagtcattgaaactctttcatcctccttaatgaatccttatgctaacacgtccggcttcttggatctggtaacaagtcaacaagaaacctccatcaatgttgctgatacaagactttgtgaatctgacgcccctgtcttcggtacatgatgatgtgaagcagcattgcatggtgaaaccacaaacacaaatcgcacaccaagaacaaggaccaagtagtcatctaaagaccatgttctactaatctttgtgtggctaaataaaaagcaaggatgttgttattggtaatgagcaacgagcaaatgtattcaggaaacacattgcgtagtacattgcagcaagtccctttgttggtactctcaacaatagaccagcaagtcattgtaagtaaaggtggtccaagatcaacaaatttacatgttgtgggatcccatgcaggtgaaacatctcggatggcgagtggaatgaatgagaatgatttgatgaggttagctcatgaaatttacgagagtgattacaatggagcattgttggagggagttaaggcatgatcagaagtaatgcgcctctcttccaaccaaagagacattacttagcaaaagaagaaaggttaatggtgctcctcgtgtagctgttccaaggattacacatgtagttgaagcttcctaagctcgtccaccgggtgtgaaggctgctaagggtaaagacaaggagcatggctggagtttcagcaaatgtggaagaagaaggaaagaggctagaaaggatggagagtttgggggaaattaaagcaacaagaattaagcttttaaaagaaacgttgaaccgaacagaaaactgcttaaacaggtttagttgcacagattttacaccccttactaaaagttggaaaccggaacttaaggaattaacctaatccaaaaccttgtttttttaccttggacaattctccttcaattcctttggcggttcaacctctttggcctttgaagcctttggggtttaaatggctttggagagttccagttaatgaggccccggggggggggttttgggccttggggttccggttgggtctgggcggttttattggccccggccccgtgtgtaggtctttttccttttctttttttttaagctttttagccgcctttgggcccggggtcatgtttttgaattttgggttcgtgtttggaacggtctcccggttgtgtttttgttttttcgttttcaaattgcgtttttaatggggttttctcgtccgcggttttcattcccgccgcccccgcattccgattggtacctttccgaaaaaccccgtttttgatggaaacacccgttccacaatatatttggttttttttgtggtcttttaatggcgggaattttattttcccgaatcgcggtggttttaatcgcgagtgggtgtacaagttgttcgatgaa

SEQ ID NO: 10982 - DNA, 3000 bp, Unknown
  misc_feature (1)..( 3000): cDNA_ID_2717005_gDNA_ID_2214470_Annot_ID_133055 3000 nt of promoter + ATG
caactgatgctctggaaagtgtagctgaagatggtgagattctttttttcatcacctgtaaaatgattcatactatttttcttctactgatgatgatgaaagcagatacaatcgaggacgacatgctgtcttaccacgaaggattggttctcgttcctcggggaagtgaaaatactgtaactggccctcacatcagaggcagcagattacgagcatccgctgttggtgatgaagaagtagatctccttcttcctggaacagccaggtaactaactctcacctggttggaaaaatgaaaaactaagacttaacaaatgctgatgacaaataaatggaatacatatgatccagacgacatggaactgattgaaacttagtccagttcggtttttgaaaagaatctctataaaatgcaggctgcagatacagcaaggagtgaacatgccggcaagagcagagctgataccgggaagagaagataaagagaagcagattttacatgactgctgcgacgtcgtactctaccttggcattatagacatcttacaagagtacaacatgaccaagaagattgaacatgcttataaatctcttcactttgattctctttcgatctcagccgttgatccaacattctactcccaacgttttcttgagttcatcaagaaagtatttccacagaacaacaaatcatagacagagaattgagtacagagttttatgtttttttttgtagagataaaaaagaattctatgttgtaagtatgttgtatacagatcttgagagcttcaataaataagtaaaaaactaattctccttttcttgattgcatgaagtatttggtttaattattaaaaggcaaaaatataaataatcaaaagtcacagaaaagccctaacgtgttgtcttcttcttcttcttcttttgaagagtaagaaatcaatgtcgtccctggaaaagaagaggaagaggaagactacgactaggacaaagaagaagaagctgtccccaaatcagtcaatccctatgatttgctattggacatcatcgcacgcgtcccaagattgtactatccgactctctcactcgtttccaagagctttcgatccctcctagcttcaccggagctttacaaggccagcaggtcattcttgggtcacaccgagcgttgtctctatgtgtgcttacggtgctgtcctggttatcgctggttcaccctgtgtcggaagccagatcaaaccctatccaatgacaccactgaaaagaagtcaagtgggtatgttttggcaacagtccccattcctagttttcataaaccgcgcttttcgagtctcgtggtggttggttctgatatctactacatccacgggccctcctctaacgtctcgattctggattgccggtctcacacgtggcgccaggttcaaagctcgattctagattgtcggtctcacaggcggcgcaaggctccaatcttgccggtggaacattcgtcacttactgctagcgtccttggtgaaaagatatatgtagcaggatgttacagcgatatgcatttaggttcttctttctttgaggtgttcgacacgaaaacggaagtttgggttagtgagcccatcccttacagcgacagaaaatacaactttcttcaccccaaaagcatttgtattgatggaaagatccatgtagtgactgacagtgagggggttgttgcttacaatcccaaggaaggtatatggttggatttggatcagtatatgcgttcagattcttattgtgagatagatgatattttgtactctgtttatagcagaacggttatatggtatgacactgaggcaagcaggtggagatatttggagggcttaggacaacttacgtttcctcttggtgcttctattagggcttaggaaagttagcggttttgtgggacgaggatttgctttatggtttgactagtttcgtctataagaagaagatttggtgtgcggagatttcgcttgaaagaagcaaaagttgcgaaagttttgggaagttgaatggtttgatcatgtgcttacagtgcctaaagaatgtgaattggtgaaagttcttgctgctactgtttaataattgcgtcacaaggcttgaaacgaggtctctttgtctctttattcacttgtaatcatttgatttcacttgctgattgattgttaagcttactttgttgtgaccaaaatgcttttgataactacggtcgtctctttacatatgtgtaaacaaaacaaaaaaacactttggagagtaattgatttgaatggttaattttgcaacagaaagagttttttttttttttggttatgttttaaagtgtaaaaaaagcctttgttcatgtacttgttccaaaactgatagtaacttgtaatccatacaagtgaacttgtgaacactctttataacaacttatctttcatgagagcttcactaagaaaactagttttcctttgtgtttttttgggtctgaatcgccgcaaaccgcaaaagataattgcaaacgtaacagtagtgctttgattgcatgaaatatttggttttataataaaaagctaggaaaaaataaaaaaaaatttgggagggagcaacaaacacgtggatacaaaacaagacggactttggaagaaacgttgaaacagaaacagatacgtgtcgtgaagcgaaatgtcggagaaaggagaagaagcagtaaagagttctttaatgtttttgacagtatttgttcaacaattctcattaacgtttttcattatttgttttctgctctgtaaagaataaagtttcttaatttgttgtatgaatcatagatttctctgcagaggcaaagttttctctcttcttttttcgattcattcttttacaagataacataaaaatcacttcttttgtttgtttgtttatctaagttgaatttgatttgatctctttactgtagtattagatagagtgagagattgtagaagaaa

SEQ ID NO: 10983 - DNA, 3000 bp, Unknown
  misc_feature (1)..( 3000): cDNA_ID_2705158_gDNA_ID_2214470_Annot_ID_182998 3000 nt of promoter + ATG
tcttttttttaatgagtgttattattcttttatttatgaattctggtgaaattgtataatcaaaaatatacattcaagatttgagaaaataattttcaatgagaggaaacattatccaaaaacattaattgtgattaattacactttgctcagctaaaattttcaaagttggtttatgaatctttgaaactaaagaggtgctacttcaattgttctgttagctgtttatatgaattaaaggagaaaattaatatatgaacagattatttttatttagtgtttttatatataaccatttttaacaaaatatttagctaattagttcatgcacacattttgtctactatatatgcagtgttagatgaacaaattcgttttatgtagtgattgtgtttaaccattttcaactaacatttagctacttaattcatccacacaatttgtcagactacataattcacatgacatttactgctctgtaatagtattaaaggaaacaaatatgaaaataacctactagtaattcttttgacaatatagagcttttcttagtcataaaacagcttttgtttcaaaattggaaacgatctctctttttgggatcttacacaaagtacacatgtacgaaattcctcattgatacatcattcctcattacgaaccacacaattagatctaacatatatatatttgttccactcaaatacaaatcttgttagggtaacatcacctctgaggaaacgacaaaatgaagttaatgaaagtatttggctttagatggattcgtagatagtacgtgacacgttgctgatatgcggacttcagataaattatcggctagtatcataaagataatgtaagggtctaagcatactcactaattaacgaaatatcttcttagaaacacctgagctcgatctatttcaatcatagtgactcaaacctaagaaaatctttgacatatgtatattacattagtgttccaagaagatgctacgttcgacgtcatatttgttatcctgtaaattataacaaagatgcatcaacattcaacagagaacaaagtttagtttttatatatatatatatgtcacgatcataggtctacataactataaattgatacaattgattttacagattttacacaacatatgtatccaacttgatgatatatccggtctgccgtttcccactatatatagagtattttataattgattcccatttatttttcttagtttatatatgttcgtcttttggaattgcttaatgaaagtgtgtgcgagtggttaggtatgcgattctattatgtctctttatttatttttgatttcgaatcgcaccactaccttcgtatgggaatgtttcaatatgatatctatctgtatatgatcacgaatataatttgattttgatcaaaatcaacatgtaatataatttcacgtaatatcaaacatccaatagttacagtttaatctggctactgaatatatatatatatatatatatatatcttcctttgaaagaatgtttatatatttttattctttgtgacgttttttttagctaatggtgatctcttgactctaaattcatacaaattttttaaaaaattagcttagggttttgaaaatataaaaactcttttagggcttatgttttctttttggtcaacggagcttatgcttttgtagaaacactaatttttaagacattaaagtatacatcagttttgttttgtgttttgggttaaacttatacacaattattcaaagacgacaaaacaagtttaaatatgaattccaaaataccagttcatcttttcggactactgtatataagaatattatgttggcaaaaagtaggtttattataggttaaaaataaaaataaagtatagcctactttgttaggaatacatattaaacttcacactaattactagtagatatttaggcaatataagtctagaagcggaaagtagacaatgcctattgcctagtatacatttcggacagcacaagtgacttttaactctttaatcacacagaagacagaactatgcaatgatcgacaacttcttcactctgtaaaatatttggatttctcaattaatggtttctgaaaataacatcatctttttaaagcatgaacaaattaatcctaatgtagacctaaataaaaatcttaagaccatctttatcagtaaaaacaaggaaagattctaaaaaaaaataaaaataatattttaattaaaacagatacattaattattatttaataattgaattaatagtatgatgacacttgtccaaattggatgagaatagtttctcaaagtttctcggaagagaaattcaactctccttctcttctacttttttttccttctatcatactttttcttctttaattattttttttttttattgggtatcttattgagatacttcaaatggagatgctctaataattaatgggaatgtgtttctaattaaaaagataacatctttctttctatatttttgtcgtcatataacacacctcaactcttttaagtactcgtgttgaattttgttttttgaaaagacaaaactccttataatcaacgtaattattaataacaaggagaaaaaaagtccaaagaaaaaaaaaagaaagctttttgggaacataaacaccatcgaaggagggtgggaggtgttttatgttcatgggtggagcttcttggccaacctgaccccattcatcatatcattacccactttcttctcctaaattattctctcttatctctctctctctctttttattttctttctttcttaattcatctaaactctctctgcttttgcttttcgtaattccttacatttcactcaatattaatccccagaatctccgatccacccacaaatttagcaattttctgagatttgatcatttgggtcaccaaaaaatcttgtctttttgatctgggtttaacgccaataacat

SEQ ID NO: 10984 - DNA, 3000 bp, Unknown
  misc_feature (1)..( 3000): cDNA_ID_3034470_gDNA_ID_2214470_Annot_ID_182995 3000 nt of promoter + ATG
actccactcagtagcaaagctgttgggttcgccaggttctacacaacaccagcaaagaataacaaacatgtggatcataagctaaaaatcgaatcaagttctgatattgaatagtggcaagataatatctaaacccactgtatttgaaaacatgatttatttattagactccttaaccctcaatgctaggttggccagttattaacatcattcaagtactacaagcacgatcatccagtaagaaccattctacaatataaactagacaataatccattctacaatgaaagcttctgaatgttcaaccaagaaatggcatagaagagagtaatggagaatcttctctcaggaacagcttctatcatacttagttttagggtaaaagtaggcaagttcacttaaatttgtcaaaatctgtaatgcagtgtctaaatcctatttactctaataatttaacaagttaacaacaactctatgcatcaaacgaatttagaacgatgataacatctaagaatgatgactaaccattccagcaatatcaggtgcagagccgtgaacagcttcagcaagggcaataccatcctccccaatattcatactggaacaaaacataataagagcataagatgattgcctcattttcatactagacaataatctgtgagacgaagaaacaaatgttacctaggagtcagtcctagtcccccaacaagtccagcacacaaatcgctgataatatctccatagagatttggcatcaccaagacatcaaaaagtgctgggtttttcacaagctgtcagaattaagattatcaatcccacattgttccataagtaaaattagcgaaaagcagacccaagtatgggttgctgggaaatctaaccttcaaaatcaacaagattatcccaaatactaacttaattaacaatgagattgacctttacataatttggaacaaaagatagggtggatatcatgttatagcttaccatcatacagcaattgtcaataacaaccttctcgtaatatatctcaggatacttcgcagcaacttcatcacaacactgcaaagcaggaagcaaataaaaacttgtctcagaacaaaggttaagaaaaagaagccagtgagagactagaaaaattgctatgttcccctaattgagaagtgctaatgtattctgagttccaaaatgagctgacctgcaggaaaagaccatcagttttctgcataatgttggctttgtgaattgcagaaactttcttccttccgtgagtcttggcataaagaaaggcatactcggcaactctcatactcgccttacgggtaataattttaagactttccactacacccttgacgacctagcaaataaaaatgacaaatcatcaacatggctctaaaaatgatactagatacagattcactaaaatgacagaacaatagactaacctggtgttcaagcccactgtactctccttcagtgttctcacgaatggtaatgagatcaacatcatcataacgggttttgtaaccaggaagactgtaacaaggcctaacattggcatacaaattcagctctttcctaagagtaaggttcaaggaacggtgaccctttccaattggagtagccattggtcctttcaaaccaaccttgtttttaagcacagattgaagattatcccatgtcaagaaactattggttctaggatctacttcagtaccaacaaactgttcgtcccaatcaataaccacatcagcggcagtaaacacctggatcagcataaagggaaaacattttcagaaccatcagctataaactaaaaaaaacaaactttatgattcaaatctctcccttgacacgtctcaaaaagtattcagacattatggttcctaagagtatccagaatctataacaaaatttatatggtaacataaattacacaacaccaaagtagattgaaaaaagggacctgcttgacagattcagcgatttcgggaccgatcccatcaccgggaaagagagtagctttgatcggagtggaggaggagaagaaagccctagaaacggaaatgaacggaccggagctagaactcgaagtcccgagaatctggctcgatccgttaccgataagccgtctcgcgagaaatgctgtcatggtcatcgcttccagcctcagaaggacgcagagagagaaagagaggaaagaggagactttttgctgcgttggacctgaaaaagtttacttttataccttctctagctccagcagagaagcagagaacatttcgatttccatgaaataaaacggcacaaagttagtgtctgaaaataagaaacggcatcagcctatgttcttaaacggccatggtcaaatgaaccggatatcaataaattataaaaaccggtcagatgaaattaagcattcagatcccgataagcagtgtgacactgaaacagcgaaaggagctctctctcactccgaggcgatttcttctgtctcgacgatcttgcgcttttcacatttgaatcctccaatccattacttcttctccgatcttttattccggtgatcctttggattatgattatcgagatccattgctgcctatttgagtcttgaatcatttgtttgcgttctcatctgtgcttagttatgtgattctccgataagatttagttatgtgattaatgcatgtatgtatcaatccgaattttggtgattcgttgtctattattaaatacgtcaatctccatttgtaatccctggttgaaataatagctatcttgtcatggagatcatcaacattacatttactacactacacacataatgtcacatatgatcttagtatatgtactcttttgtaccagtgactagaacaactgtgagtgtgggttgaagtttttaatatcttgttaaaatcgaaagtttttgactcagatactacttggttttgtttttgtcactgtttcaggtacatctcaagtcttacaaca

SEQ ID NO: 10985 - DNA, 3000 bp, Unknown
  misc_feature (1)..( 3000): cDNA_ID_2705162_gDNA_ID_2214470_Annot_ID_182994 3000 nt of promoter + ATG
tgcacaaagatttgcataccacctctcaacctcagaaccaagtggagagttgactctttctggatgttgtaatcagccaaggtaaggccatcctcgagctgtttaccagcaaagataagtcgttgctggtctaaaggaatgccttccttgttctggatcttagccttgacattatgaatggagtcggaggtttcaacatcaagtgttatggtcttttctgtaagagtctttgcgtagatttgaattgtcatctgtaaacaattttttttatgggagagaaaggaggattctgaatggtaagaaccaaaaagatcaggcgaaaaaagatgatgagaagagatagaagaaacaaataccttgagagagagtagtagtacttcacagaaaacttttgcagaacgatcgatttagggtttgagtaaaagcgtttctcagtttatatagaagaggaaaagttttggatttaaatcagctttcgataattataaaatattcgacttaatctgttaattaaataattcgaaatttagtattatcttgtttatcgctttgatttttttataaaatgcgaaccaaaacaattcttgctttgattatttttataaaatacgaaccaaaacaattcttgctcttctgatatggcgtgcacctcaaaatagaaggttctgaggggtggcactttagtctttcttcaccttacaagatcactagcatctgaaatcgcttggaaaatgaaatattcctgaattgcttagagtttagacttcaattagagtaataaaattccactctccaaaaacattcatgcattgcacaaagctatatatataatcaaacctttactaccaaactttaagagtttgtttgcagaattcaattattagagactttcaaaccgaaagactcaaaaataaaaagttgctcaacatagaaattgaagtccatgcttctattattgtgtcgccatgatggaactcatgtaagcagacttcttgccagatgctcccgagctgttgctagcgcttgtgttagtgtctgcaataccgaaatgtaaacagagggttcaaattagaagttcacgtttgtgtttatagccaaaccagaccaaagttatagcaaaactaaatcaagactattgcttttccacagggagatgtaacaataatagtcaaaagtgtcgttacctgttcagagagtgaaccactagcttctgtgctctgcattgctactttccccgcaatgacgtttggatccgtttcaagaaccacccttaacacatattccataataagccacaatcagacaatagctaactgctaagatatatgggacaagcttaaaaaaggttgagcaaatctttagcatgcttaagacttttatgtaattgtcgtgtagggctaaactattaaacttgcatacccttgatcgaccatttcatcaaggcatagaaagatgagatccaagttctcaagggcttccatcttttccacattgctcctggtaaaaaaaaaaagggatgcatcatactttagttgtggagatggttgatcaataaataaaggcatattcagttgtcaagtcaaacaaatacctcagaagaagtgcaacagcatcaaaaaagccttgaagaacagaagctaagatgagctcgttttcattttcacctccagtaacaaagaagtgaaggtcctgggcaaacttatagacaataatattgctgtccaacagtgtgatctcagctgcacataaaacatcgatatggctatttgaaagagataagtatataagcatacacgaagtcaggaaacatgatagaaattgtgtagatgaaaaatgttatgtagtcttaccttctgtacgagcattggtcttagaggtctttgagaatacatacttctcaaaacttaacttggcggcattagttggccagtcatccgagtaatacttgacagccacacgctttccttcagagtctagaagaagaatgttctttaccaaaggacaagaatcctattcaatgtacattggaaagtcagtaattaagttccagtccaaaaaaagagtaaaactcctacaaagctgtatgattgcggcaacatacacacattctaacagaatacgaaatacaatcatataatgcatatgtacttacaggagacattgttgtaagacttgagatgtacctgaaacagtgacaaaaacaaaaccaagtagtatctgagtcaaaaactttcgattttaacaagatattaaaaacttcaacccacactcacagttgttctagtcactggtacaaaagagtacatatactaagatcatatgtgacattatgtgtgtagtgtagtaaatgtaatgttgatgatctccatgacaagatagctattatttcaaccagggattacaaatggagattgacgtatttaataatagacaacgaatcaccaaaattcggattgatacatacatgcattaatcacataactaaatcttatcggagaatcacataactaagcacagatgagaacgcaaacaaatgattcaagactcaaataggcagcaatggatctcgataatcataatccaaaggatcaccggaataaaagatcggagaagaagtaatggattggaggattcaaatgtgaaaagcgcaagatcgtcgagacagaagaaatcgcctcggagtgagagagagctcctttcgctgtttcagtgtcacactgcttatcgggatctgaatgcttaatttcatctgaccggtttttataatttattgatatccggttcatttgaccatggccgtttaagaacataggctgatgccgtttcttattttcagacactaactttgtgccgttttatttcatggaaatcgaaatgttctctgcttctctgctggagctagagaaggtataaaagtaaactttttcaggtccaacgcagcaaaaagtctcctctttcctctctttctctctctgcgtccttctgaggctggaagcgatg

SEQ ID NO: 10986 - DNA, 3000 bp, Unknown
  misc_feature (1)..( 3000): cDNA_ID_3038901_gDNA_ID_2214470_Annot_ID_182993 3000 nt of promoter + ATG
ttccctttatgctgatccaggtgtttactgccgctgatgtggttattgattgggacgaacagtttgttggtactgaagtagatcctagaaccaatagtttcttgacatgggataatcttcaatctgtgcttaaaaacaaggttggtttgaaaggaccaatggctactccaattggaaagggtcaccgttccttgaaccttactcttaggaaagagctgaatttgtatgccaatgttaggccttgttacagtcttcctggttacaaaacccgttatgatgatgttgatctcattaccattcgtgagaacactgaaggagagtacagtgggcttgaacaccaggttagtctattgttctgtcattttagtgaatctgtatctagtatcatttttagagccatgttgatgatttgtcatttttatttgctaggtcgtcaagggtgtagtggaaagtcttaaaattattacccgtaaggcgagtatgagagttgccgagtatgcctttctttatgccaagactcacggaaggaagaaagtttctgcaattcacaaagccaacattatgcagaaaactgatggtcttttcctgcaggtcagctcattttggaactcagaatacattagcacttctcaattaggggaacatagcaatttttctagtctctcactggcttctttttcttaacctttgttctgagacaagtttttatttgcttcctgctttgcagtgttgtgatgaagttgctgcgaagtatcctgagatatattacgagaaggttgttattgacaattgctgtatgatggtaagctataacatgatatccaccctatcttttgttccaaattatgtaaaggtcaatctcattgttaattaagttagtatttgggataatcttgttgattttgaaggttagatttcccagcaacccatacttgggtctgcttttcgctaattttacttatggaacaatgtgggattgataatcttaattctgacagcttgtgaaaaacccagcactttttgatgtcttggtgatgccaaatctctatggagatattatcagcgatttgtgtgctggacttgttgggggactaggactgactcctaggtaacatttgtttcttcgtctcacagattattgtctagtatgaaaatgaggcaatcatcttatgctcttattatgttttgttccagtatgaatattggggaggatggtattgcccttgctgaagctgttcacggctctgcacctgatattgctggaatggttagtcatcattcttagatgttatcatcgttctaaattcgtttgatgcatagagttgttgttaacttgttaaattattagagtaaataggatttagacactgcattacagattttgacaaatttaagtgaacttgcctacttttaccctaaaactaagtatgatagaagctgttcctgagagaagattctccattactctcttctatgccatttcttggttgaacattcagaagctttcattgtagaatggattattgtctagtttatattgtagaatggttcttactggatgatcgtgcttgtagtacttgaatgatgttaataactggccaacctagcattgagggttaaggagtctaataaataaatcatgttttcaaatacagtgggtttagatattatcttgccactattcaatatcagaacttgattcgatttttagcttatgatccacatgtttgttattctttgctggtgttgtgtagaacctggcgaacccaacagctttgctactgagtggagtgatgatgttgcggcacctgaagctcaacaaacaagcagagcaaatccacagtgccatcatcaacacaatagccgagggaaagtatagaactgctgatctcggaggttcctcaactacaacagatttcacaaaagccatctgtgatcatctctaaacacccgtgaaaaaccataattctttccttacttacttattggatcttcctcttggattttcactccaaaatttttctacatattgatcctcttcctatgaggagaaacaaagccgccataggctttagacattgacttgtgttttccttagatttgaagttcttgcagagctgtattacttcttctgcctttaagatccataacaaaagaaggatacagatattggaagaatccatcaaaaggttcacatttacagtttgtggattttgcctgaattgtttggcgttatgtcttattctctgtgaattttcaacaataataatatcgtcccttttgtccttacctaaattgtttgcctattctctgtgaatgaatgaatacataactctcaaaccctgaaaagtgaaaactttcaatgctgaaacaaaccaacgtggatgattcaggacttttcaatgccaccgacaaattcaatctttttcctattcattttgtaagttgcaatgctgtcacatttggttttctcattgtttttaactctctcttaaagaaacaacttaattataatttttatgttcttacaacaagatccaatagacttttggacatgtgttgacacttttctcaagtgggttggtgggatagggacgtatatagctgcatttgacaacaacactactctatttcatcaattatttcgttactcataaattttgtttcagttaacttttctctacaaatgaagttgaatgaaatgaactatactaaaatttggtttaatatagaattagaaattccaatggcaaatttatgcatgattttgagctaatatataaatatacattattttgcccaaaaaaaaagataaatatgcattaaaaaataatatatataaaataataggaagaagaagaatctatctttggtatacctactttggtttcagagcttataaacacaaacacttcactcacacaaaacacttgctcctccatttaccagatctgaacctcttccctttcctcgaaaatccttctaacatcatcatccatg

SEQ ID NO: 10987 - DNA, 3000 bp, Unknown
  misc_feature (1)..( 3000): cDNA_ID_3038905_gDNA_ID_2214470_Annot_ID_182992 3000 nt of promoter + ATG
cctcactaactgcactctaactaagtcacagcagctcgaatttgctacattccgtcctagattagatacagcttaacttatagctaagagttaaaagcttattattgtttgatgatatcaaccactcatctaattatagcataaaaactcttatccaaatccaggtttaccaaaccgtttgctttgttatattgtaataagaagattatcatacattttgtatcagtctcaagtaaactaattccggtggtttaaccctcttggttctctgtgttcataggtgatgcatttgtgggagggtttctgtcccagctggtgcacggaaaggggattgaagagtgtgtgagggcaggatgctacgcgtcaaacgtagtgatccagaggtctggttgcacttaccctgagaaaccagacttcaactaaatctagaagtcgcacaaatcatccttttagttttatctctgaatgagattttggtgattattattatacgacccaaataaactctatgttgttttcttgtatcaccttttgaggctttaagctattattgagtgtgtgttttggcttggttttattgtacctttttatgattaataaatattattactatactaggccgagtatgatattccaaatgtcaaaatgttcataacttgttatatcttcatggatgtaattatcctctatttttgtttgaacttgcttcatttcatgaaataattgaatgatcattattccctataatgtacattactgttatattaactagtttctctgttcgaattctatttggttcggttcaacgaaacaacattggacattcctatgcaaagaaaatttgcagaatcttttgtgtcggcacatgtatagaacaatttctattgaatcatggaaatgacaagtataatgtctcgttttggatgtatttgataatgtaaagtaggaccagtatgactcgtaaaagacttttgactttggacgatatcaacaactttgacttttacttcacttgtacagttctactttcttatcttctacgtatactaatcaaacgaatttgtgcataaattggcatgggaaaggccacgagtcaaatatgatttgatccattttagttttaacatctattggtacgtacgtgaagttacgagatttgagtgaaggcgaataatatcaatacgaaaagtacaaaaccgggatcaaaccgcaaattgtaacacagcaagcgtaagcaacacgacaaagtggtatggattagtttaacataatcgtataaataggttaagttaccaaggtttaaggtatctcaacaagtggtacaaattaccaaacaagattttaagaaacatatagatcaatcgggattcggaaaccaataccgaggatttctttaattcattattttttgtgtgaaaatgctaaactttgtcgttaaatttatgtactctaggttctaggaagatttaggaaatctcctaggtgacccaagtgaaatatcccttccacttccccattgcaaatctcatgattaccataaacaaataagattagtagtagagaactatgcttgttaacataaacattaatgtaattatgtaagattatattttgaaccactttggaaagtggaaaccattttggcatcatgggccgactcacccaccttaagaataaaacttcgtattgttatagattttcaatcactgatatttaacaatggtttttttttttttgcaacagatggttgatgttagatgatagtaagttagtaccattaaatataaaacaacattaatgaatacttgaaaattataaaactgtgactatattatctatacataatctataaaaaatatttatttttcaaaagctcaaacattggttgagttgtctatcataaatgcataatcatatacatcttgagtcactcaccgtcgtttattgtagactttgtagatagttttattttgtatgttaaaacgtttcaccatcgtttattcgcattccattaatttgaagatttattctgtcatagtaaaattccctaaacaatagaaaatgatgttgttgaaataagtaagattttattactaaataagaccataactcataagtgatttagatacactgatcgatctgttggctacttttctaagcacctcaccgttgaacaagtcaaaggaaaaagaaatgaaaacgttgtttttatgtgtgattgtgtgtctaataaaagaatattaattttggaaacatcttttaatagtaacaaataattcatttgttttgtccaatttaaattctcagttcttcgttctttcgctgactttagctatctctctctgtaaagacttcgttttttttttgttgccgtgtgacgacttcttcttcctcttcttcttcgacctctttctctcggaagcttagcttcttaaaatccatttctctcggaagcttagcttctcaaatcctcgatctcttttgtatcgtgattcattaaccacttcatgataattataatcttccttctcttctgacgattgaattacatcttcttctgatagctgttctgatttttttctgtatacaaagtaaattcaaaggtgagagttgtgtcatcttttgctttttatatacttgttcaataagtcaaagttctttatgttgctgttgggttttagtttattggaatcaacttgcgaaatttgattacttttagcttcgagatcccttctattactcactggaacttagggtttgtgttacttggaaaagaatttggatctgttgggtctaaaggccttcctctctgttaagtggttttgtacttgggggaagccttaactttggaaatgcttgtactttgcagattagttgttcgataatatgcttcaatggttttgattttgtggttcggtatatgttatatgatcattatcagtgttttattggtgtcctgcagtggacaaacatcggtattttaatctcctctcgataatg

SEQ ID NO: 10988 - DNA, 3000 bp, Unknown
  misc_feature (1)..( 3000): cDNA_ID_1027032_gDNA_ID_2214470_Annot_ID_182987 3000 nt of promoter + ATG
atccttatccgccagattacgaaaatgaggagcttgatccgagagaggcatagtgaaagcttatctgtgaattcttaggatttgaatctgaatactcaggctttttgattccttctccgttacatgctgattcaattttgagctcccctgctagtgtaaatctcctcagctcggaaacttagggtttagtttggggtcctttgctcttcgttgcgtaagccatgtttaagaaaatcatgaaaggtgggcatcgaaagccctctaaatccgaagctaatgaaccgtctagttatgggattggtctacctgataataggtcaggtcctggctccaatgtggtcgttagtcacgcttctcgtggtgcattggttaattcttctccgtcgccagtgactgcaactccacctcctccgcctttgggctcggtggagccactcccgttgtttagagatgtgccggtttcagagaggcaaactttgttcttgaggaaacttcagaattgctgtttccttttcgatttcactgacacgattaagaatgctagagacaaggagattaagaggcaaacgttgttggagctggtggattttatacagtctggatctagtaagatctcagagtcgtgtcaggaagaaatgattaagatgatttctgttaatattttccggtctctcccaccagcatcacacgagaatacgggtcaagagcctgcagatcctgaggaagaagaaccttatttggaaccttcttggcctcacttacagctagtttacgagttgctcctgagatatgttgtttcgactgacactgatacaaaggtggccaaacggtatatcgaccattcttttgtgttaaagttgctcgatttgtttgattctgaggacccaagagagagggagtatttgaaaacgattcttcataggatatatgggaagtttatggtccacagaccctttattaggaaagcaatcaacaacatattctataggtttatttatgagacagagagacacagtgggattggggaactcttggagattctaggcagtatcataaacgggtttgcattgcctatgaaggaggaacacaagctattcttaatcagggtgttgataccattgcataagccaaaaccaatcgttgtatatcatcagcagttatcttattgcatcgttcagtttgtggaaaaagattataagcttgcggatacagtaatcaggggattgttaaagtattggcccgtgacaaactgctcaaaggagaatctcttccttggagaacttgaagaagttcttgaggcaacacagcctgtcgagttccagcgttgcatggttccattattccaacaaattggtcgctgtctcactagctcccactttcaggttagtcgtcgtgtttgcaatggtgtttttttttaatccccacatggaaggcttattatgcatattaccttaaatatggagattttgttatttagctcttttgactctggtctgatttcttccctgaaaagaactagtgcttcatcaagtttagtgcaaattgtttttttttgttctgtttttctttttgctttgcctctttctcttcatttttgccacatgttgattttcattcataaaatgatcttgttggtactaactctcataagtatgcgttatatctcatgcttttgatagcttctactctgattaaatccttggattcctagatcatcttcattttccatgattcagttgtttcaaaatttatggagtgaattaactctctgaatgtattgttactgtgcttactgatttctaggaatcacacaagtttcccgttatgtctttgtgcaacagctcaaactttcctagaattctatgtggggtttgccttatgctcatatgtatatctcataaatccgatacaggttgcagaacgagcactgttcttgtggaacaacgagcacattgtgggtctaatcgcgcaaaaccgaagcgtgatccttccaatcatatatcccacactggagaagaacatccagtctcactggaaccaagcagttcatggtctaaccacaaatatcaagaaaatgttcatggaaatggatcctgaactgtttgaagaatgtcagagacagtatgaagagaaacaagcgaaatccaaagaagtagaagaacaacggcaatatacatggaagagattagcagaagcagcggcggagcgagatggaggaggaggagaagaagatcatatgatcacttcctagatcgatcaaaaagggtataattctttcacttttttttttgtttgttctcattttatcaaatgagttactatattaattttcttatcaaacttggatttgtttgttgttttgagaatcatgggttcaaaatctgattgctcagagaagtagagagagagaagtgagccattactatcagagaatatgtctttagtactaagaaatgtgtttgtgatcttctgtctaattttgttcgtggaaaggcactttaaaattttgtaaaattttaattatatatactgtggatggatgtttgtagcttgtgttattagccatctcaaaatccaatttggttttcttgttttgatccattcttaccctactttttgtgttatttgtatcaaaactttgaatttgtatataggaggaaactagtcttccaactgatccaggacaatgtatttgattcctcaatttccaaaagataagaagagttttcattttaactcttaaggtaaactaaacacaatatcgtcttctttattattaaccaaattggttcagagccattggaccgaaaacatagaccgagagaatataccaagttatatacagttaattaactgcgccaattcaccacgagaaaacctaaattttattgaggtagcttattgcacggcggcgattagttgttttacttgttacaagaaaatcattccacggcggtggagaaaaaacaaaagagagcgagacaaagagagactacaatg

SEQ ID NO: 10989 - DNA, 3000 bp, Unknown
  misc_feature (1)..( 3000): cDNA_ID_1440942_gDNA_ID_2214470_Annot_ID_182986 3000 nt of promoter + ATG
tggagaagaacatccagtctcactggaaccaagcagttcatggtctaaccacaaatatcaagaaaatgttcatggaaatggatcctgaactgtttgaagaatgtcagagacagtatgaagagaaacaagcgaaatccaaagaagtagaagaacaacggcaatatacatggaagagattagcagaagcagcggcggagcgagatggaggaggaggagaagaagatcatatgatcacttcctagatcgatcaaaaagggtataattctttcacttttttttttgtttgttctcattttatcaaatgagttactatattaattttcttatcaaacttggatttgtttgttgttttgagaatcatgggttcaaaatctgattgctcagagaagtagagagagagaagtgagccattactatcagagaatatgtctttagtactaagaaatgtgtttgtgatcttctgtctaattttgttcgtggaaaggcactttaaaattttgtaaaattttaattatatatactgtggatggatgtttgtagcttgtgttattagccatctcaaaatccaatttggttttcttgttttgatccattcttaccctactttttgtgttatttgtatcaaaactttgaatttgtatataggaggaaactagtcttccaactgatccaggacaatgtatttgattcctcaatttccaaaagataagaagagttttcattttaactcttaaggtaaactaaacacaatatcgtcttctttattattaaccaaattggttcagagccattggaccgaaaacatagaccgagagaatataccaagttatatacagttaattaactgcgccaattcaccacgagaaaacctaaattttattgaggtagcttattgcacggcggcgattagttgttttacttgttacaagaaaatcattccacggcggtggagaaaaaacaaaagagagcgagacaaagagagactacaatggctgttccaagaggaggaaatggtttgaatgaagaagaagatgttgacggagaaaacgctatctttgaggaaaacggtgttgactacgacaccgattccgagcttccctctcacctccgtgacttggccgccgctgctcaggccggagatgtcgccgccttgcgcaccgccatcggtactttccttacttcttctcgttgctgcttttaacaaatttcaatttcaatttcatcttcaattgcgtattgcttgattagctggtcagaccaaaaaagcctcaaaatttcccacattcattgcagaagattcctctagtttgatcttcgtctcatccttttaagccaccttaagggcttcattttccatttgactcactggtttgctcaatctagtttaggttcacttaggaaggataagagaaacctctagttttatgcctatgtgtgtattcatgtctatctttgttttgtttgttgcttggggctgtgattgatctgacgtaagatttgcatactcttttgaactgatgaaaattagtttagtctagatcatctttctactggtagaagtaatggtatcagattttgcattgtgtggatatgtcttaatttgtgcactttctgctgtttttgagaagatgaaatgtttaaaggcaatcatattccttttctgattttgatagacaatttgaatgggagagtcgatgagccactcgaggataatgactcggcacttcacttggcatgtctatatggtcacctaccttgtgttcaggttgctttttctttgtcatttccatcgactctgatagctaatgtatctgtaaattaatttttgtattgattttcactgcagctgctcttagaaagaggagctgatatggaagtgaaagatgaagacgaagcaattcctctacatgatgcttgtgctggaggtaaagtttgtcatggtcctaccattcttttggtaattctgtctcacggcatggtcacattctgtggcttattgttctttctctttaacttgggctcgcaggatacttggaaatagtacagcttctttttagccgagctagtagtcctgaatgtgtgaagagaatgattgaaacagcagatatagaaggtgatactgtaagtattctcaatcttcaattgcctcattccctctagctcttgctctctataatgtaattcatcccaaagtttttcttgttcacagcctctgcatcacgcagcaagaggtgaacatgttgacgtggttaggtttttgctgggttccggggcttcaccaacgacacaaaactcctatgggaaggtgaaaaaaaacatttgaaagcaatttctatctttggcttttgaagtatggttagcgataataacaaggttgtgataatgcagacaccaggtgaattagctgatttaaacactgatgctaagaggatactcgaagaagcgataaacaactcaatgatctcctagtgatgctgcaaatctgcagagttcattggccagttttggcgactcagtgaagtagtagcaaaatgttaactttttcttaatcctgttttttggtggtttcatatacaaaaggtttcaaattttgatacctatggaattaagaacttccgtgtcggttttaatcatgaaattattatcagatttgagtagtacaaaatatactagtttctttgtaagaaaactggaatcaattttaaacatttcaaacatctatattaacaagaaggaaattgagcggtttaataagttggtggattgaagtgtgaatacttgagaaataaaagactaaaacagtaaaaagtaataaaatatgatccaccaatgagcagctttgaacttgatagcaagcagagcacttattctgcctctttcctttctttttggctgtctccggcgagaagagattttccgggggaaaatagcaaaagctcggttttagtttctgtttagaaagaggatacagaatagtgattactaacatcttctccgatg

SEQ ID NO: 10990 - DNA, 3000 bp, Unknown; identical to SEQ ID NO: 10982
  misc_feature (1)..( 3000): cDNA_ID_3038912_gDNA_ID_2214470_Annot_ID_182985 3000 nt of promoter + ATG

SEQ ID NO: 10991 - DNA, 3000 bp, Unknown; identical to SEQ ID NO: 9339
  misc_feature (1)..( 3000): cDNA_ID_3041372_gDNA_ID_2214470_Annot_ID_182980 3000 nt of promoter + ATG

SEQ ID NO: 10992 - DNA, 3000 bp, Unknown; identical to SEQ ID NO: 10989
  misc_feature (1)..( 3000): cDNA_ID_1440942_gDNA_ID_2214470_Annot_ID_133056 3000 nt of promoter + ATG

SEQ ID NO: 10993 - DNA, 3000 bp, Unknown
  misc_feature (1)..( 3000): cDNA_ID_3038905_gDNA_ID_2214470_Annot_ID_133062 3000 nt of promoter + ATG
ttaaattctcagttcttcgttctttcgctgactttagctatctctctctgtaaagacttcgttttttttttgttgccgtgtgacgacttcttcttcctcttcttcttcgacctctttctctcggaagcttagcttcttaaaatccatttctctcggaagcttagcttctcaaatcctcgatctcttttgtatcgtgattcattaaccacttcatgataattataatcttccttctcttctgacgattgaattacatcttcttctgatagctgttctgatttttttctgtatacaaagtaaattcaaaggtgagagttgtgtcatcttttgctttttatatacttgttcaataagtcaaagttctttatgttgctgttgggttttagtttattggaatcaacttgcgaaatttgattacttttagcttcgagatcccttctattactcactggaacttagggtttgtgttacttggaaaagaatttggatctgttgggtctaaaggccttcctctctgttaagtggttttgtacttgggggaagccttaactttggaaatgcttgtactttgcagattagttgttcgataatatgcttcaatggttttgattttgtggttcggtatatgttatatgatcattatcagtgttttattggtgtcctgcagtggacaaacatcggtattttaatctcctctcgataatgaagtgtttcttgttctctggtggggataagagaggggaacagaagacccctatttcggtttcattgacctctatcttctctgaccgcgaaataaaccgaagcgggtcagagttcaactctcgtgatgtctctgggacgagcacagaatcatccatggggaggaagaactcgtaccctccggtgtctactagagcaagtaatctcagagagttcagcattactgatctcaagtctgcaacaaagaactttagccgatctgttatgattggagaaggcggtttcggttgtgtcttcaggggcacagtgaggaacttagaggactcgtcagttaaaatcgaagtcgcagtgaagcagctcggtaaaagagggttgcaggtatgtctgttttttccaatcttgttctcaagatctgttactcatccactggtttaacactattatctcatttcttggatgttgcaggggcataaggaatgggttacggaagtgaacttcctcggaatagttgagcatacaaacttggtgaaattgcttggctattgtgcagaagatgatgaacgtggaatccaacggcttttggtttatgaatacatgcctaaccgaagtgttgaattccacttatcccctcggtcactcacagttcttacttgggacctcagactgagaatcgcccaagatgcagctcgcggattaacatacctgcatgaagaaatggagtttcaggtaatatgatgactctgctacgttactgatctcatttcactctcttgactaacttttatttattggcttttcagataatattccgcgatttcaagtcctcgaacattcttttggatgaggactggaaagcaaagctctcagatttcggtttggctcgtttaggtccatctgaaggattaacccatgtttctactgatgtaagttctgcattcacttcttttggttgcaagattgaaaaacaggtatgtttttgaacgggtttctttggctttattaggttgtaggtacaatgggttatgcagcacctgaatacattcaaaccggccgtctcacatcgaaaagcgatgtgtggggttatggagtcttcctctatgagcttatcactgggaggcgaccggtggacagaaacagacccaagggagagcagaagcttctagaatgggtgagaccttatttatctgacacaaggaagttcaagctcatattagatccaaggctggaagggaagtacccgatcaaatcggttcaaaagctagcagttgtggccaacagatgtttggttaggaactcaaaggcacgtcccaagatgagtgaggttttagagatggtgaacaaaattgtggaagcttcttcaggaaatggcagcccacagctagttccgctgaacagtgtaaaagcttcgagagacgcgagaggaaagaacaatggtggtggcggtgaaggaggttggtttggcaagttatggaatccaaagacaataagagcttgttgactgcttatagaattcaacctcttcttacagcaaaaaaaagagtcaagaaaggtttcatggagattccgaaggttgaagattctagcgagatcaagatgaagctcatatacatacataaagataattatatatgaagatttgtgaaagattctaaaatgatgaaatatgatttttgtatgaacttatgaatagtaaccacagctaaattagtaagatatgtatattaagcaagaacggcttatcagagttttgttccaaagctgatcaatctactcgtgcttaagtgtatatttgtggtaatgtgttaagagttcctattaattaccataagtaaatcacaaacataaataaaatgaaaataattatgggctttaaggtctggaggactactgaaatttgggagaagtagttggaaaaagaatattagtcgataggtaggaaattgatattgcttgtggaatggaggaaaaaattgaacgaaaaagaagtttctagaattctaatcacataacataaatagggtgaatatttgggaaaagtaaaacaataggggtcggtttgatattactagaagataagaaacaaaaaggaaaataagaataaaggaaaaaaaaagagctctcttttccaacaagaaacgtagagagatataattagagaaaatctgtgctctttcagatcccattatcacaaatccatctctctctctctctcagagaagaaaccaaagaagaagaaaaagctctcaactttcttcgatttctcagggaactctttcgttaatctcaaactcaatcatg

SEQ ID NO: 10994 - DNA, 3000 bp, Unknown; identical to SEQ ID NO: 10987
  misc_feature (1)..( 3000): cDNA_ID_2716988_gDNA_ID_2214470_Annot_ID_133063 3000 nt of promoter + ATG

SEQ ID NO: 10995 - DNA, 3000 bp, Unknown; identical to SEQ ID NO: 10986
  misc_feature (1)..( 3000): cDNA_ID_3038901_gDNA_ID_2214470_Annot_ID_133064 3000 nt of promoter + ATG

SEQ ID NO: 10996 - DNA, 3000 bp, Unknown; identical to SEQ ID NO: 10985
  misc_feature (1)..( 3000): cDNA_ID_2705162_gDNA_ID_2214470_Annot_ID_133065 3000 nt of promoter + ATG

SEQ ID NO: 10997 - DNA, 3000 bp, Unknown; identical to SEQ ID NO: 10984
  misc_feature (1)..( 3000): cDNA_ID_2716986_gDNA_ID_2214470_Annot_ID_133066 3000 nt of promoter + ATG

SEQ ID NO: 10998 - DNA, 3000 bp, Unknown; identical to SEQ ID NO: 10983
  misc_feature (1)..( 3000): cDNA_ID_2705158_gDNA_ID_2214470_Annot_ID_133069 3000 nt of promoter + ATG

SEQ ID NO: 10999 - DNA, 3000 bp, Unknown
  misc_feature (1)..( 3000): cDNA_ID_2990667_gDNA_ID_2214470_Annot_ID_182999 3000 nt of promoter + ATG
tttttccttctatcatactttttcttctttaattattttttttttttattgggtatcttattgagatacttcaaatggagatgctctaataattaatgggaatgtgtttctaattaaaaagataacatctttctttctatatttttgtcgtcatataacacacctcaactcttttaagtactcgtgttgaattttgttttttgaaaagacaaaactccttataatcaacgtaattattaataacaaggagaaaaaaagtccaaagaaaaaaaaaagaaagctttttgggaacataaacaccatcgaaggagggtgggaggtgttttatgttcatgggtggagcttcttggccaacctgaccccattcatcatatcattacccactttcttctcctaaattattctctcttatctctctctctctctttttattttctttctttcttaattcatctaaactctctctgcttttgcttttcgtaattccttacatttcactcaatattaatccccagaatctccgatccacccacaaatttagcaattttctgagatttgatcatttgggtcaccaaaaaatcttgtctttttgatctgggtttaacgccaataacatatgggaaacattagcagcagcggtggtgaaggtagacgccgtcgacggcgaaaccatacggcggctccaccaccacctcctcctcctccttcttcttctcttcctccaccacctctacctacagaaatccaagctaatcccatcgttttcgctgccgttactccctatcctaatcctaatcctaatccggtttaccagtaccctgcttcttactaccaccatcctcccccgggagccatgcctcttccgccgtacgaccaccacctccaacatcatccaccgcatccttaccacaaccactcttgggctcccgtggcgatggccagatacccttatgctggtcacatgatggctcaaccgactccttacgttgaacaccagaaagccgtcacgattcgtaacgacgttaatctcaagaaggagtctcttaggcttgaacccgacccggataatccgggtcgctttctcgtctcctttacgtttgatgcaaccgtctccggaaggtagatttcactttctccctttcgttgatttcgtgatccatttgagcagataacacgtgaattttgttgtgttcttcctcgtgactatgtaatttggatcttcttattgcaatttgatcaaatcttcttcatgtgtaattgaattaagcttatgttattatgttggacttgtgaaaaataggattagtgtcattttctttgctaaagaatccgaagattgcaaactcacagcgacaaaggaagatatactgccacctatcactctagatttcgagaaaggacttggtcagaagtttaaacaatcatctggttctggtatagacttttcggtctttgaggacgttgagctgttcaaagcggccgcagacacagagatctatccattagcggttaaggcagaagcagctccctcaggtggtgagaatgaagaagaagaaaggtcggggtcgaagaatgcgcagattactcaagcggtttatgagaaggataaaggagagattaagattagagtggtgaagcagatactatgggttaatggaacgagatatgagttgcaggagatttatgggattgggaatacagttgagggggatgatgattcagctgatgatgctaatgatcctggtaaagaatgtgttatatgtttgtctgaaccacgagacaccactgttcttccatgtcgacatatggtaagtgaaagctgatgatttactactattatgtgatgatggacatatatatagatgttaaaaattgtttgggtttggtggtgcagtgtatgtgtagcggatgtgctaaggtattgaggtttcagacaaatcgatgccccatttgcaggcaacctgttgaaaggcttttggagataaaagttcacggtaacaacggaagcgggaataacaccggacagggagaaacagttgaacaagagtagctaaacacggccgagtatggattgaaatgccatcgaaatattagtagtatatgcatgtttgatccttgtatgttaacaacaaaatgtgtgattgtcaattcataatatagagattacgaaatcatttggagtcataatgacacaatacttgaaacattcttcattagatacaacaacaaagtaggcagtttcttacttagctagttgctcaaccggaagttgcagtggcaggtgaagccattttagttgcaataagacagaaacttaaacatggaaaacacgagatatagtagcggcaacatgacattcaattatatagctgaccccttcgtttcttatttaaaaggggcaatctccaacgttttgtggtcaaatgggcctgcatttctttttatccgcctctactattgggccctaagcccgagttttccggtttcgtaaacaataggttcatcatacttgtgtaatttcaatgttttggaaaattcggttcacagcttcgttaaaacatcaatcatctcatatctgtgactcgtagtttggttaaaaaatgatcccaaaaaagagagagacagatccaaaaaatcatctcatatctgtgtctctctctttgtttaaatttaaaatgcttgccgtagacaaaacatacaaatacgaggctgtaataaacaagtatttaatataataataaggacaaataaacggaccaaatttaggccgagaaaatgggacattgtgatataatctcaaaaagaattgaaatttgtatgatcgatcagatatctcaatttcaggaacccagaaagagggacttgtcttttacctccaaagggttcctgccgtttcttttctacaatttttctcctgctaattatcaaatttttcttctgattttcattgtttgttagagattcttcttctcctctgcttttctattctctgggagctcg

SEQ ID NO: 11000 - DNA, 3000 bp, Unknown
  misc_feature (1)..( 3000): cDNA_ID_3038923_gDNA_ID_2214470_Annot_ID_182977 3000 nt of promoter + ATG
acaaggggaatgaattgggttttaatcattgaagatatttatcgtaattaagaacaataccacaaaggggaagagcttttatcaaaagaaaagatgatgtgtgtataaaattggtaagttagtaacgtttggtgaagagcacattattttagccatgaatggaattgcgtgagtaagttaattaagaaggagatgtacgtaattatgaatttataatcacgattcacgaatattattactgcagtctggctgtatatacgtcaccgtctcattcaattataccatgttactttccgtttaagaatgaatattatatttttgcccaaagaaaaagaatgtatattatttacacaaaccagaaaacgtaagagaattaatgaattagggacgtgaagaaactagtaagcatatcaatatatcatgaagaaaaatttctgttggcgttttaaaaaaaaaagttatgcctcaaaagtcagtccaatgttttccacatgctatgctctgggcaagtatatattctttgaaccaccatcgaaataagtaataaaaatttgagataaaatatttaaaaatacttccggtgtcaggaaattgacttatataaattgtagtttataagaatttttaaaatggagttggtttaattaccacatgttgccatggattaattgattcctcctaaaactttatgttaattaccacatgcactacgaaagtacaaattaattgatatcttattacagttaaaaagccagctaatatcatcatcccagttttttccgctataagaaaattaatccgttttatactccacacaacacaacaatatccaaaacatgtttatgtcaaaaagagcaattacagaataataattacacgagagaatcaagaagagcgattgagagaattgaagaattgtatgatgctgtaatagtaatgtgaataataattagtcttttttttcttatgaaataatgaagaaaagtcattgagtacataggaatttgaccgtacgatctgaaatgtttacacgcgaagatttcgacggttgcgatgaagtaccttatgtaatcataaccattgaaacagttgacttttgttgacaaaactatcaaacatcatcgaatcaaataatgcttagaattattgattgcattgcaagaaacaagactaatgatgacccaaaaaccacgaactgtgatctgcgtcggagacatccatggaaacatatcaaagctcaataaactctggcttaatcttcaatccgatatccaaaactcagatttcagctcagctctcgtcatcttcctcggcgactactgcgatcgtggaccggagactcgaaaagtcatcgacttcttgatctctttgccggagaaacatcccgatcagacccatgtctttcttgccggaaaccacgactttgcttttgctggcttcttgggtttgttacctcgcccttcagatgggtctgagtttaaggaaacgtggaaagagtactcaaaaagtgaggagagagaaggatggtataaaggtgaagggtttgagaatatgcatctccaaagcaggagatgggcgggaaagattagggttcagttcgattattccgcatatggagtgttgtataatggatcaatatacgatgcggcgtctacttttgaatcttatggcgttcctcatggatcttctggtgacattctccattgattcttctttctggttatagtttatgattagacgtttgtctttgtcggaaactgtaaatataggtcaagtgatcgatcatgtaattggtgatcagtcaaataagtaatgattggatctttggttaaccaaaaatataattgaatctttctcgatttggagttttcatgttctcatctctgtactagtgaaattatgaaattttataactgttttgaatctattggtattggttttgaaacttgtttgttttcttttccttgatagatttgataaaggcagtacctgagagtcacaagaaattcttgaccaatatggtttgggtacataaagaggtaagggcttttctcctaccatgtgacgtttcttaggaacaaatgttgagttgttataaagcaaatactttttgtctaagaaagcataagctaaatttgtaggaaaatgtacatgtagtaatagttatcatattgttgatactattgtaggatgatgtttgtatagaaacagaggaaggccttacgcattgtaagttgattgccgtacatgctggtctagagacaaagaataacgtagaagaacagcttaaactattgagagataaagacacaagcatcccaagaatacaacctctaactggtcggaaaaccgtttgggggatcccacaggtaaaaaaaacattgaaagaaccaaactttgtattaagatcttgctctcttttgaaatctctttgtatgactttgtttgctctggaacatactctgtaggaactggatgataaaaagactattgttgttagcggccaccatgggaaacttcacatcgatggcttgagattgatcatcgatgaaggtggtggatataccgatacacctttggctgcaattgttcttccttctaagaagattatccgcgacaccgataatttttccaattaagtatatcatgtcttcatattaaaattgaaacttctagtagttttttgtgattgttctgttgttactttttaattagtgtttcggtcttttccgctacttgtataacttgataatttttttccaaaattagaaaatggtataactacttaacactgttatgaaaaaaaattttgaaacttgtaaattcttttgcatgttgttagcttatgaaccaccaacttagaaaggagataagaagaagctaagaaaaactagacgaccaaaaaaacatgttattatttcgaaataatatatatagccaaaggcccatgaagcccacaagtacattatcatcatttcaagaaacagagagagactaatg

SEQ ID NO: 11001 - DNA, 3000 bp, Unknown
  misc_feature (1)..( 3000): cDNA_ID_2724771_gDNA_ID_2214471_Annot_ID_133070 3000 nt of promoter + ATG
gtcagttcgtcgcggctcatgccttgaggaaaggaactgcaagagcccaaagccagctccaatcccctcaacagaaaatctgttgcatgcagtttctctgcaggatccaacttctgcttcctgctcaagaatcttgtatctggtctctcccatgatatacgctcctgttgccaaagaattgattagtcagaaacagataattagtcccacaagacgggtcaaaacaaaagagttacagttatataacagatgatatttcagtgattatgcttaattttgtttagacagttggcttacatggtggattttgatgttcttgagtgtgtttttagctgctgcagacaatgaagcagcccgtgcgatcaaaacctgagctgtggtgttgtctcgtgccatcatgatctccacaaacatattcaacctctcaagagcattttcagcatataatttgcaacccttactcatctgcaaaccatttaaaacccaaggtaagtattttgtgaccatctcatcgtcgtggaaaaacaaaaaaaaaactcaagactcacctgactatgagccagccttggaaacgggagaagcactgcgatgagtgaagcaatggctccaagtgctgtactgcctgccacatgaaccgggagcatgaatacatgagccacctctccattgaacaccacaaaagtcacgtagactacaacaatctgcccaaaggcaatccgtttagtcagcagactcgtggacacggggaaagccactatgaatgaagctagagccacagcaactggagccaccaagccattccctagtgaagctggtccaaccaccaagacactcactagcgcaatggctattgtctgaaaagtggcgtaagagacatcaagacagcacttgagaacttcgccgtatgttggttcagcatcggagagccagatcaagattgtggtcaggtaagaaaaggctggaaacgttgtgaagtgtcttagtggtttgggaccgtacaaagtggttaagctcacgatgagacaagccatggcggttcgcagagccaggccaagtcgctcgagccatgttgtgtcgcgcattcttttaacggattgttgttttagtggatttgtatgtaggaatacttgttagataaagatgatgagatgaaggttatggtgagcaagaagactacgtatatataaggtgtgatgggatttaaagtggcaacgtcaaagagttaagacttttgagcagctgtcttttaactccaagtactttcattttctatattgtgtagttaccaaaccaaaccagtctctgtactgcatctggttagtttcggtttaggcagtgcctcatacatcaaaggagggaagagacactgatatttcaaatagtttgggttaaattaggccatgccatatacaaatagttggaagggaaactaattttaaccgaatggattacggtttagtttggtttaggccatgcccatatatccggtttcggtttgacttacactgttctagttttggtaccaatttcaagtttgattgtgtcttcttattttccgatacttttcgtatatatcgaagaaaatgtaactggtgataaaccgaaataaaacttgaatcactttttggatacagcttggtcagattaaaccaaatgggacatctctaaaattgaggcacgtataggttggaaacgagtcaaaaccagctggtttcatactctaaaactaaaacataatggtttcaaatactaattgataaaacagtattttctacaagtttctcgagagtttaaaatgttataatttctccacgtaatcgacctttcatttctcgatttaaaatgtggtagaccgaaaaaagggtaagattaaatataggaataagacaaaagagaagaagaagaagtgatatgaaagacattagtctcatcaacagttcgagttcaagtagagatcgagagcattaatcacaagctgcacgcttcatggttagtattgtttcctcttcaccaggtaatttccatggcataatcaatttggtcctactctatcatatacttggtacttgtacacctattttatttccaatttgtggctacaaatttctgtgccacaaaaattcgtttttttttcaatagaaattttaatctgaaaatgagttccctttttttttggttgagtttctatattggttatttcattgcatttataaattattttctttgagaatgttaaagttattacatagttacgttacgtataccgtccactttgcatgcttcttccacgtattgtttggggcttattttagctatcaaaagaggaaacccaaaactctttactctctcgtcaatctctttcaattgtgtgtacaattctttgggcttattgtgaatatagctcgagcaactcaaactattcaaactcatggaccatgtcaacaactgccctgaattatcatttgtgtaaaaggcaaaaacctatgcagcatacaataaataaacacattaactttttcttgtttttcaaattttctccaagataagcccattgggcctacagctagttttgggaaaaaaaacagaaaaacgaaaaggaaaaaagctatcaatgagtcactgacggtgaacggtggaccgactcaaagccaatgagaacgcaagaaaatgttgagccaatgaccgacttttgattatggactaagccatcgaaccgaacattctcgaacctttttaaacggctttccttatttgttaaaggaaaaggaaaagtaggagaaaagaatcattcctggaccgtcagatccaactccaaaagatcgtgcggttacatagcgagccatcgaaccttctcgaaactcgagtacaagactctatatagacttctccttcgacctgatattttggaaaaaagaaaacaaacctagccgcaattcacaattcctctttcacaatctttctttcgattttttagcttaatcctgagtagcgttaacaatg

SEQ ID NO: 11002 - DNA, 3000 bp, Unknown
  misc_feature (1)..( 3000): cDNA_ID_2731368_gDNA_ID_2214471_Annot_ID_133071 3000 nt of promoter + ATG
gtcctcttcgctctctcacaggcggttctcaacctccttagagctctcgggtttccactaatgtccttcttgttcttcctcttgaactcttgaacaaagtgattcaccattctgttgtcgaaatcctcaccaccaagatgagtgtctcctgcagtcgccttcacttcaaatataccttcctcaatggtcaaaagagagacatcgaatgtaccaccaccaaggtcaaagatcaaaacgttcttctcaccaacacttgtagccttcttgtcaagaccgtaagcaatagcagctgcagtaggctcgttgatgatacgcataacattcaaaccagcaataacaccagcatccttagtagcctgacgctgagagtcattgaagtaagctggaacagtaacaacagcgttcttgatcgttgtaccaaggtaagcttcagcaatctcacgcatcttgatgagaatcatagaagagatttcttcagcagaaaactctttatcttctcccttgtagttaacgacgatcattggtttttcagcaggtccagatttgagcgtgaagggccacaatttgatgtcactttgaacagagctatcagtaaatcttcgaccaatcaacctcttcgcatctgtcacacaacaaaattgaacacaattagaccacagatactatacgaattaaaacgatgctatatgtatattttgcctaaaggctaaaattagtaacattagatcgaaaattgaatctcactagctccagcaatgttaaaacattcttatgaaaccctaaatcatcgctatggatctaccgattacagatctacttataatccaagttcgaaagacaaatttagcaagaggaaacgagtgaaacgtaccgaaaacagtgttaatcgggttcatggcgacctgattctttgcggcgtcaccaatcaaccgttcgctatcagtgaaggcgacgtaagacggtgtggttctgttaccttgatcattagcaatgatctcaacacggtcgtgttgccaaactccaacgcaagagtaagtggtaccgagatcgataccaatcgctggaccttctcctttaccagccattgttaacgctactcaggattaagctaaaaaatcgaaagaaagattgtgaaagaggaattgtgaattgcggctaggtttgttttcttttttccaaaatatcaggtcgaaggagaagtctatatagagtcttgtactcgagtttcgagaaggttcgatggctcgctatgtaaccgcacgatcttttggagttggatctgacggtccaggaatgattcttttctcctacttttccttttcctttaacaaataaggaaagccgtttaaaaaggttcgagaatgttcggttcgatggcttagtccataatcaaaagtcggtcattggctcaacattttcttgcgttctcattggctttgagtcggtccaccgttcaccgtcagtgactcattgatagcttttttccttttcgtttttctgttttttttcccaaaactagctgtaggcccaatgggcttatcttggagaaaatttgaaaaacaagaaaaagttaatgtgtttatttattgtatgctgcataggtttttgccttttacacaaatgataattcagggcagttgttgacatggtccatgagtttgaatagtttgagttgctcgagctatattcacaataagcccaaagaattgtacacacaattgaaagagattgacgagagagtaaagagttttgggtttcctcttttgatagctaaaataagccccaaacaatacgtggaagaagcatgcaaagtggacggtatacgtaacgtaactatgtaataactttaacattctcaaagaaaataatttataaatgcaatgaaataaccaatatagaaactcaaccaaaaaaaaagggaactcattttcagattaaaatttctattgaaaaaaaaacgaatttttgtggcacagaaatttgtagccacaaattggaaataaaataggtgtacaagtaccaagtatatgatagagtaggaccaaattgattatgccatggaaattacctggtgaagaggaaacaatactaaccatgaagcgtgcagcttgtgattaatgctctcgatctctacttgaactcgaactgttgatgagactaatgtctttcatatcacttcttcttcttctcttttgtcttattcctatatttaatcttacccttttttcggtctaccacattttaaatcgagaaatgaaaggtcgattacgtggagaaattataacattttaaactctcgagaaacttgtagaaaatactgttttatcaattagtatttgaaaccattatgttttagttttagagtatgaaaccagctggttttgactcgtttccaacctatacgtgcctcaattttagagatgtcccatttggtttaatctgaccaagctgtatccaaaaagtgattcaagttttatttcggtttatcaccagttacattttcttcgatatatacgaaaagtatcggaaaataagaagacacaatcaaacttgaaattggtaccaaaactagaacagtgtaagtcaaaccgaaaccggatatatgggcatggcctaaaccaaactaaaccgtaatccattcggttaaaattagtttcccttccaactatttgtatatggcatggcctaatttaacccaaactatttgaaatatcagtgtctcttccctcctttgatgtatgaggcactgcctaaaccgaaactaaccagatgcagtacagagactggtttggtttggtaactacacaatatagaaaatgaaagtacttggagttaaaagacagctgctcaaaagtcttaactctttgacgttgccactttaaatcccatcacaccttatatatacgtagtcttcttgctcaccataaccttcatctcatcatctttatctaacaagtattcctacatacaaatccactaaaacaacaatccgttaaaaga

SEQ ID NO: 11003 - DNA, 3000 bp, Unknown
  misc_feature (1)..( 3000): cDNA_ID_2714633_gDNA_ID_2214471_Annot_ID_133073 3000 nt of promoter + ATG
tagtaaaactaaaggattccattatctaacttagcaaagctataaacaattaagaatcctatacattccaaaatcgagaaatgttcaaggtaaaaacgaaatctaaagtttgtcgacaatacgtacattttagagagcttgtttggagcacctccggtgactttagcgacacggaggagagcgagctcagctttgagttccttcagctggttttgaagatcgctcttcgacttctccctcaattcgtgaaccttaatcctcgctacaaaacagaaccaaacaaatattaattagacgtaattctccgatgaaaacgaaacagattagaagacatttagggattagccattgccatacccattgtgagcttcacttgtgttcaacttctgcgccgctgcttgctcttcttttagctccgagaatcagaaaccctaataacggaggagtggtcatttatatatgacgagtctccttattgggtggtataaagctcattattcatacccaatagcttaacttaagagaaatacttaatgggccttagcccatgtattatcactttcattacgagaagcctaaagcaaataaacgcacgtgacctttatggtttcagtcacattgcatcatctaatttcatcttgtctttattatcacaatgaagcttccgcttctcaaatgacaaatactcacccaatctttgtacaaagtgttaaaatcacaaacaaaaatcaatagagagttttgaactttttcaatttccaccatacttagccaaacttattaaacaaagaagccatggaaagcctagcaaatgtagataaatagcagtagacattatcgtaagctacgatgactctccattcatttgagttcgtggtcctcgcggcagtctctctagacgggtgattccttggtataaccctagcaacatgctcaaattgcttcgcagcttcctctcccttattcatcaatgtatacacgactccttgaaacaaatatatagtgaaatcatttggatcttccttcactagctcttcacaaatccgaattgcttcaactgattttccttcaataaacctaatctgtgcgatcaacattctgaaaccgagaatctctttcgtcttcttctccttcttgcatcttcgaatcactttgttgatcctcttctctatctctgttaatttaggtttagagttgtaatactccatcaccaagtaatgataagcatcgacgcgtatcggatccttttcgagaatctcctcgaaagcttcgattgctgattcacttttcccgtggtatgagagaatccgagccttcatagccggccattttcgttcatatggctcgatctcgatcagacggtccagaaatacaatcgcctgctcatgtttatcggacttaaatttgatttccgtcagcaatgataaagcattcacatcgtttgattgtgtctcgaggtgcttctcgagtgtcgtctctaccacagcaactggagtcatcgcggcgcgtttgttgacgaagtaaaacgatgctgagaacagagctgcggctgcggtgaggctgatgaaggtggttttaagcagtgaaggtttatgatttgacgccgacgaagatgatgaagctcttatgacgggaaatctgattggtgttgactttgcttggtctctgaataaaagaggaaacgagagttttgaaggagattttcgctcgacgaggttgatctgaaggttaagttttgttctagagaattgaaacgtcgccggagacgccatttttgcttctgagaaatcccaataactaagtcaacgctgaaatggaaagagaagaacagagcagattaaagaagagcagagcaaataagttggaaatcgacgaaattttttaaaaaggatgccgtcttgtaaaaggccaaggcccattagatgagcccacgattagttcggttcctctcgtgaattcaaccgtagattatcttgtatcaacgcacgtgataacgccacgtagacgatccgtgagattgatcaaaaaccaatcatgttcgtatcagcacctctatatatatctcggtatcactcggagagcgatcattaatcgtcaatttacaactagtcgcgaaatccgaattttatccaaagcaatggcaccgaaggcagagaagaaaccgtcggagaaagcaccaaaggcagataagaagatcacgaaagaaggaggaagcgagaggaagaagaagactaagaagagcacagagacgtacaagatctacctattcaaggtgttgaaacaagttcatcctgatatcgggatctctggaaaagccatgggaatcatgaacagtttcatcaacgacaccttcgagaaaattgctctggaatcgtcgcgattggctaggtataacaagaaaccgacgatcacgtcccgggaaatccaaaccgccgtaaggctcgtgttgcctggtgaattagcgaagcacgctgtttctgagggtaccaaagccgtcaccaaattcaccagttcttagattaggttctttttttctcttcgattttattttcggttaatatgttcaccagttgatttcaaagatataattttcggcagtctcttcgatattttctatgattgattttacgttatgatgctattgaaattagggtttacaaatctttgggtataataaatacaaaattgtaaaggatctcgtttcttcctcagtttccccgggaaataaacggaaattataaatcttgagattctttaattggcccagcccaacaaacaccaatctcaatttagtctgaaccgatataaattgaaattagaaataccgtaccaaaataaaccgaaccgcaatcatcaccggtcttggaagttccaaatctctgaaacggtaggcatcgatctctctctctacagagtttgactttcactctctccgtggagcaccgctcatctttcccggagctgtagtcagtgaggtgaccggactaaatctccgccatg

SEQ ID NO: 11004 - DNA, 3000 bp, Unknown
  misc_feature (1)..( 3000): cDNA_ID_3597145_gDNA_ID_2214471_Annot_ID_133076 3000 nt of promoter + ATG
gcaaccatggagcaaaacatgaaggacacatacaatatccccagagagattgttcccaaatcctgaagtaatcaaaacaactcaaatatcacaacacacacacacagtctaacatgtcctgctcctaaattcatattcctctctcttaagatccatcaatacaaaatgacagtataatttaacggtagagcaccttatttacggtagtttcgaggttctgagcagcaccgtaagcgaggaagattagcagaaaggagatgctgaggatatgaacatcccttgtgtagcactttccagctctgactttccgatcctcaccagaggcagagatcaacggcgcctcctcgtcgtttcgagattccatggcggagatttagtccggtcacctcactgactacagctccgggaaagatgagcggtgctccacggagagagtgaaagtcaaactctgtagagagagagatcgatgcctaccgtttcagagatttggaacttccaagaccggtgatgattgcggttcggtttattttggtacggtatttctaatttcaatttatatcggttcagactaaattgagattggtgtttgttgggctgggccaattaaagaatctcaagatttataatttccgtttatttcccggggaaactgaggaagaaacgagatcctttacaattttgtatttattatacccaaagatttgtaaaccctaatttcaatagcatcataacgtaaaatcaatcatagaaaatatcgaagagactgccgaaaattatatctttgaaatcaactggtgaacatattaaccgaaaataaaatcgaagagaaaaaaagaacctaatctaagaactggtgaatttggtgacggctttggtaccctcagaaacagcgtgcttcgctaattcaccaggcaacacgagccttacggcggtttggatttcccgggacgtgatcgtcggtttcttgttatacctagccaatcgcgacgattccagagcaattttctcgaaggtgtcgttgatgaaactgttcatgattcccatggcttttccagagatcccgatatcaggatgaacttgtttcaacaccttgaataggtagatcttgtacgtctctgtgctcttcttagtcttcttcttcctctcgcttcctccttctttcgtgatcttcttatctgcctttggtgctttctccgacggtttcttctctgccttcggtgccattgctttggataaaattcggatttcgcgactagttgtaaattgacgattaatgatcgctctccgagtgataccgagatatatatagaggtgctgatacgaacatgattggtttttgatcaatctcacggatcgtctacgtggcgttatcacgtgcgttgatacaagataatctacggttgaattcacgagaggaaccgaactaatcgtgggctcatctaatgggccttggccttttacaagacggcatcctttttaaaaaatttcgtcgatttccaacttatttgctctgctcttctttaatctgctctgttcttctctttccatttcagcgttgacttagttattgggatttctcagaagcaaaaatggcgtctccggcgacgtttcaattctctagaacaaaacttaaccttcagatcaacctcgtcgagcgaaaatctccttcaaaactctcgtttcctcttttattcagagaccaagcaaagtcaacaccaatcagatttcccgtcataagagcttcatcatcttcgtcggcgtcaaatcataaaccttcactgcttaaaaccaccttcatcagcctcaccgcagccgcagctctgttctcagcatcgttttacttcgtcaacaaacgcgccgcgatgactccagttgctgtggtagagacgacactcgagaagcacctcgagacacaatcaaacgatgtgaatgctttatcattgctgacggaaatcaaatttaagtccgataaacatgagcaggcgattgtatttctggaccgtctgatcgagatcgagccatatgaacgaaaatggccggctatgaaggctcggattctctcataccacgggaaaagtgaatcagcaatcgaagctttcgaggagattctcgaaaaggatccgatacgcgtcgatgcttatcattacttggtgatggagtattacaactctaaacctaaattaacagagatagagaagaggatcaacaaagtgattcgaagatgcaagaaggagaagaagacgaaagagattctcggtttcagaatgttgatcgcacagattaggtttattgaaggaaaatcagttgaagcaattcggatttgtgaagagctagtgaaggaagatccaaatgatttcactatatatttgtttcaaggagtcgtgtatacattgatgaataagggagaggaagctgcgaagcaatttgagcatgttgctagggttataccaaggaatcacccgtctagagagactgccgcgaggaccacgaactcaaatgaatggagagtcatcgtagcttacgataatgtctactgctatttatctacatttgctaggctttccatggcttctttgtttaataagtttggctaagtatggtggaaattgaaaaagttcaaaactctctattgatttttgtttgtgattttaacactttgtacaaagattgggtgagtatttgtcatttgagaagcggaagcttcattgtgataataaagacaagatgaaattagatgatgcaatgtgactgaaaccataaaggtcacgtgcgtttatttgctttaggcttctcgtaatgaaagtgataatacatgggctaaggcccattaagtatttctcttaagttaagctattgggtatgaataatgagctttataccacccaataaggagactcgtcatatataaatgaccactcctccgttattagggtttctgattctcggagctaaaagaagagcaagcagcggcgcagaagttgaacacaagtgaagctcaca

SEQ ID NO: 11005 - DNA, 3000 bp, Unknown
  misc_feature (1)..( 3000): cDNA_ID_2714614_gDNA_ID_2214471_Annot_ID_133080 3000 nt of promoter + ATG
ctcgtcccatttctagcagatttcttcttctccttcttccttactatcctcgtcctcttcgatttcaccacataatatgtcattatactcaaaattccggtcatcgtaacagttcctatgaccgttaccacaaccgccgcgtatctatttctccgaccaaccacaatgtacgatgaggaaatgaatgccacggtggtgcagacagaagcgagccacatgagcttatttattacttccaccacacgtctctccgttttagtctctcctcttacaagcgtgatttgcacgacaactactgctaacgaagtgaagagcgcgatcgcgttgaatataaagaatatcttgaaagatgttgcatggaccataacggccacaccgtggtcgtcgtcacctcctggaaccgtgaaaatggcagcaaatgcaaccgtggcaaagagaacagccacgacggttacagagttggtcgcattgttgattccagctctgtggagtttccttagctccttggcgatcccatcgacgtttttgttggtttttcgggtttgttccagctgagtgtgaacgtctttcttgatctcggtcacggtttttctaagctcgtctcttggctggtttagttcgttggctttaagtgcaccgcaacgcgataatatctctttgatctctgccgtttcctctgaatgagtgagtccttcagcgatgtcgtatgcggttttatggtctcttgttagcgcattcacgtttgtatccggaagttgtaacagctcattcacaatctgtgaatcaaaacaagaatataagaatcaagaatcaaaaattcaataaagagcagatcaatcattacctctgctcttttctttcgtgtagcaatatgcaacacggtgttaccaaatttatcaggaagcatgacaatagccggatcagctcgaaggagcaacctcacgacttgtgagctaactcctttcacagccatatgcaaagacgtctgtcctttcttgtctgttcgtcttgctaactgcggatctttatcaagcaaggttcttacaatatctacatgaccttggcgcgcagcaaggtgaagcgcgttttttccattcgatcttgaaatctcaagcaagcttgagtctttagcaagcaattcattgacaacttctgaatgccctcgagttgcagccgacacaagtggggttgcgtttgattgagctactgttttactcaattgaggttcatgctcaagcaataactgaacaatagctgcatgaaaaaagaagctcacgtgcggttagaaagacagatttgcaaatcctttgcttcaaagaggttttggtttacatgaatcaagacttacatcgatggccttgactacaagcaatgtgtaaagcgtcaaatccagaaagattcttctgcataagagattcaatggtcgtgtaaggcaacaattccttgacaacatctatgtttcctttctctgctgctgtaaaagcggtgtctcccccagctcattcacctcgtttactacggatgtcattatttgagctacctcgtcatcaaaatcagctccggtaatggtaccagtaatctgagaatcaatgtcactaagaatctgcttaacagaagccaagtctcctctttgagcagctaggtgaagctcggtgtcgttgtgccgtcccgtgacctgtttaacatacttcttcttccccgttggatcaaaccttttccctgaattcgaaagccccaaggacttgctcgagttagacaccattaaagccttacccgaattggacagaaccagagtcttccttggggttggagttggcgacaggtccgctacagtactccctgtaggactcgttggatccgtcgccagacccttctccatacctggttccagttccttctctgcgagagtgagattgattacacaatgtttgtttgtttatcacgtaaactagagatccgttgaagaaaatgattaaaaaaaaataacaccctaagagatatttcaagacctaaccctaataacacgcattgtctaattccgcaacgaattttcgtaacgattggagtcagaaatgtaaaatgaaggagaaggagaaatcattgtaccttcttcgattctggatcccattttgagagattagaaaacagagaaatttcaaagcgggatcatgatattgtaaaaaacgacgactctccgattggagaaagatgaataagccgtcggccaccggtgccttcagtgtcacggcaagggtttgcgatctgattatttgtaggagaagcagctgaattacctttttttgggttgccttttcttcttcttcatcttcttcagttagggatgtttcccacgtcagcatttcattccgatttaaattcaccgaatactgtacatatatcttcaatatacggtttaggaaaattggaaaaaaaaacttggttagttagcaatgggctttagtttttggtttgtcaacacttgtgacgagtctcaaacatgtgtgttgggcttcattaaggatatctatacttttgaaaaattatttctaaatcatgtttaagcctttagccacatttcttaaacttctgtccaataaccaaaaaaaaaaatttgtcatatttttattttggtttgtcatttccttttaaaattaagctaagtggtgatatgaaaatgtaaattcaaaataaaaagggactctataaaaattaaagaatcttatcatgcgaaaatatctataaatttgaaatcgtcttaacaaaaagacaaacattttccaacattttattcaaataaataaaaatagatttgtgtcggcaacaaaaaaaaatgaaaaagtttttttttttccgacaaaaaaagaacaatattctggcacagttccaacaaagctaccatcaatatggttcagttgaaacaaagagcaattatatcccaaaaatacaaaaactgaaactgtccgaaattgaattcaacatttgttatataaattagatatg

SEQ ID NO: 11006 - DNA, 3000 bp, Unknown
  misc_feature (1)..( 3000): cDNA_ID_2714610_gDNA_ID_2214471_Annot_ID_133081 3000 nt of promoter + ATG
aacgtgacttgtgtccgctcctattaacatagttttgttgtggttcatgaaatggcatctgaaatatttgtttgaaacataaaaacatgaacacaatgggtagtcatagtatatgtaatctgtaaaaaaaatcatgtttaaaacgatttttagaatatcttttcaatacaaacatagactcaaaacaatataagatttaacttacttagtaccataaaagatttaagagacaaaccttgagacagtgatgtcagtgctttctcgtgtgatatcaatcaaaccatcatagtaattcttgagactacaccgatcaatccaaatattgtgcgattttggtttgatctgaatagcgtctgcgtctggtcccacaccgccttcaaattcaagattgcagattataacgttttcacactcttttagccttaacccttttcccgttatcttcactttttgtcctctcccgtccaccgttgtgtgcgatgatacgttgacaaacgaagacagattgatcgttcccgatacatcgaacacgatccataaaggttctggcctcttgcaagcctctcgcaacgatcctggaccctcgtctgcacataagattattcgtttttatatgaactaagactcgaaccgcacaacatcgtactgccactcaattttaatatgaatttgaaaccagaggtgtccaaatttgactaaaccgacccaatgcttagacatcaatatggtggatatcagaattactttggcgtaaatgagtaagaatattttaaaaagacgtaagcagctctgatccaatgataatttcatttacattaccaatttgaacatggttaggatatcagccaccattttttcttaagatatatgcaagcaaaattcagaatccaacaaatggttaatttgcttttttttttttaccacagaaaaacaaattacgttgcttttaagattttttttttttgtttttaaattactttggaagttttgttcctatttggagtatttggctgacatatcacttgatcatattttttttctatttggagtaacaaaacagagaactacaaattaaataaaaaaaatatataaatccaagaatttgagggataaatgaaggaaaaaggggacttttgaaatttaccagctaaagaagtgacgtggcaaatcggaccatttagaccaccaacggcggcgcggccgaaaccttcggcctttccggcgagagagcggaggctggagtctacgtggcaataaggtcccactgtcatgtggtgatcggatggcgatgacggagctggagctggagctggagcggctgtatatggtggtgggaaaggtgaattgggagcttcgccgggaaaattagaaccgccgtgatgggatctgtgaatgccatgtaagtttcccatatctaatttatataacaaatgttgaattcaatttcggacagtttcagtttttgtatttttgggatataattgctctttgtttcaactgaaccatattgatggtagctttgttggaactgtgccagaatattgttctttttttgtcggaaaaaaaaaaactttttcatttttttttgttgccgacacaaatctatttttatttatttgaataaaatgttggaaaatgtttgtctttttgttaagacgatttcaaatttatagatattttcgcatgataagattctttaatttttatagagtccctttttattttgaatttacattttcatatcaccacttagcttaattttaaaaggaaatgacaaaccaaaataaaaatatgacaaatttttttttttggttattggacagaagtttaagaaatgtggctaaaggcttaaacatgatttagaaataatttttcaaaagtatagatatccttaatgaagcccaacacacatgtttgagactcgtcacaagtgttgacaaaccaaaaactaaagcccattgctaactaaccaagtttttttttccaattttcctaaaccgtatattgaagatatatgtacagtattcggtgaatttaaatcggaatgaaatgctgacgtgggaaacatccctaactgaagaagatgaagaagaagaaaaggcaacccaaaaaaaggtaattcagctgcttctcctacaaataatcagatcgcaaacccttgccgtgacactgaaggcaccggtggccgacggcttattcatctttctccaatcggagagtcgtcgttttttacaatatcatgatcccgctttgaaatttctctgttttctaatctctcaaaatgggatccagaatcgaagaaggtacaatgatttctccttctccttcattttacatttctgactccaatcgttacgaaaattcgttgcggaattagacaatgcgtgttattagggttaggtcttgaaatatctcttagggtgttatttttttttaatcattttcttcaacggatctctagtttacgtgataaacaaacaaacattgtgtaatcaatctcactctcgcagagaaggaactggaaccaggtatggagaagggtctggcgacggatccaacgagtcctacagggagtactgtagcggacctgtcgccaactccaaccccaaggaagactctggttctgtccaattcgggtaaggctttaatggtgtctaactcgagcaagtccttggggctttcgaattcagggaaaaggtttgatccaacggggaagaagaagtatgttaaacaggtcacgggacggcacaacgacaccgagcttcacctagctgctcaaagaggagacttggcttctgttaagcagattcttagtgacattgattctcagattactggtaccattaccggagctgattttgatgacgaggtagctcaaataatgacatccgtagtaaacgaggtgaatgagctgggggagacaccgcttttacagcagcagagaaaggaaacatagatgttgtcaaggaattgttgccttacacgaccattgaatctctt

SEQ ID NO: 11007 - DNA, 3000 bp, Unknown
  misc_feature (1)..( 3000): cDNA_ID_2714606_gDNA_ID_2214471_Annot_ID_133082 3000 nt of promoter + ATG
ctgcgattgtcttcagcgcaaacactacaatcctcgtaaagtacaaatacccgatgacaacaatgtagaattgtctaaacagagtcaatttcgccaagttcctagccgctttcccatcggttttcgaagtctctcttagcgaacgtatcgaccaaacaatagggaataagatcgcacaacagcaaactatatctacaagcaagaatatctgattccaagtaacccaatctttgataaaaggtccagtctctccaatcacaatggaagcaatgttagcgagaacctgaagtggaacaacaaccatcaacacattcttctctttctcttgtaagaatggcttcaagaaggaccagccagttccaatcaacacaatcacagtgaagagaagaacaacacgaataaactggaaaatgtagaataaaacatcccagccatgaggagtaccggtgactttcacgtaatgcttatcctcggcggcgcagatcagattcaaagccttcattaaaagcagagccgccataagaacatggatcctatgaacaacacgtttattgacccaacaagcatatccccagagaccaaggaaagctaagtaaccgagggagaagaagaaatacaatccgggtaatcgggttgacccggcaggaaggtaatccttagacccgttcggatctaaattgtacatctccgttcgaaccttcatcgaaattttggtttccggtacgcaattcacgaagaagagagagtattcgttcggagacatcaccggatacaagtgctcgtatttggaaccagggggaggagagagatcgtgaaatgtgaagagatggaggacgtaattggaatcgagtacacagaagttggggttttgctcgatctctaagactacctggagaagcgattcctctgacataaggaagaaccctaacctcgatggatccgggatcggatcagacgaagaagatactactgctacagaggaaatagagacgctaacatggccggactgagtgaatccgaacttttcgaagagaatcatcggcctagaatcgtcggagattgtgagagatttgatctccgccgccgtgcgagtgatgcaacttgcggagaagaggaggaggacgacgaagaggggtagtctcgtcatattcgcgccgtaactgtagaggtgagaaacaacgatgcttctcgtgatttctggtttcgttttaagcttaagcttgaaggaagaaacgagaatggcgttttgaccagatttaatgctgaggaaacgaaacgacgccgtctctcatacggaaaattctggcagcccgtaatggttgatttgactcgaatttaaacaaagcccattgggcctaatttgatagagttggaagtcaaaacttaatatgaaagagaacggtttggtaacagtacatggtaagagaatgtgtaacacgtgcggtgtcacctgtcttcttctctcacatatctgtagccatttaatattccgcttaagagaaaacaaaaacctgttcatatattaaaatatgactgtgctgttatatttttatatgcgaaaaagggcttagcgtattaaatttatcggagcgaccaacgtgaatcggtaacattaatggaaaatgatttgacttagaagaaaacgagttaggtgagaacgtagcaacataggacacttgtgaacgatgcttattttcaaatttttacatttttataaagagattgaacacaataaattggctaactaaataaacaaattgattttgcgtatagacaaagaatataccagatatgctattgtgtggatcactaatattcccacgagtccacgactatcccattttctttttctctattttatgaacatttatttaatagattaatttcacttatgtctttaccaagactatatttcaattttttataaaactattttctcatttatcatcaagaagtgaaaaaaataatagatttaaacgttgttttaaaaagtagatttaaacaaaaaaaaggtggaaacttaatttttgtggtcaaaaatatattaattcagcatatttgttttcttttgtgtaaaatcaagcatattctttcgcaggttttaatatggaaataccaaaagtaccctcttagagaagcaataattacgacaaaagtcgaagagagacccttctcgtaattctccctcctcccttcacagagtcatctcatcatcttatataagcaattacagtctcttaagttcatggcggatttaatttgttctggttatccaaaacaaccatctttttcctctttcttataaatctctcccaccggtagcggtaaaatacaatcgtcgaagcaaagacaaatcctttttgactttcattaaaaattccgagaatctttttatcaacccaatattttttttttatcccccgagagagaaatttcaatgaaattcttagtataggatacaattcattaaaatccatttcattttcaatagtaatctcgattactgattcgtcgtttcttccgccgtgttttgatttttctcggattctccgctcagagttcctaatctgtgtaagttgatttcgattttccgactctgagatttttaaatgtttggttcgtgggctatcatcgtatctcgttgtatctttccaacaatttgaaagctgtttgatttttcttctttgggttgtgttagttcagaaactgttaaagttgcatgcttgaaattgggaaaatggttggatacttgtgtaatcggaacattacgaatggtttttttttgtatctgattgatttgattttcctccttatgagttttttgtttttagtctctcacatgttattgttctctaattttggcttgttgttgggttgttttgtttcacctgtaggctggaattaacctgtctaagaaactaaactttctctagtttctagatttttgtatatgattaggacagtaaaagttgaagactttctcaaagatttgatgaaatg

SEQ ID NO: 11008 - DNA, 3000 bp, Unknown
  misc_feature (1)..( 3000): cDNA_ID_2990667_gDNA_ID_2214471_Annot_ID_183042 3000 nt of promoter + ATG
ttccttctatcatactttttcttctttaattattttttttttttattgggtatcttattgagatacttcaaatggagatgctctaataattaatgggaatgtgtttctaattaaaaagataacatctttctttctatatttttgtcgtcatataacacacctcaactcttttaagtactcgtgttgaattttgttttttgaaaagacaaaactccttataatcaacgtaattattaataacaaggagaaaaaaagtccaaagaaaaaaaaaagaaagctttttgggaacataaacaccatcgaaggagggtgggaggtgttttatgttcatgggtggagcttcttggccaacctgaccccattcatcatatcattacccactttcttctcctaaattattctctcttatctctctctctctctttttattttctttctttcttaattcatctaaactctctctgcttttgcttttcgtaattccttacatttcactcaatattaatccccagaatctccgatccacccacaaatttagcaattttctgagatttgatcatttgggtcaccaaaaaatcttgtctttttgatctgggtttaacgccaataacatatgggaaacattagcagcagcggtggtgaaggtagacgccgtcgacggcgaaaccatacggcggctccaccaccacctcctcctcctccttcttcttctcttcctccaccacctctacctacagaaatccaagctaatcccatcgttttcgctgccgttactccctatcctaatcctaatcctaatccggtttaccagtaccctgcttcttactaccaccatcctcccccgggagccatgcctcttccgccgtacgaccaccacctccaacatcatccaccgcatccttaccacaaccactcttgggctcccgtggcgatggccagatacccttatgctggtcacatgatggctcaaccgactccttacgttgaacaccagaaagccgtcacgattcgtaacgacgttaatctcaagaaggagtctcttaggcttgaacccgacccggataatccgggtcgctttctcgtctcctttacgtttgatgcaaccgtctccggaaggtagatttcactttctccctttcgttgatttcgtgatccatttgagcagataacacgtgaattttgttgtgttcttcctcgtgactatgtaatttggatcttcttattgcaatttgatcaaatcttcttcatgtgtaattgaattaagcttatgttattatgttggacttgtgaaaaataggattagtgtcattttctttgctaaagaatccgaagattgcaaactcacagcgacaaaggaagatatactgccacctatcactctagatttcgagaaaggacttggtcagaagtttaaacaatcatctggttctggtatagacttttcggtctttgaggacgttgagctgttcaaagcggccgcagacacagagatctatccattagcggttaaggcagaagcagctccctcaggtggtgagaatgaagaagaagaaaggtcggggtcgaagaatgcgcagattactcaagcggtttatgagaaggataaaggagagattaagattagagtggtgaagcagatactatgggttaatggaacgagatatgagttgcaggagatttatgggattgggaatacagttgagggggatgatgattcagctgatgatgctaatgatcctggtaaagaatgtgttatatgtttgtctgaaccacgagacaccactgttcttccatgtcgacatatggtaagtgaaagctgatgatttactactattatgtgatgatggacatatatatagatgttaaaaattgtttgggtttggtggtgcagtgtatgtgtagcggatgtgctaaggtattgaggtttcagacaaatcgatgccccatttgcaggcaacctgttgaaaggcttttggagataaaagttcacggtaacaacggaagcgggaataacaccggacagggagaaacagttgaacaagagtagctaaacacggccgagtatggattgaaatgccatcgaaatattagtagtatatgcatgtttgatccttgtatgttaacaacaaaatgtgtgattgtcaattcataatatagagattacgaaatcatttggagtcataatgacacaatacttgaaacattcttcattagatacaacaacaaagtaggcagtttcttacttagctagttgctcaaccggaagttgcagtggcaggtgaagccattttagttgcaataagacagaaacttaaacatggaaaacacgagatatagtagcggcaacatgacattcaattatatagctgaccccttcgtttcttatttaaaaggggcaatctccaacgttttgtggtcaaatgggcctgcatttctttttatccgcctctactattgggccctaagcccgagttttccggtttcgtaaacaataggttcatcatacttgtgtaatttcaatgttttggaaaattcggttcacagcttcgttaaaacatcaatcatctcatatctgtgactcgtagtttggttaaaaaatgatcccaaaaaagagagagacagatccaaaaaatcatctcatatctgtgtctctctctttgtttaaatttaaaatgcttgccgtagacaaaacatacaaatacgaggctgtaataaacaagtatttaatataataataaggacaaataaacggaccaaatttaggccgagaaaatgggacattgtgatataatctcaaaaagaattgaaatttgtatgatcgatcagatatctcaatttcaggaacccagaaagagggacttgtcttttacctccaaagggttcctgccgtttcttttctacaatttttctcctgctaattatcaaatttttcttctgattttcattgtttgttagagattcttcttctcctctgcttttctattctctgggagctcgatg

SEQ ID NO: 11009 - DNA, 3000 bp, Unknown
  misc_feature (1)..( 3000): cDNA_ID_1381941_gDNA_ID_2214471_Annot_ID_183040 3000 nt of promoter + ATG
aattgcaaaaaaacaatcagtttcatattttgtcttctaatgaaattatctcagtaaagcttatagattgtcaactcaagaaaatatcatgcatgctacatcgaaaacatcaaaaaactaatgagtaacggagtcatacaagttctagtccagcagagtgagttatcatcaaaggataatcccgacaacatataacaaaagctactcgccaggaacttggacgccttgcttcatcttctctttcttcatcttcttcttagaaacgggtttcttcttcctcggaggtaaattcttctgtgcgtatgtgtaaaggatgaagtttcctacaaggaatgtcagtagcaaccctcctattacaagaaggacgatcagtcccgggtttagccctttgctttcgatttttccctgttcattgtgttcttattagtaacatatattgaaatctagatgcaagaagaaacaagaagatttgagaaatataatatatgaaacttgaaaggacagaacacaaggtatactaactagcttctcaatcttattggcccgtaagacagaacacaaggtatactaactaccaaagaccattactgcaagagtttggttaagtgacagattactgcagattaactaacactgacaagcacgaatatcatgaaacgaataccacaagttataatatccatagattgtacaatttgggaatgtataaaccatcatattcgttattcaccatgaaccttaaactctgaaacagccaaaaatgaaaaaacttgacattccatggcaagatcaagatgaaagtgatgaagttaaccaaagtcctcaaactcaaaatgtatgaaattctaaagaaaaaacaaaactttaccgatccaattgtgctaggtcctaacccatgctaaatttcagagaatttgatcatccatcgttaagaagcgttacaacaatcatacacgtattgaccaaaatgctcgaacataaacaaaaaaagctcgcaatcgcaaatcttaaaccggaacatcatgcatcaaaaccagaagatcagactcaagcaacacataagattacgagccacgcgtgaaagagtagcaaacgattgtaggaaagcagaattgagacagagtcaaacgcagatctagcgattcatcgtgagtaacgaaaaatttgatctcagacaaggaaacacaggtagacaaagagagatattcagagaggggacagaacttacatcaaattctgcggccatggcggcgtttcggagctacgaggttatcagcaccgctcgccggagaaaatatagacagcttgaagacgagttttgccaagaaaagactcatagccataagtaacagcaaggttggtcaatggggttactttgcaaattataaactataggatttgtttctatcttcgattttggcatgcattttacttctacaactgatcaaccccgcttgacaattgaaatttatttctctttgattttggcaaatcattttaattgtagtactaagtaccaaccaatcctacttgacaaatgaatatttttaaatgtattttcaacccttttaatttggtatattttaaaaaaactttatattatcaattcaaatttgaatgatatcgtttggttaaaataaaataaaatttaatgtgatattagactactagtaaaacgaaaatatagcaaaataataaaatggttgacccatttggaataaacatttttatggttaaataattgaaaatatgcaaaatgataacaaatcaattatacaattcaataaaattattatatcatagaaataatttattctcaaacaaaacaaaaaattctcatatgcaattattaaattagagatttttcatcaaaagtaaatacttgtaaatataattcaagatccaccttgtttcaaaatgcatttgaaataccatctcaaaatatttgtatgactttgaactgttattcacttgatctattaaaacggacacatatgttttcactataatacacaattcataagtcttcaacattacttaaaaatcgtctttcataactttacttaatattgtttttggaaactttttttgtgtgatgttttttactttaataatcgattgatttgtttagtttataagaatgttttttgtgatgttttaagttttcaaaaacaacatggaagacaggaatactaactttatagtgaattcggtgttggtcccgaccccttcaccatggtcatgttcaaaccggattttgcaagactagatatggatactaatattgataatgacacaatttctctaatgatctacatcctcgtggaaatcttgttttttaaaataataatgaaaaattatttatcaaatgcttataatcgtttcattcttttggattcaatgccattaaaaatcattcgacaatttctttttggtaacttcttgatgtcatactacataatcatagttgatgagtttgtacaaaacttgaatagtttgatatcgttattagaagtaacacatgtaacaatcttggagatataaaaatgaatataaaaagtgtattttgtaaaatatttttaagattattattgtgacgaaattatttttgtataaaaaggtttagaatttgatagatagcgttaatatcataaaacgcaaagtattatattattgatcacaccattagagtgagtaaatacatatttgaaagaaaaaattaagaatgttcagactaaaaagaaaaggaaaaatgttttggcttccggataaatgttggggtcaatattaaagaaataaaaggtgtgggtgctgatacggaaattagtttacaggctgtaatttttctttcaggctctctctctttcgtcgccgaaccagttccagaaaggctgtagcgattcaaaatttcacaaattaaagtcttcttcctctccgaatcagagattgtctccttcttagctcagatctgggagcttcttgtgatagatttggaagaag

SEQ ID NO: 11010 - DNA, 3000 bp, Unknown
  misc_feature (1)..( 3000): cDNA_ID_3034487_gDNA_ID_2214471_Annot_ID_183036 3000 nt of promoter + ATG
gttgtttaaacatggatacatgatgactccataggccttttcatcccaatgatctgctttcttgcctcgtgatcagttttgttatgttggctccatgagactgagagatcctgattcaggtcctcttcatgctcatcatctgtagaaacatcaagaaatgttttacgctgtgagagactgcttgtctttgcataatctaaagtttgatcaccgccaaaagaaatgcaagcaagcaaatgatttggaacgtttctttagttcagttcttgtcaatgagaaaaattcacaatgagatttcaattgcacctgaacggtccaagagaggaaactctgttaggcgtctaacgcagaccttaagtgcttgaagctcagcttccttctcttggagtttggactgagtagtttgtagttcagcttcaagctcattgatctgtccttcttgttgttcgatgagaaggtggcttagtttcttgtccagctctgatgccgatattccaccacattggtatgactcagctccattaaccaaatccttacattcctccataacatcacttgtctaaggggaaaacaaaataaaagatgaatataagcttcagccattgaacccacccaacagcataatgaattgttggaaaaacaatccagatgaaattcaccttaatagatttgagaggagactctaggaatatatgtcaatggaaaaagataaaagcacactcacctcagccaagttcaatttctgcagctcagattcaagttccatctctaattgttccatttctactgcctcttgttctggctcctcagttaggacgctgctagcatattctccatcattgcctgacttgatatcgagagatactctactcaccatctctgatctattgagatctatctggccagatttctcagaacttgctgcacagccacgaaacttgaaaccctgtaaagatttaatcctagagagttcatcttttagctcttggatgactttggtagtttcttctgttgctgcatgcagcttactgatttcacctttctctgctgacatcatatacatcatgcagacacccagtgctgagctgaaagaggaatgatctgaaacacagaagaatgaagcttcaataatggacaatgccaacaggaatatgaagagtcattgttttactgaaagaagtccaacaaggtacaatcaaacctcaaagcagttaatcaccataacattgaacccataaataaggcttattagatgaagcatttatggggacttaatagatgcagtaagcgaattagcacttggaaaacacatagataaggcttattctactctatagaagcataggcaataagtgattcccctcttatccaaccactataaccacaaagtctcttgcactcctacaaaatctagaggtctgaagatttaccgatcaaagagtactttttatcactcaaatctcaagaagtctaggaagcaaaacctaacgccattatatatcattctataacacaagatccctgaaagcttttccccaagattaacaccactatatatcattctataccacaaggtccaaaactagaaaaactcagcacacgatccaatcatcaaataagacaagttcagaacactccaaaaactaacttaagatccaaatttcccatcatgcaagtgataacaacctcactacagatatgtcttcatcaaccgagattccattcatacttcattttcaaaccgagaatgacagaagaaatcaatcagagttctcgaaagagtataagcaaaaccttgattactataacatgacccacgttttgaagcagaagcagcacccaaagttttcgtctttttcgagcaaacctcactcttcatttcaaaagcaccaacatttccagatcgcttctcgatctcacatcccccactattctttttcttcttcttcttcatcaatccacgaaccctaactctacatttcacccctgaactcttcctaaacccaggagaagacccggatcctgatcctgagttaacggtagacccggaactagaaaatcggaaaacgccattggttttgtcgcaaggagaatcgagaaatccaatgctcacaggaggagtgactggttcctgctcttcagcgtaattctcgggagtaggagaatctcgagagaaagggttgaataagcgtttggctacaaaaccagtggatccagcaatggctgctcctagaataacttgccacatctctaacaattcgtaaacgataaaccaaaagtggagttaagtctgaagtgtttaaatccgacggaaacagagtcggagaaagtcccgatgtgtcagagacagagagagagaagaagaagaagtgagatttttttgtttttcagcggcggtgggtcacaccatcacatgtttcccgcttttacacacaaatttccaaatttattggtttcttaccaaacctatcagatctaatttaggctttttgttttatttgggctttaataggcccatttatttaacatctttaatgtattgctcttataggcttttagcaactccaattttaatattggtgttcaagtaaatgactgtaatacccttaaaattatatgaaatcaaccaaaacaccaaaccctaattgtaaaacccaaaatctgcaagagtctctctggttcttcgattcttctcggtatctattcgccgtcgtcagtgtcatcgccggcgtttttaatttcgtctctattgttaccattattgctgccttttcctctcctccggaaacgctctctttctctatttaggtacgacttagttgtaatatcttctcttggtaattttctctactgctctgtttcttctctttggcgttctccctttttttttctgctctaatcgaatagtactcagcttaaatttattttctgatgttttcagtctatgttgatatgattccattgccttgtattgagagttttatggttacttgacagatg

SEQ ID NO: 11011 - DNA, 3000 bp, Unknown
  misc_feature (1)..( 3000): cDNA_ID_2714666_gDNA_ID_2214471_Annot_ID_183035 3000 nt of promoter + ATG
aaagaaacttattaaaggaagcaatttccacattagattgatgactaaaccccttgtcaaaacagctgacttctcaaagctgtggtgtgatgttctcatatcaacgccgatgcggttgaaaagagcaatcaaggctaaaaagattgacttaagcaagtaagtcaatatcatatgttagaatataaacattgtatttctatttgtgttgtgcccatattcatctttatctctgttgaatacagggtcgagtaccttgtccttgatgaatctgacaagctgtttgagcagagcttgttaaagcagatagattgtgtggttaaggcttgttcaaatccttcgatcatacgttcattgttcagtgctactttgcccgattctgttgaagaacttgcacgttccataatgcatgatgctgttcgtgttatcattggccgaaagtaagtatagaaaacatgatagtatgatactgaagcttattatagatacttcacaacatattttgaagcaaaatgatcttaccttttactattcaatatagaaacacagcatctgaaaccgtcaagcaaaagctggtttttgctggaagtgaagaagggaaacttcttgctcttcgccaaagctttgcagaggtaagttcacttatcttaacagtatgatcaagttagtccaataccttttgtaattccttttctacttggcagtagagtctgaatccaccggtactgatctttgtacaaagcaaagaacgagcaaaagaactctatgatgaactgaaatgtgaaaacatcagagccggagtcatccattccgatctccctccgggagaggtaaaatcatctttcatgtagtcatcaaataaagtttgctcctctatggaaagtatagagatatataaattgatatgaaacaatttaccattggatgctgcagcgggaaaatgcagttgatcaattcagagcgggagaaaaatgggttttgatagccactgatgtgattgccagaggtatggatttcaaaggcatcaactgcgtgataaactatgatttcccggattcagcttctgcatacatccacaggattggtacgcatattattattactagagcctttgtatctaaatcttatattctctgttctatgagagtcatttttgatgatgagttgatgtatttggcctcttttaatacatttcaggacggtctgggagagcgggaaggagcggagaagcgataactttctacacggaacaagatgtgcctttcctaaggaacatagccaacacaatgatgtcatcaggctgtgaggttccatcgtggatcatgtctttgaagaagaagaaatggaggaagcataggccgagacgtgattctatatctactaaaccaaaagccgataaaaacgatacagatgagtaacctcaaattttgtcttttatatttcttgttgttgttacattgatgaattagtcttggtcttttggatccaaaacactttacactggctagaatcgggaatctagtagaatcgaacttagttgtcacttggatcgtactacgaaatacatatgtaactcaaacctagttactattcgattgtgagacttccggtttttcatgtcggattcaatgatttcttaagatgcattataccataagttttggtttggtataactttaagagcgatgtatattatttgggttgggtttaatcaaaccggttttctccgaattggataatacttaagttcttgcttagctggggcatcactccaaataattattggaattaaagagtaataaatatcaatgatcttctttgttaaaataaacgaatcatgacaaccaaatattagctcaaagttaagaaggaaagagaaaaaacaaaacaattgattacatatttttctaattttacaaaatttgggacaataaaatctatcaaacaatcttaatatcatttgttcataagaaacaaaaaaaattagattggaccgacggagagagagaatgatccaaaactctgactaacaaaacacaagacgtgtgcattatgtatatgtcttttctagataatcaattccattttgaggttattaactaatatacaaaacaatacttatgatttacatctcatataaataaataagtttatgcacatattaagatttctaagaaattatatattgaagcataccacaacgaccacatgtattatggtacattaaaaaaaacaatcatggtgtagatacacgattttcatgattaaaaaaccaaaaaaattgaatctattattgagtgaactcgtacgttccacttccaattgtttaagttcacaaaaaaaatcaagattgacctagtttacaaaatcttagggttatattttcagcatttcaataatgattaaatcatggtaatgagtaattaagcatcattaagagatttaaaaccaattaatctcattagctgcggaagctgttagttaagagcaaaaaaaaagcgccaagctgttaaaagaggaaatcaaagtagggcccacaaaaaaagcagcccaattagtgggctcacacacacacagagacagagacaaatactctctctgctccaaattcctctctctctctctctctgagttcttctcaagtcaggaaagatcaaaacttcgacccattcaaattctcatttccaaggaagtctcacattggcattaaaaggaacttaaaaggcgtgtttttgatggtttaaagttcagtttcgagcttctcttcttcaagatctgcttttacaggttcgattcctcttctatctcccgtttccaggctaaagaaggttcctttctattcaattcaactgttttgacttttgggtttgatcaaagaatttagctattatatttgtgacatcagagaatctgttgcaatccgtgattttggaaattttttatcatctgaaccaacatttttcatctgagtaggaggatcaaacatagaacggcgacgagatg

SEQ ID NO: 11012 - DNA, 3000 bp, Unknown
  misc_feature (1)..( 3000): cDNA_ID_2714670_gDNA_ID_2214471_Annot_ID_183033 3000 nt of promoter + ATG
aatgagtaattggtaagaatataatttgattactcattcaaaagtagatgtcaatctaacttacattttcttcaatgtagttcaaacaaccatcattggggacaaaggcagcaatctttttaccattcttgatcaactgaactctagcacacttacggatagcagagttaggctgcttagcctcaataccactgcataatcaaacacagagtctcatcaaagtcaagatctatactactaacaaaatcaagaaatggtaaatatatatgtttatacaaacttacattttctcaagaacgattcctttagcgtgagaagaacaagcaaaaggcttcttccactcgttgcctcgattagacttcttgtaatgcttgtccgcccacctctgagtaatccgaagctgcttaagcttgcgaccagctcccataccacgtgtcttactgaagatattcaaatagaagataaaagaaattgagaaccaaaggacatttcatcagatgaaatcaactcactcagaacatataaaacaaattcggagttgataaagaacataaagttataatctaaatcacaaatacttaacacaagaggagagtgtagtaaggaaaaaaatcaaaaatcataatcataatttccacatttcagaccaaataactccaacgtttataagaaaaaactacgaattatagcaacttcgtagcttcaacagggtgattaacaaagtattactacacgacgtatgaatgtcattcaaatcccttaattcaaccatcccgacccgagataacgaaaacggcaaggcaccaaagagaaaccggaataaacaaaaaaaacataaaacaaatcctaaacccgacataacaaaaacacgatcacttataagcggagagatgagactgaaacataaagagtctaagagaggataccgtaccccatgttgacgacggcgcgagtgaaaaagtcgagagatgagctgaaactgctaaaggcgcgacgttttaagttcgtgagagattgaaaaaccctagtgataagaaaataggtatatataggcttgggtcaagactcgtgagagccctggtttaggcattaaccggtctgcaatgaaattgattaaacggcaaatgattatttttatatttgggcttaacaagaaggcccatcacatgtcaacccaaatattatgccaactccttaaggtaataatacgggaaaaatgtcgttttatacgtgaactttaaaaaatggccatttaatacgaaaatttttgtgtggccaaataaaacataataaaaacgttgaccggccgtttcacacaaatattattgttgactacgccaaagtctccatgccgttatctttcattaacggatccgttaattccgttaacacatgttaattagtttccgtcaatactcaaaacgacgtcgttttattgaaatcaaaaaatcaaaattcctaaaattgatttcaaaatctctaaattccaaaaaaacaaatccttaattcctaaattccaaaaatcaaatccctaaattctaaaaaccaaatccctaacagcctcttattttcagcaattggtcgtcgtaatagtcatcgtcgtaaagatcctcaagagagctaaagaagggccttcgctttgatgtttcctccttgttcatcatcgatcttgttcctcccccttcgtgaattcaaacgaacaactgctgtcaatagtcgaatgttattattcatattcaaattggttctcatgtgtgtgtgttcgtaacattttattcacaagacaacaaaacaaaaacagggaaacttccaacatgatgaaataagattatgagagtgagaaaagaaccttggacaacgggattgagattcctaaagaagaacatgatgttgccatgtgaagcagatggattgaagaaaaatgaattggattccattttggaatttagggattttgaaatcaatttgggaattttgattttttgatttcaatgaaatgacgtcgttttgagtattacaggaaactaattaacgtgtggtaacggaattaacgtatccgttagaaaaagataacggtatggggattttggcctggtcaacaataacatttgtgtgaaacgaccggtcaacatttttattatgttttatttggccacacaaaaaattcacgtattaaatggtcactttttgaaagtttacgtataaaacgacatttttcccgtaataccgtatacgctgcattgaaacattccagtcctagtcacgtgcacggtgcacctactagcccacgactcccacactatccgccacgtcagaaaacgaaaccggttgtagcaggtaaaaggcacacaaagctaagcataaggaagcgcgcgacacgcaccggttcagccggtactctgcgtcgataaacgacatgcaagaccgtccattttcttaaaaaagcgatcttgatctgacggtccttatttgtttattcaaccggtaaaatacaaaaaaatcaggaaaaggatcgtggatcgtcaatggcggactggagtaaatttctttgacaataaccagtcctaaatcaaggtagaatattgcaaaaatgttcaatggaagaagatagattggtgaccatgattatcaacgacgtctaagctgtttctgcgtcatttggtaagtgaagcttttgtctctttcgatttctctaatgcaaaaaaaaagggagaaagattttgattcgttattgaaattattctctttgagttattttaattagaaagaagtaatttttatatatatttgtcaagaaaaaaagtgagcttgaagttcacgcttgtaaaggtgtcagttttgcagctcattatcgccatgttcttctctctcgcgctctttgtgttttcttctctttgctcataagaacccactttaatgtatgttcaggtcttcttcttcttcgtcttgttgctctgaagagttggtcctgacttgggatttagggatttcgttttgata

SEQ ID NO: 11013 - DNA, 3000 bp, Unknown
  misc_feature (1)..( 3000): cDNA_ID_1377843_gDNA_ID_2214471_Annot_ID_183032 3000 nt of promoter + ATG
ataatatacctgtgagagctaggaggaagacgaagaaaatcacaggccaagcatgaacaggatcacgatcctcaggcaagtactcgttaaggaagctaagcttcttcgaaaccttagcagctggtttccggagcttccttacaacgaaagagtcgtcggtcaccaccatctgctgcacaacgtctttgcatccgattgcgagatccataagcatttctccccaagacttcataaaccccgtcacttgatctttcaaactctccactgattcggatccagaacccgactcgaaacccgaactctttgacctcgattcagtatccgccgtcaaatcaatcggagatccgtcgtattgtaaacctccgtccatgagactagctaactcgtcttgccacgtaggcactcctcttcgcatctcctccattatcaaaacgaaatccctaaatcccaagtcaggaccaactcttcagagcaacaagacgaagaagaagaagacctgaacatacattaaagtgggttcttatgagcaaagagaagaaaacacaaagagcgcgagagagaagaacatggcgataatgagctgcaaaactgacacctttacaagcgtgaacttcaagctcactttttttcttgacaaatatatataaaaattacttctttctaattaaaataactcaaagagaataatttcaataacgaatcaaaatctttctccctttttttttgcattagagaaatcgaaagagacaaaagcttcacttaccaaatgacgcagaaacagcttagacgtcgttgataatcatggtcaccaatctatcttcttccattgaacatttttgcaatattctaccttgatttaggactggttattgtcaaagaaatttactccagtccgccattgacgatccacgatccttttcctgatttttttgtattttaccggttgaataaacaaataaggaccgtcagatcaagatcgcttttttaagaaaatggacggtcttgcatgtcgtttatcgacgcagagtaccggctgaaccggtgcgtgtcgcgcgcttccttatgcttagctttgtgtgccttttacctgctacaaccggtttcgttttctgacgtggcggatagtgtgggagtcgtgggctagtaggtgcaccgtgcacgtgactaggactggaatgtttcaatgcagcgtatacggtattacgggaaaaatgtcgttttatacgtaaactttcaaaaagtgaccatttaatacgtgaattttttgtgtggccaaataaaacataataaaaatgttgaccggtcgtttcacacaaatgttattgttgaccaggccaaaatccccataccgttatctttttctaacggatacgttaattccgttaccacacgttaattagtttcctgtaatactcaaaacgacgtcatttcattgaaatcaaaaaatcaaaattcccaaattgatttcaaaatccctaaattccaaaatggaatccaattcatttttcttcaatccatctgcttcacatggcaacatcatgttcttctttaggaatctcaatcccgttgtccaaggttcttttctcactctcataatcttatttcatcatgttggaagtttccctgtttttgttttgttgtcttgtgaataaaatgttacgaacacacacacatgagaaccaatttgaatatgaataataacattcgactattgacagcagttgttcgtttgaattcacgaagggggaggaacaagatcgatgatgaacaaggaggaaacatcaaagcgaaggcccttctttagctctcttgaggatctttacgacgatgactattacgacgaccaattgctgaaaataagaggctgttagggatttggtttttagaatttagggatttgatttttggaatttaggaattaaggatttgtttttttggaatttagagattttgaaatcaattttaggaattttgattttttgatttcaataaaacgacgtcgttttgagtattgacggaaactaattaacatgtgttaacggaattaacggatccgttaatgaaagataacggcatggagactttggcgtagtcaacaataatatttgtgtgaaacggccggtcaacgtttttattatgttttatttggccacacaaaaattttcgtattaaatggccattttttaaagttcacgtataaaacgacatttttcccgtattattaccttaaggagttggcataatatttgggttgacatgtgatgggccttcttgttaagcccaaatataaaaataatcatttgccgtttaatcaatttcattgcagaccggttaatgcctaaaccagggctctcacgagtcttgacccaagcctatatatacctattttcttatcactagggtttttcaatctctcacgaacttaaaacgtcgcgcctttagcagtttcagctcatctctcgactttttcactcgcgccgtcgtcaacatggggtacggtatcctctcttagactctttatgtttcagtctcatctctccgcttataagtgatcgtgtttttgttatgtcgggtttaggatttgttttatgttttttttgtttattccggtttctctttggtgccttgccgttttcgttatctcgggtcgggatggttgaattaagggatttgaatgacattcatacgtcgtgtagtaatactttgttaatcaccctgttgaagctacgaagttgctataattcgtagttttttcttataaacgttggagttatttggtctgaaatgtggaaattatgattatgatttttgatttttttccttactacactctcctcttgtgttaagtatttgtgatttagattataactttatgttctttatcaactccgaatttgttttatatgttctgagtgagttgatttcatctgatgaaatgtcctttggttctcaatttcttttatcttctatttgaatatcttcagtaagacacgtggtatg

SEQ ID NO: 11014 - DNA, 3000 bp, Unknown
  misc_feature (1)..( 3000): cDNA_ID_3034495_gDNA_ID_2214471_Annot_ID_183028 3000 nt of promoter + ATG
agcaaattttcactctttaacgctccatttcgtacattactttgatcatttttctttttatctatttttttcgtcgaccgttttctttgacgatgtttgttatatgattctaaaagcatccacaatggtagactcttagcaaaactcttaacaaatatttaaaaaattatataatttaaatattagataaatctcttaaatttggtaaaacttaggtcaattgtctcttagttaagagacaaatagtcgggttttattaggcccactagttcgttaaaggctaaagcagtgcccggttcttatagcggaggtaactttaaatattgggcccttactgaaaggtaaattagttgggtttattgggctttattataaggcccactaattcagcagtaaccctaacgaaaccctagcatatattagttcttaaacttcagctgagagaaaaccctaatttctcaaagagtctaaagagacggagagtgagagaagagagaaacatttcgagacaaatggccgccgccgctgctcgtcctctcgtcaccatccaaaccttggatggtgacatgtccaccgatcaatcctccaccgtcgtacttcccgacgtcatgacggcgccagttcgaccagacatcgttaacttcgttcacgcccaaatctccaacaacagccgtcagccatacgccgtatcgaagaaggccggtcaccagacctccgccgagtcctggggaaccggacgtgccgtgtctcgtatccctcgtgttcccggtggtggtactcaccgtgctggtcaagctgcgttcggtaacatgtgtcgtggtggtcgtatgttcgctccaaccaagatctggcgccgctggcaccgtcgtgtcaatgtcaacatgaagcgtcacgcaatcgtctcagctatcgctgcaactgctgttcctgcgcttgtgatggctcgtggtcacaagatcgagaatgttcctgagatgcctcttgttgtgagtgactccgccgaagctgtggagaagacctcagctgcgatcaaggttttgaaacagatcggtgcttatgatgatgctgagaaggcaaagaacagcattggaatccgtcctggtaaaggtaaaatgaggaaccgtcgttacatttctaggaaaggtcctctggtggtttatggaactgaaggatctaagatagttaaggcgtttagaaaccttcctggtgttgagctttgtcatgtggagaggcttaatttgttgaagcttgctcctggtggtcaccttggtcggtttgtgatctggaccaagtctgcctttgagaagcttgagtctatctatggttcgtttgagaagccatcagagaagaagaaggggtatgtgcttcctcgtgcaaagatggtgaatgctgatcttgccaggattatcaattcagatgagattcagagtgttgtgaatccgatcaagaaggatgcgaagagggctgttcttaagaagaatccattgaagaatctcaatgtgatgttgaagttgaatccttatgctaagaccgcgaagaggatgtcactgttagctgaagcacagagagttaaggctaagaaggagaagctcgccaagaagaggaaaaccgttaccaaggtaatctcaatacttgacttgttctcttatcaaccgtttttggattgtctttgtttagttactgattacattttgatctgtggttgcatttcatttgacttaacttatattgcaattgttctaattgactgagtttgtgtatgttaagctatacaataatctgttcccctctggtttagtctatgactatagtagtctttctttactagatcttaccttttctgttctgaattgtggtctagtagtttgtcttgtaaatctgttgtgtacgattctttgtcttgatattgattttaggttgagctattaagcaattgaatctcttagcactttcttgtcccttgtgaaaattgttcttcatatgtcctcttttctaactccactttgaaatatctatttttcttacatcaggaggaggcgttggcaatcaaagcagcaggcaagtcgtggtacaagactatgatctccgacagtgattacaccgagtttgataacttcaccaaatggctcggtgctagccagtaataatctcgtctgctttggaacactttccatattttagtcaaaagattttggtttttttaatctgttttgtctttgggtgtctggatatcaagttgaattatgaacaagtttcacttttttacatctccatttcttacttcgcctttatcagtttcatttatttatctcttgctccttcgtttcctatgatgatgcttgttatgttatgaacctacttaaaaacaagctgaagctttctttggtttaccccagcagaaacattaatcaagttcaattgatcaatatgtcgattgatttactgtttaaaggcatagtgtgtctatcaacccttaagtctttttggtggatagtgaagctcaaacccaattcaaatgtcgatcaaccctaacgtttttgtgctcgatagtaaagcatgagtataaaaagaacgtcgcttcttcctacaatcacacagatcatttgaagctttgattagttggtacaacatactcgaggaatacagaatgacacgtggtgtgtatctgttggataaatttgtattattcttctttactatggatggtttctggaaggcgcgccaagagtccttctttttccatctacaaatcatgaccgtccatctccaaaagaagactgaaacagtgaaactagaagcttcattttgatcatcagccagttttataaattgatccgtatactaaagtaacaactactagcactttcttctgtgatcgatcattgtgtttaaactaaaggtttgtatgttcttgtaatcttattgatctcgataggttctccattctctttaggttttaaagccttcaacgatttccagaaggaagcgaatttgaaaaaa

SEQ ID NO: 11015 - DNA, 3000 bp, Unknown
  misc_feature (1)..( 3000): cDNA_ID_4262542_gDNA_ID_2214471_Annot_ID_183027 3000 nt of promoter + ATG
caacgggaggctgatctttgatatgcctcaacataggcaaaacaaagccaagggttttacctgacccggttttggcaaccccaatgcagtctctaccgctcatgatgattggaagtgcttgtgcttggataggcattggcttttcatagttaagcttcttcagagtatccaaaattttgctagttaatccagtctggtgccaaaattgaatgggtcttggaacatctttcccatgaactttcagctccaattcctttctataagcgttcactgcatcctgtgtcatccttgagatatccttgacttcgatataaaaattcttccggaaaggttcatactctattttggagtggtcaacaagagacaatttctctgcttttgtcttcttaactctcttcataaactcctcgtcgtcttcgtctaaacttggatcatcatcactctttggttctgagtaatctgaatcagaatcttcaccttgaattatcctaccaagggcggccttattaaaaccttttttggcttggtcaccagtttccttcccattcattttaaaatccaaaataccatcgatcacaatattgctaagcttttcaacctcaggtaataccatagtattcataaaagcatctaagggatcaatttcgtcttcatctgcagctctgtcacctccattctcagagacagtaacagctgtctcattctccgaggcgaccatcttggcatctccaccattttcgagtttagtatcacgatcaacatccatctctgagtctgatttaacttcatcatcagattcaccatcaagagtccaagccttaccggtctcaggacccttactttcaatttgagcttcctcgttttgcctcttcaactcttgccactcctggactcttctcctccgtttttctacttcctcagccaactgcttctgctcatcctctacttgttcatcccgagttttcttctcaacatcgtcatctccatgcctgctacgctccgttcttttgcgtttcaagccacacttgacatcatcactctcttcattacaatcctcacgtgacctctcctttttctgtttcttcctacccttttctttctcacgttctctcctctctctgtcccttttcagatattttcctctatctctgtcacgttctcggcgtcctcttcccttgtcctcccctctgcgtttactatccctctcgtattcttcttcttcaaaatcgctactttttctatccctccgtatccgtatcctctcctcttcctcagaatcgcatctcttaactctcgagcgcatctccgtcgtatctcgccgaccattctctttcttactgcgatcacgatctttgcgatcattttccttcctggacttagatttctctaacatcatctcaaacgcaacaaatcccgatagaaaattccgtaacttaaacccaaattcaaatcaaattcatccgccaaacaaaagcttcaacgataaccctaaaaatgttgcggtgaagaagacaaagctaccagaagaatcaaaactctctacaccgtaacgttgtaacgtctcgttagtgtcgagtaacagagataataaagctgtaaggttgggcccttattggtaaaagataaaagtgaaaaccagttattgggctatttgggctttagttaggtccactattaatcgatattttcctcatgggcttctaaacaacatcgcaaggttattctattcaaaataattattcatttcgttgatttcatctcatgaatgatttcctattatttatagttcattccccaaaccactcgcatcacaggcgcgttgagcacgtgaggctaaaatccatggactatataaccttcctttttggggattttttgcataaattaaaaactgagaggacctgcagcgcgtgggttgggatttcatttgttgtgactacaattttttttttttttcccccaaaggtctttctgtttattgactttttatcataagataaaacgttacaaaatgggttaaacctatctaggtgattacaaaatttcaaaaattgaaactaaaaaggcctaaccccaataaaaggatatcaaacccaacttgaagagaggcattgaaagctaaaaggactggaccaaaaacccaaacgactacagtattcacatgaaaatataaccaaacgaaaagaactattaccgtgttttatcttttgctcagattatggtccgaaaatattgttatcgattcttgatttagattaaaaatgagataaaactgtaaagattttctgaatattttgaggtgtgcattttaatagaaaacgaagccgatagtgaatacaccgagtttgataacttcaccaaatgactcggtggcagtgctaatcagtaatatctcacctgcttaggagcacttccatatttaggaaaagaatatgatttgaaatattttgccattcaagatcgagactaaagattatttgaactataaagcaaattttcactctttaacgctccatttcgtacattactttgatcatttttctttttatctatttttttcgtcgaccgttttctttgacgatgtttgttatatgattctaaaagcatccacaatggtagactcttagcaaaactcttaacaaatatttaaaaaattatataatttaaatattagataaatctcttaaatttggtaaaacttaggtcaattgtctcttagttaagagacaaatagtcgggttttattaggcccactagttcgttaaaggctaaagcagtgcccggttcttatagcggaggtaactttaaatattgggcccttactgaaaggtaaattagttgggtttattgggctttattataaggcccactaattcagcagtaaccctaacgaaaccctagcatatattagttcttaaacttcagctgagagaaaaccctaatttctcaaagagtctaaagagacggagagtgagagaagagagaaacatttcgagacaa

SEQ ID NO: 11016 - DNA, 1314 bp, Unknown
  misc_feature (1)..( 1314): cDNA_ID_3034470_gDNA_ID_2214471_Annot_ID_183046 3000 nt of promoter + ATG
caagaactattggttctaggatctacttcagtaccaacaaactgttcgtcccaatcaataaccacatcagcggcagtaaacacctggatcagcataaagggaaaacattttcagaaccatcagctataaactaaaaaaaacaaactttatgattcaaatctctcccttgacacgtctcaaaaagtattcagacattatggttcctaagagtatccagaatctataacaaaatttatatggtaacataaattacacaacaccaaagtagattgaaaaaagggacctgcttgacagattcagcgatttcgggaccgatcccatcaccgggaaagagagtagctttgatcggagtggaggaggagaagaaagccctagaaacggaaatgaacggaccggagctagaactcgaagtcccgagaatctggctcgatccgttaccgataagccgtctcgcgagaaatgctgtcatggtcatcgcttccagcctcagaaggacgcagagagagaaagagaggaaagaggagactttttgctgcgttggacctgaaaaagtttacttttataccttctctagctccagcagagaagcagagaacatttcgatttccatgaaataaaacggcacakagttagtgtctgaaaataagaaacggcatcagcctatgttcttaaacggccatggtcaaatgaaccggatatcaataaattataaaaaccggtcagatgaaattaagcattcagatcccgataagcagtgtgacactgaaacagcgaaaggagctctctctcactccgaggcgatttcttctgtctcgacgatcttgcgcttttcacatttgaatcctccaatccattacttcttctccgatcttttattccggtgatcctttggattatgattatcgagatccattgctgcctatttgagtcttgaatcatttgtttgcgttctcatctgtgcttagttatgtgattctccgataagatttagttatgtgattaatgcatgtatgtatcaatccgaattttggtgattcgttgtctattattaaatacgtcaatctccatttgtaatccctggttgaaataatagctatcttgtcatggagatcatcaacattacatttactacactacacacataatgtcacatatgatcttagtatatgtactcttttgtaccagtgactagaacaactgtgagtgtgggttgaagtttttaatatcttgttaaaatcgaaagtttttgactcagatactacttggttttgtttttgtcactgtttcaggtacatctcaagtcttacaacaatg

SEQ ID NO: 11017 - DNA, 3000 bp, Unknown
  misc_feature (1)..( 3000): cDNA_ID_2705158_gDNA_ID_2214471_Annot_ID_183043 3000 nt of promoter + ATG
tttttttaatgagtgttattattcttttatttatgaattctggtgaaattgtataatcaaaaatatacattcaagatttgagaaaataattttcaatgagaggaaacattatccaaaaacattaattgtgattaattacactttgctcagctaaaattttcaaagttggtttatgaatctttgaaactaaagaggtgctacttcaattgttctgttagctgtttatatgaattaaaggagaaaattaatatatgaacagattatttttatttagtgtttttatatataaccatttttaacaaaatatttagctaattagttcatgcacacattttgtctactatatatgcagtgttagatgaacaaattcgttttatgtagtgattgtgtttaaccattttcaactaacatttagctacttaattcatccacacaatttgtcagactacataattcacatgacatttactgctctgtaatagtattaaaggaaacaaatatgaaaataacctactagtaattcttttgacaatatagagcttttcttagtcataaaacagcttttgtttcaaaattggaaacgatctctctttttgggatcttacacaaagtacacatgtacgaaattcctcattgatacatcattcctcattacgaaccacacaattagatctaacatatatatatttgttccactcaaatacaaatcttgttagggtaacatcacctctgaggaaacgacaaaatgaagttaatgaaagtatttggctttagatggattcgtagatagtacgtgacacgttgctgatatgcggacttcagataaattatcggctagtatcataaagataatgtaagggtctaagcatactcactaattaacgaaatatcttcttagaaacacctgagctcgatctatttcaatcatagtgactcaaacctaagaaaatctttgacatatgtatattacattagtgttccaagaagatgctacgttcgacgtcatatttgttatcctgtaaattataacaaagatgcatcaacattcaacagagaacaaagtttagtttttatatatatatatatgtcacgatcataggtctacataactataaattgatacaattgattttacagattttacacaacatatgtatccaacttgatgatatatccggtctgccgtttcccactatatatagagtattttataattgattcccatttatttttcttagtttatatatgttcgtcttttggaattgcttaatgaaagtgtgtgcgagtggttaggtatgcgattctattatgtctctttatttatttttgatttcgaatcgcaccactaccttcgtatgggaatgtttcaatatgatatctatctgtatatgatcacgaatataatttgattttgatcaaaatcaacatgtaatataatttcacgtaatatcaaacatccaatagttacagtttaatctggctactgaatatatatatatatatatatatatatcttcctttgaaagaatgtttatatatttttattctttgtgacgttttttttagctaatggtgatctcttgactctaaattcatacaaattttttaaaaaattagcttagggttttgaaaatataaaaactcttttagggcttatgttttctttttggtcaacggagcttatgcttttgtagaaacactaatttttaagacattaaagtatacatcagttttgttttgtgttttgggttaaacttatacacaattattcaaagacgacaaaacaagtttaaatatgaattccaaaataccagttcatcttttcggactactgtatataagaatattatgttggcaaaaagtaggtttattataggttaaaaataaaaataaagtatagcctactttgttaggaatacatattaaacttcacactaattactagtagatatttaggcaatataagtctagaagcggaaagtagacaatgcctattgcctagtatacatttcggacagcacaagtgacttttaactctttaatcacacagaagacagaactatgcaatgatcgacaacttcttcactctgtaaaatatttggatttctcaattaatggtttctgaaaataacatcatctttttaaagcatgaacaaattaatcctaatgtagacctaaataaaaatcttaagaccatctttatcagtaaaaacaaggaaagattctaaaaaaaaataaaaataatattttaattaaaacagatacattaattattatttaataattgaattaatagtatgatgacacttgtccaaattggatgagaatagtttctcaaagtttctcggaagagaaattcaactctccttctcttctacttttttttccttctatcatactttttcttctttaattattttttttttttattgggtatcttattgagatacttcaaatggagatgctctaataattaatgggaatgtgtttctaattaaaaagataacatctttctttctatatttttgtcgtcatataacacacctcaactcttttaagtactcgtgttgaattttgttttttgaaaagacaaaactccttataatcaacgtaattattaataacaaggagaaaaaaagtccaaagaaaaaaaaaagaaagctttttgggaacataaacaccatcgaaggagggtgggaggtgttttatgttcatgggtggagcttcttggccaacctgaccccattcatcatatcattacccactttcttctcctaaattattctctcttatctctctctctctctttttattttctttctttcttaattcatctaaactctctctgcttttgcttttcgtaattccttacatttcactcaatattaatccccagaatctccgatccacccacaaatttagcaattttctgagatttgatcatttgggtcaccaaaaaatcttgtctttttgatctgggtttaacgccaataacatatg

SEQ ID NO: 11018 - DNA, 3000 bp, Unknown
  misc_feature (1)..( 3000): cDNA_ID_3034498_gDNA_ID_2214471_Annot_ID_183026 3000 nt of promoter + ATG
atcaagacaaagaatcgtacacaacagatttacaagacaaactactagaccacaattcagaacagaaaaggtaagatctagtaaagaaagactactatagtcatagactaaaccagaggggaacagattattgtatagcttaacatacacaaactcagtcaattagaacaattgcaatataagttaagtcaaatgaaatgcaaccacagatcaaaatgtaatcagtaactaaacaaagacaatccaaaaacggttgataagagaacaagtcaagtattgagattaccttggtaacggttttcctcttcttggcgagcttctccttcttagccttaactctctgtgcttcagctaacagtgacatcctcttcgcggtcttagcataaggattcaacttcaacatcacattgagattcttcaatggattcttcttaagaacagccctcttcgcatccttcttgatcggattcacaacactctgaatctcatctgaattgataatcctggcaagatcagcattcaccatctttgcacgaggaagcacataccccttcttcttctctgatggcttctcaaacgaaccatagatagactcaagcttctcaaaggcagacttggtccagatcacaaaccgaccaaggtgaccaccaggagcaagcttcaacaaattaagcctctccacatgacaaagctcaacaccaggaaggtttctaaacgccttaactatcttagatccttcagttccataaaccaccagaggacctttcctagaaatgtaacgacggttcctcattttacctttaccaggacggattccaatgctgttctttgccttctcagcatcatcataagcaccgatctgtttcaaaaccttgatcgcagctgaggtcttctccacagcttcggcggagtcactcacaacaagaggcatctcaggaacattctcgatcttgtgaccacgagccatcacaagcgcaggaacagcagttgcagcgatagctgagacgattgcgtgacgcttcatgttgacattgacacgacggtgccagcggcgccagatcttggttggagcgaacatacgaccaccacgacacatgttaccgaacgcagcttgaccagcacggtgagtaccaccaccgggaacacgagggatacgagacacggcacgtccggttccccaggactcggcggaggtctggtgaccggccttcttcgatacggcgtatggctgacggctgttgttggagatttgggcgtgaacgaagttaacgatgtctggtcgaactggcgccgtcatgacgtcgggaagtacgacggtggaggattgatcggtggacatgtcaccatccaaggtttggatggtgacgagaggacgagcagcggcggcggccatttgtctcgaaatgtttctctcttctctcactctccgtctctttagactctttgagaaattagggttttctctcagctgaagtttaagaactaatatatgctagggtttcgttagggttactgctgaattagtgggccttataataaagcccaataaacccaactaatttacctttcagtaagggcccaatatttaaagttacctccgctataagaaccgggcactgctttagcctttaacgaactagtgggcctaataaaacccgactatttgtctcttaactaagagacaattgacctaagttttaccaaatttaagagatttatctaatatttaaattatataattttttaaatatttgttaagagttttgctaagagtctaccattgtggatgcttttagaatcatataacaaacatcgtcaaagaaaacggtcgacgaaaaaaatagataaaaagaaaaatgatcaaagtaatgtacgaaatggagcgttaaagagtgaaaatttgctttatagttcaaataatctttagtctcgatcttgaatggcaaaatatttcaaatcatattcttttcctaaatatggaagtgctcctaagcaggtgagatattactgattagcactgccaccgagtcatttggtgaagttatcaaactcggtgtattcactatcggcttcgttttctattaaaatgcacacctcaaaatattcagaaaatctttacagttttatctcatttttaatctaaatcaagaatcgataacaatattttcggaccataatctgagcaaaagataaaacacggtaatagttcttttcgtttggttatattttcatgtgaatactgtagtcgtttgggtttttggtccagtccttttagctttcaatgcctctcttcaagttgggtttgatatccttttattggggttaggcctttttagtttcaatttttgaaattttgtaatcacctagataggtttaacccattttgtaacgttttatcttatgataaaaagtcaataaacagaaagacctttgggggaaaaaaaaaaaaaattgtagtcacaacaaatgaaatcccaacccacgcgctgcaggtcctctcagtttttaatttatgcaaaaaatccccaaaaaggaaggttatatagtccatggattttagcctcacgtgctcaacgcgcctgtgatgcgagtggtttggggaatgaactataaataataggaaatcattcatgagatgaaatcaacgaaatgaataattattttgaatagaataaccttgcgatgttgtttagaagcccatgaggaaaatatcgattaatagtggacctaactaaagcccaaatagcccaataactggttttcacttttatcttttaccaataagggcccaaccttacagctttattatctctgttactcgacactaacgagacgttacaacgttacggtgtagagagttttgattcttctggtagctttgtcttcttcaccgcaacatttttagggttatcgttgaagcttttgtttggcggatgaatttgatttgaatttgggtttaagttacggaattttctatcgggatttgttgcgtttgagatg

SEQ ID NO: 11019 - DNA, 3000 bp, Unknown
  misc_feature (1)..( 3000): cDNA_ID_3034502_gDNA_ID_2214471_Annot_ID_183025 3000 nt of promoter + ATG
cgatcttacggaggagatcaatggtgggaacttcatcggcggcagtcaatatctcttcgtctgacttgattagaaccctagctctcgtcaaagcgataagccctttgtcaacgacggatccgatcggattcgcgagagatgccaccgaatcccaaaaatgtcggagaggatcagcgacggtgtgaaatttaccgccgtaaaacaccttagctccggcgtagaatctctgcagatccagtgcttcataatctagaagctttttagcttcggggtacgcggtgatgaaaatctgaaatcctctgtcgagaaagaagccgtcgacgatatctgtacggacgcgtccgccgacgccatcggaagcttcgaggagtaggaaagggattcgtttggaggtgagctggtttgcggcggctaaaccagcgagtccagcgccgatgatgatgacgccagtttgattcttccgaatgtacggatcttccgtggaagattgagctccggaaaagcgttgatatcggtgatttgcatggccgcggcggcgagggaagaaatgagaagtagatgaggttgggagagagatcgccacgggcattttaaaagtttggataaggtttttctcattcctttactttattttccccgggaaaattatttgtctagaaaaaataatatatatatattcaaataattatttaaaagattcgaataagtcttgttttcttgattcttttccttattaatctgaacaaaaacaaattatgaagaccagagtcctagtcccagagaggaccgttgtcctagagacggatacagcccaagagacgaccttagtcctgcggaagatgaagaccaatgaagagtaggaagactggtgattgcttataggccgtctattttggcttataatgattttaaataagtgtaatggattttgttgcttaatacttcgtctgctatcttgttttaaatatttaagaaaataaaacgactttcgggattgtctttttctttctgttccatgtcttcttaactgctatgagtaaaagagctctcccagactcttcttctatctccaaaagcttttatttttgtttgtttattttggtactgataatatctgagtatatatataatatagtagaaacaatgagcaaaagtcaatatgtccgagtggttaaggagattgactcgaaatcaattgggctttgcccgcgcaggttcgaatcctgctgttgacggaattgtttttctttttagcttttgttgggttgtgaaaagtataacaaccttaataatttcgtttttttaatctaaaaatatacggtagttttctcatcatcaccaataagaattgtttgatatgaaacaacagaatcaggaaaatttgttaaaatgtcagaaaatggaaaaatctctaactgaacaaaagtaacaaaaaaaactcccttagaaacagaggaatcatgatgagagacaaaattatacagagacgtggagatgtctgtaacgttgtctcatccatcatcatgtcttcttcttctcttccttctcttttccggtcatccctccgtcctcggaacctccatccccgacgcggtgaacacggcggcgcgtttggtaaacagagcgagaagagcaaaactgtcgagagaatttctacaagcgcacaacgatgcacgtgtttcttcaggcgtgccaacgctcggatgggacagagacctggcccgattcgctgataaatgggctaaacaacgtaagtccgattgcagtatgatacattcaggtgggccttacggtgagaacattttctggcaccggcgtaagaagacgtggtcgccggagaaagtggtgacgagatggtttgaggaaaggtttaactacgacgtgaaaacaaacacgtgcgcaccgggaaagatgtgcggccattacacgcagatggtgtggagagagaccacagccgttggatgcgcacgtgtgaaatgccataacggtcgtggctatcttgtggtgtgtgaatatgatccacgcgggaattacgaaggtgaaagaccattttgatcaaaacagttaaaatgaaaaaattgttagagattcaaaatattttttcttcttctaatgtaatgaagatggtatattattcttggtccttacatatatacagccatgtattgaagaggtataaattcaaatggttcggaatcttttaattttatatattaaagatcaataataaaaaaaaacgtcgacagcagggttcgaacctgcgcgggcgaagcccaatagatttcaagtctatctccttaaccactcggacatatcgacttgttgtatttgtttcgtaagatttgaatacaaaaccgaattctctgttgcctaaatcggagcttttcatcccttgactctctaagacatctgaagcagctaaagtgttggatgtttcacataacgacatgggcggcaagcacccagtggacacaacaaggtacctttgttcttggccgccctctaattcgggtgaaattggaagagaggtgcttggtatatactaggatgcgtatttggtgcttagagatttgatgaaactgaagcagttagatattagagacaacgacctaatatttgcaggtgaagagttcagctcttttgtccgccaggtttttccaaagcttgtatggcttgatggccacaaactcgcaagttaaagataaatgttaggccacttgttttaattaaagtataaaactctttcgtttttttggattcattttcatgaaatcaaaagactacaagtctacacgtgcttcaagcttgaggctctaaatgaagtggtaggaaagaatgaaataataataaaaaaagtcagaaaaatggatggtctgagatcaaagtgaaacctactccacatacacatcccaacttcttccccgccatgtggacttttctttttcctactttctctctctgcattctctcttacacctgtctttatctgaaaaataaccg

SEQ ID NO: 11020 - DNA, 3000 bp, Unknown
  misc_feature (1)..( 3000): cDNA_ID_2990750_gDNA_ID_2214471_Annot_ID_183022 3000 nt of promoter + ATG
aaactacaaagctactaaccatagttcagaccaacaaaaaatgaagttccttactctgatctgtatcgggttctccttcgtcgacactagaagtcacacccactgaaactacagtcttcctgtcctcgttatccttatcaacttcctccctcgttgaatctatagagactctctcagaatcctggtcttccgattctataatcccaccttcctggttgttaatcaagatggcagtttctgcagatattcgtggctgttcatccttacattctgaatcagcattagaatcaacggatatactggattcctggttgttaaacaagatggcagtttctgcagatgtttgttcatccttacattctgaatcagcattagaatcaacggatattctggatccttcggttgttttcacttcttctattgttatttgggttgtagaagattcaaaactatcaacaagagtatctattgattcaatagtaacttcatcttcacttctatcattttccataatggtgcgaagtggaaactcaccttcttttagattccgatcctcaaaagtaggacctggttcctcagacttcacattctcactagttttggtcagctctgactgctccagacagctcccaagaagatctctttcagcatcatgagaatctttttcggcattatcacgagaatgggaatccaaatcattacgctcatcattaatggcatctactttatcagatgcaatattagcagtatcagatgactcctccactttgtcgatatattcagtatcccacggagtctctgatgaagcaaactcagtattaccttcacaaaactcagtcccatcaccaggggccaaatgaaactgaggagtatttaaccgtaaattctcagcctcctgctcagcaactgacacaggggctgttagtatatgtccatcaatactgaccaaaaccacttcagaatctgagccttgagaatccccataactttccacatttagattgtcaaatcgagcacttccatattctgaggttggcgaaggaggatcatcctgaaaatcataaaacctcctattacaatcagactctgtcctctcaagccgactcaaagggtcgaaaccctctcgtaattctccagtaccagagtccgataaactgtgctcaagtcgataagtaacaccgttattctgattaccattgttattctcagacccggaaatcaaattgttggtgtcattagctgcaggatcaacttccctgatgaaatatgcttcaccagaattatcaagatacatgtgaaaatcagcttcggttccattaacagaaatcctgacaaacttctcagcgcctttgagaacaccttggaacttaccaaacctaacataccaaggcgtgctacggaaagaaccatcttgttgttgaacaacgatgacatcaatagcaccaccaaagggatgaaatggtgtcgctacagagtaaaccccttgagaaatcaaactcccaactcttccaaccaaactcatttcatcaaatctttgagaaagtcttcaacttttactgtcctaatcatatacaaaaatctagaaactagagaaagtttagtttcttagacaggttaattccagcctacaggtgaaacaaaacaacccaacaacaagccaaaattagagaacaataacatgtgagagactaaaaacaaaaaactcataaggaggaaaatcaaatcaatcagatacaaaaaaaaaccattcgtaatgttccgattacacaagtatccaaccattttcccaatttcaagcatgcaactttaacagtttctgaactaacacaacccaaagaagaaaaatcaaacagctttcaaattgttggaaagatacaacgagatacgatgatagcccacgaaccaaacatttaaaaatctcagagtcggaaaatcgaaatcaacttacacagattaggaactctgagcggagaatccgagaaaaatcaaaacacggcggaagaaacgacgaatcagtaatcgagattactattgaaaatgaaatggattttaatgaattgtatcctatactaagaatttcattgaaatttctctctcgggggataaaaaaaaaatattgggttgataaaaagattctcggaatttttaatgaaagtcaaaaaggatttgtctttgcttcgacgattgtattttaccgctaccggtgggagagatttataagaaagaggaaaaagatggttgttttggataaccagaacaaattaaatccgccatgaacttaagagactgtaattgcttatataagatgatgagatgactctgtgaagggaggagggagaattacgagaagggtctctcttcgacttttgtcgtaattattgcttctctaagagggtacttttggtatttccatattaaaacctgcgaaagaatatgcttgattttacacaaaagaaaacaaatatgctgaattaatatatttttgaccacaaaaattaagtttccaccttttttttgtttaaatctactttttaaaacaacgtttaaatctattatttttttcacttcttgatgataaatgagaaaatagttttataaaaaattgaaatatagtcttggtaaagacataagtgaaattaatctattaaataaatgttcataaaatagagaaaaagaaaatgggatagtcgtggactcgtgggaatattagtgatccacacaatagcatatctggtatattctttgtctatacgcaaaatcaatttgtttatttagttagccaatttattgtgttcaatctctttataaaaatgtaaaaatttgaaaataagcatcgttcacaagtgtcctatgttgctacgttctcacctaactcgttttcttctaagtcaaatcattttccattaatgttaccgattcacgttggtcgctccgataaatttaatacgctaagccctttttcgcatataaaaatataacagcacagtcatattttaatat

SEQ ID NO: 11021 - DNA, 3000 bp, Unknown; identical to SEQ ID NO: 11007
  misc_feature (1)..( 3000): cDNA_ID_3034507_gDNA_ID_2214471_Annot_ID_183021 3000 nt of promoter + ATG

SEQ ID NO: 11022 - DNA, 3000 bp, Unknown; identical to SEQ ID NO: 11005
  misc_feature (1)..( 3000): cDNA_ID_2714614_gDNA_ID_2214471_Annot_ID_183019 3000 nt of promoter + ATG

SEQ ID NO: 11023 - DNA, 3000 bp, Unknown; identical to SEQ ID NO: 11004
  misc_feature (1)..( 3000): cDNA_ID_3597145_gDNA_ID_2214471_Annot_ID_183015 3000 nt of promoter + ATG

SEQ ID NO: 11024 - DNA, 3000 bp, Unknown; identical to SEQ ID NO: 11003
  misc_feature (1)..( 3000): cDNA_ID_3034514_gDNA_ID_2214471_Annot_ID_183012 3000 nt of promoter + ATG

SEQ ID NO: 11025 - DNA, 3000 bp, Unknown
  misc_feature (1)..( 3000): cDNA_ID_2731368_gDNA_ID_2214471_Annot_ID_183011 3000 nt of promoter + ATG
tttccactaatgtccttcttgttcttcctcttgaactcttgaacaaagtgattcaccattctgttgtcgaaatcctcaccaccaagatgagtgtctcctgcagtcgccttcacttcaaatataccttcctcaatggtcaaaagagagacatcgaatgtaccaccaccaaggtcaaagatcaaaacgttcttctcaccaacacttgtagccttcttgtcaagaccgtaagcaatagcagctgcagtaggctcgttgatgatacgcataacattcaaaccagcaataacaccagcatccttagtagcctgacgctgagagtcattgaagtaagctggaacagtaacaacagcgttcttgatcgttgtaccaaggtaagcttcagcaatctcacgcatcttgatgagaatcatagaagagatttcttcagcagaaaactctttatcttctcccttgtagttaacgacgatcattggtttttcagcaggtccagatttgagcgtgaagggccacaatttgatgtcactttgaacagagctatcagtaaatcttcgaccaatcaacctcttcgcatctgtcacacaacaaaattgaacacaattagaccacagatactatacgaattaaaacgatgctatatgtatattttgcctaaaggctaaaattagtaacattagatcgaaaattgaatctcactagctccagcaatgttaaaacattcttatgaaaccctaaatcatcgctatggatctaccgattacagatctacttataatccaagttcgaaagacaaatttagcaagaggaaacgagtgaaacgtaccgaaaacagtgttaatcgggttcatggcgacctgattctttgcggcgtcaccaatcaaccgttcgctatcagtgaaggcgacgtaagacggtgtggttctgttaccttgatcattagcaatgatctcaacacggtcgtgttgccaaactccaacgcaagagtaagtggtaccgagatcgataccaatcgctggaccttctcctttaccagccattgttaacgctactcaggattaagctaaaaaatcgaaagaaagattgtgaaagaggaattgtgaattgcggctaggtttgttttcttttttccaaaatatcaggtcgaaggagaagtctatatagagtcttgtactcgagtttcgagaaggttcgatggctcgctatgtaaccgcacgatcttttggagttggatctgacggtccaggaatgattcttttctcctacttttccttttcctttaacaaataaggaaagccgtttaaaaaggttcgagaatgttcggttcgatggcttagtccataatcaaaagtcggtcattggctcaacattttcttgcgttctcattggctttgagtcggtccaccgttcaccgtcagtgactcattgatagcttttttccttttcgtttttctgttttttttcccaaaactagctgtaggcccaatgggcttatcttggagaaaatttgaaaaacaagaaaaagttaatgtgtttatttattgtatgctgcataggtttttgccttttacacaaatgataattcagggcagttgttgacatggtccatgagtttgaatagtttgagttgctcgagctatattcacaataagcccaaagaattgtacacacaattgaaagagattgacgagagagtaaagagttttgggtttcctcttttgatagctaaaataagccccaaacaatacgtggaagaagcatgcaaagtggacggtatacgtaacgtaactatgtaataactttaacattctcaaagaaaataatttataaatgcaatgaaataaccaatatagaaactcaaccaaaaaaaaagggaactcattttcagattaaaatttctattgaaaaaaaaacgaatttttgtggcacagaaatttgtagccacaaattggaaataaaataggtgtacaagtaccaagtatatgatagagtaggaccaaattgattatgccatggaaattacctggtgaagaggaaacaatactaaccatgaagcgtgcagcttgtgattaatgctctcgatctctacttgaactcgaactgttgatgagactaatgtctttcatatcacttcttcttcttctcttttgtcttattcctatatttaatcttacccttttttcggtctaccacattttaaatcgagaaatgaaaggtcgattacgtggagaaattataacattttaaactctcgagaaacttgtagaaaatactgttttatcaattagtatttgaaaccattatgttttagttttagagtatgaaaccagctggttttgactcgtttccaacctatacgtgcctcaattttagagatgtcccatttggtttaatctgaccaagctgtatccaaaaagtgattcaagttttatttcggtttatcaccagttacattttcttcgatatatacgaaaagtatcggaaaataagaagacacaatcaaacttgaaattggtaccaaaactagaacagtgtaagtcaaaccgaaaccggatatatgggcatggcctaaaccaaactaaaccgtaatccattcggttaaaattagtttcccttccaactatttgtatatggcatggcctaatttaacccaaactatttgaaatatcagtgtctcttccctcctttgatgtatgaggcactgcctaaaccgaaactaaccagatgcagtacagagactggtttggtttggtaactacacaatatagaaaatgaaagtacttggagttaaaagacagctgctcaaaagtcttaactctttgacgttgccactttaaatcccatcacaccttatatatacgtagtcttcttgctcaccataaccttcatctcatcatctttatctaacaagtattcctacatacaaatccactaaaacaacaatccgttaaaagaatgcgcgacacaacatggctcgagcgacttggcctggctctgcgaaccgcc

SEQ ID NO: 11026 - DNA, 3000 bp, Unknown; identical to SEQ ID NO: 11019
  misc_feature (1)..( 3000): cDNA_ID_2714599_gDNA_ID_2214471_Annot_ID_133086 3000 nt of promoter + ATG

SEQ ID NO: 11027 - DNA, 3000 bp, Unknown
  misc_feature (1)..( 3000): cDNA_ID_3054609_gDNA_ID_2214471_Annot_ID_133087 3000 nt of promoter + ATG
gatatgaaacaacagaatcaggaaaatttgttaaaatgtcagaaaatggaaaaatctctaactgaacaaaagtaacaaaaaaaactcccttagaaacagaggaatcatgatgagagacaaaattatacagagacgtggagatgtctgtaacgttgtctcatccatcatcatgtcttcttcttctcttccttctcttttccggtcatccctccgtcctcggaacctccatccccgacgcggtgaacacggcggcgcgtttggtaaacagagcgagaagagcaaaactgtcgagagaatttctacaagcgcacaacgatgcacgtgtttcttcaggcgtgccaacgctcggatgggacagagacctggcccgattcgctgataaatgggctaaacaacgtaagtccgattgcagtatgatacattcaggtgggccttacggtgagaacattttctggcaccggcgtaagaagacgtggtcgccggagaaagtggtgacgagatggtttgaggaaaggtttaactacgacgtgaaaacaaacacgtgcgcaccgggaaagatgtgcggccattacacgcagatggtgtggagagagaccacagccgttggatgcgcacgtgtgaaatgccataacggtcgtggctatcttgtggtgtgtgaatatgatccacgcgggaattacgaaggtgaaagaccattttgatcaaaacagttaaaatgaaaaaattgttagagattcaaaatattttttcttcttctaatgtaatgaagatggtatattattcttggtccttacatatatacagccatgtattgaagaggtataaattcaaatggttcggaatcttttaattttatatattaaagatcaataataaaaaaaaacgtcgacagcagggttcgaacctgcgcgggcgaagcccaatagatttcaagtctatctccttaaccactcggacatatcgacttgttgtatttgtttcgtaagatttgaatacaaaaccgaattctctgttgcctaaatcggagcttttcatcccttgactctctaagacatctgaagcagctaaagtgttggatgtttcacataacgacatgggcggcaagcacccagtggacacaacaaggtacctttgttcttggccgccctctaattcgggtgaaattggaagagaggtgcttggtatatactaggatgcgtatttggtgcttagagatttgatgaaactgaagcagttagatattagagacaacgacctaatatttgcaggtgaagagttcagctcttttgtccgccaggtttttccaaagcttgtatggcttgatggccacaaactcgcaagttaaagataaatgttaggccacttgttttaattaaagtataaaactctttcgtttttttggattcattttcatgaaatcaaaagactacaagtctacacgtgcttcaagcttgaggctctaaatgaagtggtaggaaagaatgaaataataataaaaaaagtcagaaaaatggatggtctgagatcaaagtgaaacctactccacatacacatcccaacttcttccccgccatgtggacttttctttttcctactttctctctctgcattctctcttacacctgtctttatctgaaaaataaccgatgagctcgtcgccgtcaagaaatccaacgaacgccgaagcacctccgccaccaccaacatcgacggatgctgtggcagagggttcgtctaagaaagtgaggaaaccatataccatcaccaagtcaagagagagctggacagaggaagagcacgataagtttcttgaagcacttcaactgtaataatttatctctgtttctctgtttttagagacttcaaatttcttagtttgctgctgatttctgagtttagttagttatagactgaacaaacagaggaaagtttatgttacttagcttaggtctagtagtaacttagctataaaaaatctgcttagctaaaaagatctgcttcttggagcacttcaactgtaataaatttatagttgtgttgactttttgaaagtgttattgatgtaactaggacctgattctgctgatactactactcctctatgttccttaggtttgatcgtgactggaagaagattgaagattttgttggttcaaagactgtgattcaggttttaaaatagcttactctgcatttttggtcgcagttactttgtggcaatgttttcaacttatttgactttgtactgcagataaggagtcatgctcaaaaatactttctcaaggttcagaaaaacgggacattagctcatgtgccacctcctcgacctaagcgcaaagcagctcatccgtatcctcaaaaggcatcaaagaacggttcgaatattttataatacttcttagtttggttatagagttgagtttttaactcacattttcttgcagctcaaatgccacttcaagtttccacgtcttttactactacgcgaaatggcgacatgccgggatatgcttcatgggatgatgcctcaatgctgctaaacagagttatttcaccacaacatgaacttgctactcttcgtggagcagaaggcatgcacatttgtctatcctttttgttttcttcattttattggtagttgtagtaagaataggttccatcaaaggacgtttcatgtgcttattatggcatataacgccactgattcagctgatattggatcaaagggcttattaaatgttagtagcccttctacatctggcatgggaagctcaagccgaacagtatcaggttctgagattgtaagaaaggctaaacagcctccagtgcttcacggtaaccatctgtgaacaattccatgttttttcactaacttttatgcatgatggagactgtactgatactatctttgtaggtgttcctgattttgctgaagtttataatttcattgggagtgtctttgatcctgaaacgagaggccatgtggaaaagctcaaggaa

SEQ ID NO: 11028 - DNA, 3000 bp, Unknown
  misc_feature (1)..( 3000): cDNA_ID_2714687_gDNA_ID_2214471_Annot_ID_133088 3000 nt of promoter + ATG
aagacaaagaatcgtacacaacagatttacaagacaaactactagaccacaattcagaacagaaaaggtaagatctagtaaagaaagactactatagtcatagactaaaccagaggggaacagattattgtatagcttaacatacacaaactcagtcaattagaacaattgcaatataagttaagtcaaatgaaatgcaaccacagatcaaaatgtaatcagtaactaaacaaagacaatccaaaaacggttgataagagaacaagtcaagtattgagattaccttggtaacggttttcctcttcttggcgagcttctccttcttagccttaactctctgtgcttcagctaacagtgacatcctcttcgcggtcttagcataaggattcaacttcaacatcacattgagattcttcaatggattcttcttaagaacagccctcttcgcatccttcttgatcggattcacaacactctgaatctcatctgaattgataatcctggcaagatcagcattcaccatctttgcacgaggaagcacataccccttcttcttctctgatggcttctcaaacgaaccatagatagactcaagcttctcaaaggcagacttggtccagatcacaaaccgaccaaggtgaccaccaggagcaagcttcaacaaattaagcctctccacatgacaaagctcaacaccaggaaggtttctaaacgccttaactatcttagatccttcagttccataaaccaccagaggacctttcctagaaatgtaacgacggttcctcattttacctttaccaggacggattccaatgctgttctttgccttctcagcatcatcataagcaccgatctgtttcaaaaccttgatcgcagctgaggtcttctccacagcttcggcggagtcactcacaacaagaggcatctcaggaacattctcgatcttgtgaccacgagccatcacaagcgcaggaacagcagttgcagcgatagctgagacgattgcgtgacgcttcatgttgacattgacacgacggtgccagcggcgccagatcttggttggagcgaacatacgaccaccacgacacatgttaccgaacgcagcttgaccagcacggtgagtaccaccaccgggaacacgagggatacgagacacggcacgtccggttccccaggactcggcggaggtctggtgaccggccttcttcgatacggcgtatggctgacggctgttgttggagatttgggcgtgaacgaagttaacgatgtctggtcgaactggcgccgtcatgacgtcgggaagtacgacggtggaggattgatcggtggacatgtcaccatccaaggtttggatggtgacgagaggacgagcagcggcggcggccatttgtctcgaaatgtttctctcttctctcactctccgtctctttagactctttgagaaattagggttttctctcagctgaagtttaagaactaatatatgctagggtttcgttagggttactgctgaattagtgggccttataataaagcccaataaacccaactaatttacctttcagtaagggcccaatatttaaagttacctccgctataagaaccgggcactgctttagcctttaacgaactagtgggcctaataaaacccgactatttgtctcttaactaagagacaattgacctaagttttaccaaatttaagagatttatctaatatttaaattatataattttttaaatatttgttaagagttttgctaagagtctaccattgtggatgcttttagaatcatataacaaacatcgtcaaagaaaacggtcgacgaaaaaaatagataaaaagaaaaatgatcaaagtaatgtacgaaatggagcgttaaagagtgaaaatttgctttatagttcaaataatctttagtctcgatcttgaatggcaaaatatttcaaatcatattcttttcctaaatatggaagtgctcctaagcaggtgagatattactgattagcactgccaccgagtcatttggtgaagttatcaaactcggtgtattcactatcggcttcgttttctattaaaatgcacacctcaaaatattcagaaaatctttacagttttatctcatttttaatctaaatcaagaatcgataacaatattttcggaccataatctgagcaaaagataaaacacggtaatagttcttttcgtttggttatattttcatgtgaatactgtagtcgtttgggtttttggtccagtccttttagctttcaatgcctctcttcaagttgggtttgatatccttttattggggttaggcctttttagtttcaatttttgaaattttgtaatcacctagataggtttaacccattttgtaacgttttatcttatgataaaaagtcaataaacagaaagacctttgggggaaaaaaaaaaaaaattgtagtcacaacaaatgaaatcccaacccacgcgctgcaggtcctctcagtttttaatttatgcaaaaaatccccaaaaaggaaggttatatagtccatggattttagcctcacgtgctcaacgcgcctgtgatgcgagtggtttggggaatgaactataaataataggaaatcattcatgagatgaaatcaacgaaatgaataattattttgaatagaataaccttgcgatgttgtttagaagcccatgaggaaaatatcgattaatagtggacctaactaaagcccaaatagcccaataactggttttcacttttatcttttaccaataagggcccaaccttacagctttattatctctgttactcgacactaacgagacgttacaacgttacggtgtagagagttttgattcttctggtagctttgtcttcttcaccgcaacatttttagggttatcgttgaagcttttgtttggcggatgaatttgatttgaatttgggtttaagttacggaattttctatcgggatttgttgcgtttgagatgatg

SEQ ID NO: 11029 - DNA, 3000 bp, Unknown; identical to SEQ ID NO: 11015
  misc_feature (1)..( 3000): cDNA_ID_4262542_gDNA_ID_2214471_Annot_ID_133089 3000 nt of promoter + ATG

SEQ ID NO: 11030 - DNA, 3000 bp, Unknown; identical to SEQ ID NO: 11014
  misc_feature (1)..( 3000): cDNA_ID_2714682_gDNA_ID_2214471_Annot_ID_133090 3000 nt of promoter + ATG

SEQ ID NO: 11031 - DNA, 3000 bp, Unknown; identical to SEQ ID NO: 11013
  misc_feature (1)..( 3000): cDNA_ID_1377843_gDNA_ID_2214471_Annot_ID_133094 3000 nt of promoter + ATG

SEQ ID NO: 11032 - DNA, 3000 bp, Unknown; identical to SEQ ID NO: 11012
  misc_feature (1)..( 3000): cDNA_ID_2714670_gDNA_ID_2214471_Annot_ID_133095 3000 nt of promoter + ATG

SEQ ID NO: 11033 - DNA, 3000 bp, Unknown; identical to SEQ ID NO: 11011
  misc_feature (1)..( 3000): cDNA_ID_2714666_gDNA_ID_2214471_Annot_ID_133097 3000 nt of promoter + ATG

SEQ ID NO: 11034 - DNA, 3000 bp, Unknown; identical to SEQ ID NO: 11001
  misc_feature (1)..( 3000): cDNA_ID_2724771_gDNA_ID_2214471_Annot_ID_183010 3000 nt of promoter + ATG

SEQ ID NO: 11035 - DNA, 3000 bp, Unknown; identical to SEQ ID NO: 11010
  misc_feature (1)..( 3000): cDNA_ID_2714662_gDNA_ID_2214471_Annot_ID_133098 3000 nt of promoter + ATG

SEQ ID NO: 11036 - DNA, 3000 bp, Unknown
  misc_feature (1)..( 3000): cDNA_ID_2714658_gDNA_ID_2214471_Annot_ID_133099 3000 nt of promoter + ATG
ctttccatagaggagcaaactttatttgatgactacatgaaagatgattttacctctcccggagggagatcggaatggatgactccggctctgatgttttcacatttcagttcatcatagagttcttttgctcgttctttgctttgtacaaagatcagtaccggtggattcagactctactgccaagtagaaaaggaattacaaaaggtattggactaacttgatcatactgttaagataagtgaacttacctctgcaaagctttggcgaagagcaagaagtttcccttcttcacttccagcaaaaaccagcttttgcttgacggtttcagatgctgtgtttctatattgaatagtaaaaggtaagatcattttgcttcaaaatatgttgtgaagtatctataataagcttcagtatcatactatcatgttttctatacttactttcggccaatgataacacgaacagcatcatgcattatggaacgtgcaagttcttcaacagaatcgggcaaagtagcactgaacaatgaacgtatgatcgaaggatttgaacaagccttaaccacacaatctatctgctttaacaagctctgctcaaacagcttgtcagattcatcaaggacaaggtactcgaccctgtattcaacagagataaagatgaatatgggcacaacacaaatagaaatacaatgtttatattctaacatatgatattgacttacttgcttaagtcaatctttttagccttgattgctcttttcaaccgcatcggcgttgatatgagaacatcacaccacagctttgagaagtcagctgttttgacaaggggtttagtcatcaatctaatgtggaaattgcttcctttaataagtttctttccttctctagctgtttgggcagccagttcccgagcaggagaaaggataacagctcttattccatcagttgaagggcgctaatacagcaaagaaaaaactcataaacatgagtcaagaaccaggatcggcgaaatctggagggtcttaagggcaaacacaatttaataccttgagttttataagcatgggacaaataaaagcaaaggtttttcctgacccagtcggagcacaggcaaagcattcacgaccctgggataaagaaaaaagatgataaaactaaatattagaactgataccccataaaagaattcacaaaataatctggacaaaggagttctttctctgctcttaagtgactccagtgtaataaatggaaaaggagtgaataagaccataccgataggagaattggaatagcctgtctttggattggggtaggctctttaaatcctagttcagccaaattgcgtaatatgtatccttcacagccatacctgtagatggattaagcattaagataaaaacccagaggagaggaagatctaaacacataattagagtatgtcaatagactcaacgtccatgaaacaacaaatacatacctaaactacaaaaccactaatactatgagcataatatcaaactactgtaaagaaacaatccagttccacgcacctggatgacaactctgcgaaacttttaagcggcggtggaatattgttaccggaaacatgaatgctgtactgtttcctcgacaaagcatctcgctgccattataaaagagcaaacaaagtcatgaatctgtcacactttgcctttgatgaaacagagacaacattaaaaacaactccaatacctccatttgacgattaagttccttcttgggattctctacaatctcattctttgtgatttgttcttctgctttacctttagcacgtgccttctttgagctcttgaacacatcgaatccttcaactggcactatttcaacatatcaaaaaattagatcaagacacagttagcacaaacctgagggaaacaataatttaacttttcagacttaccagaattagaagatcttcgtttcctcttcttagaggacacaataactttctccgcctccggctgttcagtgtcctcttcttcttccacaaagaagttcactttcttattggaatcatcatcctccgtagaattctaacacatcaatgagacatttttaatataagaacaaagagtgggagtgagtagtgctgatttaaataacacatcagctgcagaactcaccttgaatttagcaaaatcaggagcaaacttcttcttattgaagtttgttccaccaaacagaaaatatgagcttttctccatctgtcaagtaaccataaaactctcaatacaaggcaatggaatcatatcaacatagactgaaaacatcagaaaataaatttaagctgagtactattcgattagagcagaaaaaaaaagggagaacgccaaagagaagaaacagagcagtagagaaaattaccaagagaagatattacaactaagtcgtacctaaatagagaaagagagcgtttccggaggagaggaaaaggcagcaataatggtaacaatagagacgaaattaaaaacgccggcgatgacactgacgacggcgaatagataccgagaagaatcgaagaaccagagagactcttgcagattttgggttttacaattagggtttggtgttttggttgatttcatataattttaagggtattacagtcatttacttgaacaccaatattaaaattggagttgctaaaagcctataagagcaatacattaaagatgttaaataaatgggcctattaaagcccaaataaaacaaaaagcctaaattagatctgataggtttggtaagaaaccaataaatttggaaatttgtgtgtaaaagcgggaaacatgtgatggtgtgacccaccgccgctgaaaaacaaaaaaatctcacttcttcttcttctctctctctgtctctgacacatcgggactttctccgactctgtttccgtcggatttaaacacttcagacttaactccacttttggtttatcgtttacgaattgttagag

SEQ ID NO: 11037 - DNA, 3000 bp, Unknown; identical to SEQ ID NO: 11009
  misc_feature (1)..( 3000): cDNA_ID_1381941_gDNA_ID_2214471_Annot_ID_133100 3000 nt of promoter + ATG

SEQ ID NO: 11038 - DNA, 3000 bp, Unknown
  misc_feature (1)..( 3000): cDNA_ID_2990667_gDNA_ID_2214471_Annot_ID_133102 3000 nt of promoter + ATG
agagatctatccattagcggttaaggcagaagcagctccctcaggtggtgagaatgaagaagaagaaaggtcggggtcgaagaatgcgcagattactcaagcggtttatgagaaggataaaggagagattaagattagagtggtgaagcagatactatgggttaatggaacgagatatgagttgcaggagatttatgggattgggaatacagttgagggggatgatgattcagctgatgatgctaatgatcctggtaaagaatgtgttatatgtttgtctgaaccacgagacaccactgttcttccatgtcgacatatggtaagtgaaagctgatgatttactactattatgtgatgatggacatatatatagatgttaaaaattgtttgggtttggtggtgcagtgtatgtgtagcggatgtgctaaggtattgaggtttcagacaaatcgatgccccatttgcaggcaacctgttgaaaggcttttggagataaaagttcacggtaacaacggaagcgggaataacaccggacagggagaaacagttgaacaagagtagctaaacacggccgagtatggattgaaatgccatcgaaatattagtagtatatgcatgtttgatccttgtatgttaacaacaaaatgtgtgattgtcaattcataatatagagattacgaaatcatttggagtcataatgacacaatacttgaaacattcttcattagatacaacaacaaagtaggcagtttcttacttagctagttgctcaaccggaagttgcagtggcaggtgaagccattttagttgcaataagacagaaacttaaacatggaaaacacgagatatagtagcggcaacatgacattcaattatatagctgaccccttcgtttcttatttaaaaggggcaatctccaacgttttgtggtcaaatgggcctgcatttctttttatccgcctctactattgggccctaagcccgagttttccggtttcgtaaacaataggttcatcatacttgtgtaatttcaatgttttggaaaattcggttcacagcttcgttaaaacatcaatcatctcatatctgtgactcgtagtttggttaaaaaatgatcccaaaaaagagagagacagatccaaaaaatcatctcatatctgtgtctctctctttgtttaaatttaaaatgcttgccgtagacaaaacatacaaatacgaggctgtaataaacaagtatttaatataataataaggacaaataaacggaccaaatttaggccgagaaaatgggacattgtgatataatctcaaaaagaattgaaatttgtatgatcgatcagatatctcaatttcaggaacccagaaagagggacttgtcttttacctccaaagggttcctgccgtttcttttctacaatttttctcctgctaattatcaaatttttcttctgattttcattgtttgttagagattcttcttctcctctgcttttctattctctgggagctcgatgatggatgataaagctcgcaaagaagaagaacatcatgtgtctcaccaacataatcattctcctctgcaaagggtctctcgttaattccattccaatcttgtttcaatctatcttccattgatattgatattgtttataaatttctttctttttttattttgctcatggttttgattttgttggttatcctcagaatttcatcaatcttccatgattttagggtttaggggtttagtagattgtttaagtcgagtctcttgataaaagattaggcttttaagttatttgtcaaagatcatgccttttgtttttttggaatctgagaaattggatttgaaattaatctttctttggtgtttgcaggatggaaattctgctgagattgcacaaggacaagagctatcatcaccgggccgagacctatggaggcgaggtcttgtgttagatttaccatcaacaacacctgaagatactacaagagatgatctttttagacgaaatgcatctttaacttcaagtcctgttgccaaaagagtcaacttttctccaatgtccagccctagagtcggacaacgtggtgcatccttgagtccttcttcttctacttcttcttcttcaagaaacaaacctaatagcctgaagaatctaatccccaagttaagctttaagaaccggaacagcaataacgataatgtggatatcgagaaagccgcggatttgggctttgtgtcctccccttcttcaggaaatggcagggacaggtctacatggactctcactaatattttaactccaagattgaagaaaactgagtctcttcctgtaacccctatagctcactcaaatcctgagtccactcacgggagatttgccgttgatctagttacttccacggtgagtaacttgacggatcgtttcatttaggttctcatgtgaattctattgtggtttgtgctgttatctcattggcaagggacattttattgtctcgtacttcaccttggtctcagtagagtaatcttaagtgatgcattgtgcttgtaaaataagtttagctaactaggttatcttctgcttcacttcattgttggtttgaccaattatttttataaaaatgttttcccaacagaaaaaagggcctccactgcctatccaccgttcacgctctgtcccagcattcaacaaagatggaagtcaaaggcaattaggtgttttccgggtgattccaactccaaacatgtctccaaccagaaatactattaaacttaacggttagaaattgtattttttcatttgatttttaaagccaaaaagacatgaaagtttgatatttttgtgattatatccttgtaacaaaccctgtgccttatattagtgaaatgtttcagacgcgaatgttgatggagctgaagatgttcctgaagaagaagctgtgtgtagaatctgccttgtagaattgggagaagattcagaagccttcaagatg

SEQ ID NO: 11039 - DNA, 3000 bp, Unknown; identical to SEQ ID NO: 11017
  misc_feature (1)..( 3000): cDNA_ID_2705158_gDNA_ID_2214471_Annot_ID_133103 3000 nt of promoter + ATG

SEQ ID NO: 11040 - DNA, 1314 bp, Unknown; identical to SEQ ID NO: 11016
  misc_feature (1)..( 1314): cDNA_ID_2716986_gDNA_ID_2214471_Annot_ID_133106 3000 nt of promoter + ATG

SEQ ID NO: 11041 - DNA, 3 bp, Unknown
  misc_feature (1)..( 3): cDNA_ID_3019256_gDNA_ID_2214475_Annot_ID_133108 3000 nt of promoter + ATG
gaa

SEQ ID NO: 11042 - DNA, 3000 bp, Unknown; identical to SEQ ID NO: 10099
  misc_feature (1)..( 3000): cDNA_ID_3038936_gDNA_ID_2214475_Annot_ID_183093 3000 nt of promoter + ATG

SEQ ID NO: 11043 - DNA, 3000 bp, Unknown
  misc_feature (1)..( 3000): cDNA_ID_2994697_gDNA_ID_2214475_Annot_ID_183092 3000 nt of promoter + ATG
catagatatcagtatatcaaaaaactgaaaactcttccgtcttttgagaataaaagagtccaacttttgcattcgacatttgactataacagtatcttttcgagaagacgcaaagtcgttacgtgcgtttatatttcgtttattcatgtcccaatactacctcttaggaaataagagactattaagactttcttgcttcccaatacacccccactaatatcaaataacctagtttaatttcttccgtttctcaacacttttaagaaaatacttaacaattgacataaaagaaaaaacgtacagaggaatttgaatggacaaacaaaggtgaaacaactagaatggacaaacaaaggtgaaacaactagaatttaacaatagacaaaaaaaaaagaaaaggatttggttaagcaatattaaggtatgaactaacctaaaccataaaatagtaaaaaaggaggattaaggttactttgtttaggagcagcacgttgataaccaaaaagccataattatcgcttccttcagcgcaggatccttctctctcctatctctctgtatatatatgtggaccttcacgtaatagcttcgtacttcaaacctcaaaagcaatttagctctctgtcttcaagatgacttctcttttcttctttgttctccttttctcgtctcttctcataagcaatggcgatgccaacccaaattacaaagaagctctctccaagtcattgctcttcttccaaggtcagcgatctggtcctcttcctagaggccaacaaatttcctggagggctagctctggcctttccgatggctctgctgctcatgtacacaccttaaaccatatttaactttgatacagaatatatctttgttagtaacattgatatatgaattgcaggtggacttaaccggcgggtactatgacgcaggagacaacgtcaagttcaatttaccaatggcgtttaccaccacaatgctctcatggagcgcactggaatacggtaaacggatgggtcctgagctggaaaatgcacgtgtgaacatccgttgggccacagattatctgctgaaatgtgccagagccacgccggggaagctttatgtcggtgtaggagatcctaatgttgatcacaaatgctgggaacggcctgaagacatggacacaccacgtacagtttactctgtatccgcttccaatcctggttctgatgtcgcagctgaaacagcagcagctctagctgcagcttctatggttttcagaaaagttgattccaagtattcacgtttgctgctcgcaacagctaaggatgtgatgcagtttgccattcagtaccagggagcttacagtgattccctttcctcatctgtctgtcctttctactgctcctactctggttacaaggtctgctttcacatgaaactaaaccactcttaccactacatcagatcctcatttttaaaaatgtgaatttatgaacacaggacgagctaatgtggggtgcgtcatggctgctaagagcaacgaataacccgtattacgcaaacttcataaaatctttaggaggtggagatcagcctgacatcttcagctgggacaataaatatgctggtgcctatgttcttctctcacgggtttgtctctctgctaataaaaactcattgagaacatagcttttagcatcacactatctaacttttacattttggcagagagcattacttaacaaagacagcaactttgaacaatataagcaagcagctgagaatttcatctgcaaaatccttccagattctccttcttcctctacccaatacactcaaggtaacctacttcacgatatagaacacaaattgctaaacaacaacctcttctaatcatatgtttaccaattacaggaggattaatgtacaagctacctcaaagcaatcttcagtacgtaacctccataacattcttgctcacaacttacgccaaatacatgaaagccacaaaacacacattcaattgcggaagctccgttatcgtccccaacgccttgataagcctatcgaagcgacaagttgattacatactcggagataacccaatcaaaatgtcatacatggttggattctcttccaatttccctaagagaatccaccacagagcatcttctcttccttcacacgcacttcgttctcaatcgttaggctgcaatggtggattccaatcgttctacactcaaaaccctaaccctaacattctcaccggagcaatcgtaggaggtccgaatcaaaacgatgggtatccagatcagagagacgattatagtcacgcggaaccggcgacttatataaacgccgccttcgtcggacctttggcgtacttcgccgccggccgttcgacttgaaattgaattcgccaccgccacattctccgatttgtagttccattgttagttaaagatccgttggtccaagcctaacgtgaaaatcagaagggacaaagttatttaaatgtaaaactcttaatgggctaagacccaatactaaaggacccgacggaaatatttctcgtggtcttatttaactctaaccatcatcattacgcgtttcaaatattcaaccaaggccgttaattaagcaccacggaaatatttcatgtttggttatagcaccatgaaagaacactagaatatttacttgtcaattatgtcatgaaagaacactagaatatttacttgtcaattatgtcatcagtacaaagattaaacagctgaaagatatgcattaagtaggaaatgtaaagacaaaatatcgttttctgctaaaaggaattacacatatgccaaacaatgggccgagagagaattgaaactaatgggccgagagatattttttctcttagtgggcttttaggagaaactgtagcaaaaacaacagatttcgaacaaaattttgatgtagatcatagctaaaaaataatctggagtgagcgacaagcaagcggcggccgtc

SEQ ID NO: 11044 - DNA, 3000 bp, Unknown; identical to SEQ ID NO: 10101
  misc_feature (1)..( 3000): cDNA_ID_2717032_gDNA_ID_2214475_Annot_ID_183087 3000 nt of promoter + ATG

SEQ ID NO: 11045 - DNA, 3000 bp, Unknown
  misc_feature (1)..( 3000): cDNA_ID_2717080_gDNA_ID_2214475_Annot_ID_183070 3000 nt of promoter + ATG
tgaccattaaaagagctaaaaaaaaaagtaaatgaactttaaacttgaggctgattttttttccgttgagttttgggaaataagaattaatagttgaaagtttggaattactttggattaaaatatgaaagtttagttggtttcttattgtaagatccatatattcgaagaaataattggttagaatgtctaacaatactagttagatttttctagcatatatcaattaattcatatattaatgttatctaaagaaacccactttctcagatcgcaatgcacataagctcatagttaaattaaaagcatgcattaggataaataatatacaaagaaataaataaattttagggagtggagaatcaaaagaaactttatgcccctaaaagacatgaaaatcaaacaagtgtcaatcatagatacgatcttgatcgagccaatgagcgcaaagatgcgaggaaaaagaagcaacagatcgatcacacactttttgcgttttgcatgtttgatgcattttgatttgacaaagattctttatttacttccttcttccttacttaagctgaccctctttcttaaagtttaaactgtttttagaacgatcaatcatttcaattttggaagcatcgaaatcaaaatgtccaaaatacatattttgacagcgaaatattttgactagatttcaatagtttagaactttggttccacaccagtttatgttgtaatggcaaatgtaaattatttatagaggaatcccattctaatactattttgaatactaaccttggccttttcaacaaaaaaaataaatcgaaatgtgtacaatcaccacgaaattatcatattttttagttatggattctgtaaagatggattaaattagttaaagggaatatactcttacattagctatattaaaaaaaaaaaaaattagctgctaaggggatttagtccatggaaaatgttatttaattctagtttgattaaaccttactttcttcatggtgaaatttaaatttgatgatataatccacgctaaaaaataccatcgtaaaaaacgttgctaaaagctgtgtctttttttttttttttggtaaaagaagctgtgagtcttttgttatatgatgagttaaaccgctcacagaataccagttagtgaccttaaccaaaaaagttccatcgttacagagtatcaatctatgtttcaatgtattatgtatttctttgaaatattgatgtcgaatataaggtggattttctactcagaaataagagaaaaatcccatattccaagaaaaaagtgagttgaaaaaccccgtaatgttgaagaagaataagattcaggagtttgttatgtagaccaaaggcaaagcaagatggtcaaaaaaatatttagaaaggagaaaaacgacctacttaatcaattaacaagcaaaaaggtgaaattcaataaattaatacacctaacaaaaaaaaaaggctacattggcacctaacatgggcaggtcattggttctccaccacgatgagatgcacatgatacccgctttaatatgggctaagtatgcttaatgaccatcacttaattgttctttttagttgttaaaatgggttaagaattccacgtcgttaaatgtgagaaatgtataattcaatacagaataaaaagctcggacgaaaaaaaaaaaaaaaatacagaataaaaagctcaccatggatttttaacatgacataataatgatgagcagttctatatataccacaatgaaaattctttgtaaacttctttctattagtctgctttatattttctagtaatcgaatttcatatttagacactaaatagagatcatgtgagtttcaactctagatcaaatatggttcgttttaataataacaaaaatatatacatataatatattttgttattattcggacggtaattcgatagtgtaaatacattaaacttttgcttaatcaatagagcaaaaacctcccacttttttttttttttttgataacttcttgtttattattagttgattttaagatgaaattttatgtatttttaatgatttacatcaagtcatcaacccaaaataaatatattcgatctttggatccagttaaagtaaataagatatgagaggtacgtgcagagatatattcagaactatacattagtaaatataagaggcaaaataaatgatgctatgaataaagatgctatgaatgtttaactaggaacagaactagtttttgtttcattgttgaactcttatttactctaaatccttcacataataacgctttgtttataaaaaataaaacaaagaattctttttttaagaaagtgaatcgcatgccatttgggaactcaatctttttttatatatatagtcttgcacatatcaaatccagcctccatctcttggtgtagaatgtaaattgtaccaaattagattgttaaatatatttggatattgtaacaatagtgcatgtcaggtcatatgtcacatcagatgtaacatcaatcaatcaaaaagaaacctaggaaattatactacaagctagaggaggaagggatagtacaatacaaaccccttataataacaaagaaagacggagctttcgcatgtaaagctatatactattgtatgaatgcatacttaacatataacgtatatgagcgcatacatatataagggaaaatgaggctgatgtggaaaaggtgctttaagaagcagtgaagttagtgggagaatatgataatggagattatatataaagacaagaaggtggcatgagattggtaataacttcacagttgtctccgaagaaacagagaaaccaaagagttaagtggggaacctcgaagctagttcaaactagtgggaggttgtttcacgtttcaactttcaagtcataaaaccaaatccaactctaaacgtaaacccaaacgtcaaatcatcagatagaaggaaatattctgattgagag

SEQ ID NO: 11046 - DNA, 3000 bp, Unknown; identical to SEQ ID NO: 11045
  misc_feature (1)..( 3000): cDNA_ID_2717080_gDNA_ID_2214475_Annot_ID_133112 3000 nt of promoter + ATG

SEQ ID NO: 11047 - DNA, 3000 bp, Unknown
  misc_feature (1)..( 3000): cDNA_ID_3035228_gDNA_ID_2214475_Annot_ID_133120 3000 nt of promoter + ATG
tcctgctgcatccaaacaatcgacctcaaagcttgatcaaatctaccgttggctgcgtatccagacatcaatgcagtccaagatatggcattcctctgtttggatccatagaacacacgtctcccagaagccatatccccacacttgcagtataaatcaatcaaaccagagtgaacaaacggctgttccacgtaattcttcgatttcaatacatgggcatggacctccttccccagtttcagtgccttaacatccccaagtacgggaagaatcgttgtaagtataactgagtttggatatatcttttcttcactaatcatcgtcctaaacagtcccaacgcttcccactgccttttattgtgagccaatccagcaatcatcgccccccaaacaactatatctctctctacaatctcatcaaaaactcgacgtgcaagccctactttaccacacttaaaatacatatcaacaagagaagtcttaagaaagacactattaaacaaaccattcttaatcgcaagtgcatgcgtcttcaatccctgtctcaaagcagatgcaccagcaaaactcttaaacacattagataaactataaacattcaaatcaacaccaagctctctcatttctgtaaacgtagaaagaacatcttgataccgcttcttccctgatataacagtccctctaagcaacgcattccaagagtaaacatttgagctagtactttcatcgaacaccttctgtgcatctttaaccgaaccacaagcagtatacatatgaacaagcttggtccttagaaactcattactctccaacccattaatacgtatatgaacatggacttgtttaccgtgaagcaacgacttccggcgaacacacgcctctaaaagagcagagaaagttgtcgcatttacaggaatccctctctgttcgagataatcaagaatcgtgagagcgacttcgagattgttctgcctcgcaaaaatttgaatatctctgtggataatgtaggggttcttggagtggagaggaagagaagaagggaaagcatctctttccctaaaaggtttcggctttttggcgggagaagtggaaggtcgtctagttctgcttggtctaatcggagatttcgccggagcgccatctttatcggaacgatgaggacggtggttgagactcgtcgtcacggagagggacgccgggaggtctcggattccgagagacgacactacttccattgtgaccactaaccacttgattaagctaaaggtcgttagtatttatatgtagctttaaactatttttataaagtatgcaattgaaattgaaagctaatatttgggccagaaaattgaaatatgggcttagggcccccaaaacaattgtagcccatcagttcacacacggtttcgtttttaaaaaaagcatgtatttagaatttattggcttttattttggtggttgcttcaatcttcctcgtttaaaaacaattcatgtcaacttggacaagttacaaaaaaaacgtttcatatttttgtcactaaaaatattcagttaaataaagtaattgactcttcgttttcccgacgatactgtataaataaacatcatgtttctacttgttcacatatcgactctttgtttgtccgattctatctctctctttagaaactttatctagtctcttcgaacttaatcttaacgacgatggtgccggttacgatcaactctccacctaaacctgaatcatccgaagaagaactcagcgactcccaagtttccaactcatcggaagacgacgactcaatggaagacgaaccatcagactctgaaaacaacaatggaggtacatgcatgcatcactctctattttatttcagatttttcacttcaccatttcacatgtttccactgtaaagaagttggagcgtttgttaagaaatactttgcatgttcatgttctgtttgactgtgaggtttcaagattattacgttgatataaaaatcttaaaagtgattaagatagtttttgtatcgtatctttaatactttcttaaaaaaaaatcttatgtcaatagttgttacagaaactgaggctaatggtattaaagatgagttttgggctcggtatccatctttgaagatgtttttaagtaaggagatggtcaaagaatttatttctgaagagtatattttggagaaaggtaagcttattggagataataaggccaaagaattgaatgaaaaatgtgaggttttgtttatcaaggagatagagcatctcatcaacaaatatcgcttcatggctgatgttttggagttgttgtttttgtgagaacttttcgatagtgacgtgcatggcttgagtttgattttctcgtttttatttatgttataattattgtgttccatctatgaatgtaaaagatttatgaaggattcgatttttttctctttttttaaagattattataaacgtctttcataaccatctctttattcattatatgttcaggagtgaaaaaacaaaatctaaaaaatagggttaaatgtttgcttagcttctctctttatgtagatttgagaaccgatgaacaagaatttactgaaaatatatcattgatctaaaaattatgaaaaacaattcaactttttatccaccaacacatatttttctttacttttctgttctgctacgcattacctagtcttatatttcgaaaaattataaaatctcatttcacaactaaattaaaagtatcatttcacaaacaaataagatgaaatgatgatagaaaaatcatcaattaataggaaagaggattggagtatacttctattgattgttacagtatccacatggcatcgataatcatagggactactaataagaatttctgtccacaaattccaattgaaattcaaaattcaactctttgctctcttaatcacaaacacaaatgagccacaaaaacgaagacatcatatcaagaaacgacgatg

SEQ ID NO: 11048 - DNA, 3000 bp, Unknown; identical to SEQ ID NO: 10101
  misc_feature (1)..( 3000): cDNA_ID_2717032_gDNA_ID_2214475_Annot_ID_133127 3000 nt of promoter + ATG

SEQ ID NO: 11049 - DNA, 3000 bp, Unknown; identical to SEQ ID NO: 11043
  misc_feature (1)..( 3000): cDNA_ID_2994697_gDNA_ID_2214475_Annot_ID_133131 3000 nt of promoter + ATG

SEQ ID NO: 11050 - DNA, 3000 bp, Unknown
  misc_feature (1)..( 3000): cDNA_ID_2717012_gDNA_ID_2214475_Annot_ID_133133 3000 nt of promoter + ATG
taagtttttgtttggtgatctgatcttattggttggatgtgaaatgcaaagatcacggagagctcttctggttagaagaagagtttctgagactacttctaatggaaggaatcgcttctacaaagtttcattgtctttggtttttctcatatgggggcttgtcttcttatctacattgtggatcagtcatgttgatggtgacaaaggtaactttttgagttccttatttggacagaatgcaaaacagttattagaatatggttagagaactgaacttaagtaatatacgctcttagagatatgacaatcatgaagatgtatagaccatatcttaagtgtatctaaggcttactcttgggcatttgcaggtagatctttagtggattcagttgaaaaaggtgaaccggatgatgaaagggcagatgagacagctgagtctgttgatgcaacatcactagagtctacctctgttcattctaatcctggattgagttcggatgttgatatagctgcagccggagaaagtaaaggctcagaaaccatcttgaagcaattagaagtcgataacacaatcgttatcgtaggaaatgttacagaaagcaaagacaacgtgcctatgaagcaaagtgagataaataataacacagttccagggaatgatacagagaccactggttcaaagcttgatcagctatctcgtgctgttccgcttggccttgatgagttcaagagcagagcgtccaattctagagacaaatctttgtcaggccaagtaactggcgttattcataggatggagcctggtgggaaagagtacaattatgcagctgcttcaaaaggtgcaaaggtcttatcttctaacaaggaagcaaaaggagcttcaagcatcatatgccgggacaaagacaagtatctccgaaacccgtgttctactgaagggaagttcgttgtcatagaactttcagaagaaacgttggtgaacacaatcaagattgcaaatttcgagcattactcttccaatctgaaggattttgagattttggggaccttggtttacccaactgatacgtgggttcatctagggaatttcacggctttaaacatgaagcacgagcagaactttacatttgcagatcccaaatgggtgagatatctaaagctaaacttgctaagccattacggttcagaattctactgcaccttgagtttactagaagtctatggagtggacgctgtggagcgaatgctggaggatttgatatctatccaagacaagaacatattgaaactccaagaaggagacactgagcagaaagagaagaagacaatgcaagcaaaagagtccttcgaaagcgatgaagacaagagtaaacagaaggagaaggaacaagaagcctcaccagagaatgcggttgtgaaagatgaagtatcacttgagaaaagaaagctgccagatccggtggaagagataaaacatcaaccaggaagcagaatgccgggggacactgtcttgaagatactgatgcagaagataaggtcgctggacgtgagcttatcagttcttgagagttacttggaggaacggagcttgaaatacgggatgatattcaaggagatggacctggaggcgagcaagagagagaaggaggtggagactatgagactagaggtagaaggaatgaaggagagggaagagaatacgaagaaagaggcgatggagatgagaaagtggcggatgagagtggagacagagcttgagaaggctgagaatgagaaagagaaagtgaaggagaggttagagcaagtgttggaaagactggagtggatggagaagaaaggtgtggttgtgttcacaatctgtgtcgggtttgggactatagcagttgtagccgtggtttttggtatggggatagttcgagcagagaagcaaggtggcttggcttggcttctgttattgataagctccacattcgttatgttcattttgtcactttgatgagagaagagttctcagttttggtctttctttttgttttctagtttttttcttactgtagagttagctgagtcttctttatacccaataaaactatagaagttacctagataagttatgatgtgcctatgaggtttcaaatacaagagttttgtccggttcaatggaaaaaactcttatcaaatcaaagcttatacgtagaaagagttttcattgcagaaagttgatttacaaacaaaactattattcacagaaaacattttcttatgaccaaaataattataaacattttctttcaataattaaccctagcttcgtcattgccacagagcaaagatagttttaaaattcgaatccaatcaacctcttataccaatctctcacatgtcatctcctactcttcatagttcatccaaagtggggttatttgtcaacgtaacttcagcataaaactgagctttatactagagagaaataaagttagctataatcatttataaactgaagattgatggaggtttattaatggttaataaacctttccaaaaataggcgtatgccgctaagaacagagaagacacggtattctttagtaaaaggcgaaagaacagttcgctttgtcttcactgcacagctccgtgactcttgaaggcaagctctcgatctttatttatactaaagtttactcactgttctcaagaaatgagccgatgtgggatagtacaatcaatcaaattaattcatgggttattaatagcagtatatgggccatatcttgtttatttttaagcccatcccaaagcctggaggtttcatcatcttacaattctagactggttttggtgaaccggtttgatgaaattagaaattacaatgcaagagacacgtggcaggcttagaaaaataaccgaaagcaaaaacaaaaaggtttaagagagagacgacactagtctggttttggttcgagtcccgcagtggtaaagggacgactacaagcgaacata

SEQ ID NO: 11051 - DNA, 3000 bp, Unknown
  misc_feature (1)..( 3000): cDNA_ID_2716865_gDNA_ID_2214477_Annot_ID_133135 3000 nt of promoter + ATG
cgggatcgttggtcataacagctttgatctacaaccttttacgaagaaatcctacaatcaaccatcttgtgcaggtacggcctatctttgttagtgcaaagaacatattaacagatgaaaatgacgtctgtataataccactcacaactacgcaaaataatgtatataaaagcatggacttacaaagaggtcactcttgttcaggaaatcgttgaaaatgccgatgaagccaacacagaggctggtgaacacaatgagagccaaccaaagaccatcaaaaagcgaaagcttggtattgactatttcaacaaccaggagagtgatcccaagaaatctggagccttaagtaagtcgttaacattctattcccagtcttttttatttttcctttccatgcccctagcacaaaatcacacccctatgtagaagcttgattcatccaacaaaaaacaatgatgtgtatgctttcagatttcctgatttgtactttcataacagcggctttgtagcataattagatttattagtttgataagaaattaagaatgccaaggttctctagattcatcgataaattcaaaaagtaaagttttaactgctttgaaagttcaagaacaatgtgttgttttgccttctgtaagttgttagcttgttaaataactttgtaatctaactgatgaatgatgatattcgttttactggaaacctacagaaagttctctttgggagatcgacactttgcgccatcattactgtccaccagtttcacggtatatttgctcaccaaacaattttatccgatttttttaaaatttttacatttggtcatctccttgatacctcttctcacttttgtaggtttatctcatctctagaaactaatctaaccatcagatcgaaaaccacggaaatgaaaattgaagatttttgctctggttcatatgccaccatatttggggacgaggtaatgttgctctggttcatatgatatcaactctttgttgagaaaaaatcagttgactttggtcttccatttatagttgggaaactgtaaccatttgctgaactaactgtggagatttgaaaaattggcagattcggagaagggtaaagcaagttcctttagcgttctacaaaacggttccaacatctctgtttgcggattcagattttcctgggtggacgttcactattccacaagaggaaggcacatgctgatttctaagagtaaccaactcatgaactaaaaaaactgcaggctattcgaagatttgtgctaccaaattttgtagttttgatactgaatgtgtcacatacttgattttgagggaaaacaatttttgatagaaattttcggcccatgaaaacgagtttccgtccaattcgtatatcggagtaagagatgggaattgtgagaaccatgaaaacacctggaaagaaaaagtctaaagaaaaggtagtacgcacattctagttttgaaaatagttaaattgtttgacatcatacttaggaaaatagtttacatctttaaagtattaaaatagtataagatatattattttaaattctaatcttaacattcttaaatgatgatttttgttttcattcataggcaaaatatgagttttcgttcactaattggagtgcattgataaatgataataaattggagttttcgttcacaactttatatatatggtccaaatttcagtggagactccacacaaattccaaattattcctttgccattcaactttgtttgtgcatcattccaaatactactctcaattccctttcgttaatcattgcattcttttattcgtgcgttactaacaccactacactatctacgaacaacaccaattgtgcataatgtagttggagtttttctaaaaaaattatatatatagcaaattgaatatcatcaaaagtcactcaaggaaatcatctttaatcgatagatatgttcaagggttagttaaatatatgtacatatgagatgatataattaagaatgtatatatggaaagttgatatttaggtgtaataaaacgtgcaaatcgaatatgcctattttaatcctgttgttctgacatacatttagtgtataattattttgttagcatgctaaactagcatataacgcattatcgaaataatatcgttagcgaaatatggatggggtttgctctatggatgaaatgatgtagggtacaaaccaacttaatatgttaataatatatttgacgatataaacaaattttctgttattgaaccaatgattagatttcaaagactgatatatatgcgaaaacgataacattattattaaaaggtaacaaaaatatttgcatgaagagcaaaaaagttgacttgcaactcaataatcatgtaaaaaagtacatgcattagaatagttagcagataacgtattatcaggataacatgataacaaaatctcggtaatacttattaggttaacatgataacaaaatatttatataaataagtttataattatatcatgctaagtcattttgtatcgcgataagttgtaacttatgtgatatatttatatttaccgtcttaactcatttattatattatatataaaaaattaacgatttagtataacgtgcaaaatatgaatttcatccaataatattaatattatcactacatttaaataaaattttagttaactcggtaatttgattgttaaccaatttgggataaaaaataaaagataaaaaaatatagggataatgatgtaattttctttagtaatgtactatgtaaatagtgacacatttgtgtcagttaattttctctgttattctatgtatacttcttataaataccttatgttcaatcgttttgagtcaagaaaaaaaaaaacagaaataaaaaaaaacatttggtcaatcatctttactcatttgggtgaacagaacaaaaaaaagaaaagaaatcagtgttttgacaattcttcttcata

SEQ ID NO: 11052 - DNA, 3000 bp, Unknown
  misc_feature (1)..( 3000): cDNA_ID_2716861_gDNA_ID_2214477_Annot_ID_133136 3000 nt of promoter + ATG
tataaaaggagtagatacactcatcagtagcactggtcgtattggtttccaggttggttcttttgctgaaaactacatgaccgatgagcttaacattgccagctccagacttgtgcctctcgcctcccctgaagaatatgctaatgcgcttcaaaatggcactgttgcagcgattgttgatgaacgtccttatattgatctcttcctctcagattactgtaagtttgccatcagaggccaagaattcaccagatgcggttggggatttgtgagtcatccatcttctgaatatcttctctctttaccagcatgtttgaacataattctgatcacatttttgcattttctgttcaaaaaggcattcccaagagactctcctttagcagttgacatgtcaaccgcgattcttggtctatccgaaactggagagcttcagaagatccatgaccgatggctttcgaaatccaactgcagcagcccgcatgggtctcagtcaggtgactcagaacagctcaacgtgcatagcttctggggtatgttccttgtggttgggatagcctgtctcgtcgctctctttatccacttcttcaaaataatccgcgacttctgcaaagacacacctgaagtagtagtagaagaagctataccttcaccaaaatcttcacgtttaacaaagctacagacttttttagcatttgttgatgaaaaggaagaagaaaccaagcgaaggttaaagcgcaaaagaaacaacgatcattctatgaatgccaatagcattatctcgaggactgcatctagaagacccatatgattatccttatgattttgttcatctgtacatttcaacacacacctcatttgcaacaaaaatgagattttgtttatataccaccatttacaatcatctaagctaaagccaaaccaaagtggacaagcttaccggttcggttcagttcggtttgttgttaaaccgttggattttcactggtctgaatctgatctcatcactcactgcatctttaaagtaatcagctttactggagaaaacattaggttaggtggtcacgtttgttcatctctctcttatatatttgtttaaaggcttcgtctttgttcatttgcttttgttgatctcattacttgttcatcaatggcaagtctttgtttccaatctccttccaaacccatttcctatttccaacccaaatccaatccatcgccaccgttattcgccaaagtctccgtctttcgatgcagagcttccgtacaaaccctcgtcgccgttgagccggagccagttttcgtctccgtcaagacttttgcgccagccaccgtcgctaatttgggaccagggtttgatttcttaggatgtgccgtcgatggtctcggagaccatgtgactctccgtgtagatccctctgtacgagccggtgaggtctcaatctcggagatcaccggaaccacaacaaaactcagcacgaaccctctccggaactgcgccggaatcgctgctattgctacgatgaagatgttagggatcagatcggttggtttatcattagatttgcataaaggtcttcctttaggtagcggtttaggttctagtgcagctagtgccgccgcagctgctgtggcggttaatgagatctttggccggaaattagggagtgatcaattggtattagccggtttagaatcggaagcgaaagtctccggttatcacgctgataatatcgcaccagcgatcatgggtggattcgttttgattagaaactacgaaccacttgatttgaaaccattgaggttcccatctgataaagatctcttctttgttctagtaagccctgactttgaagctccaactaagaaaatgagagctgcattgcctacagagattccaatggttcatcatgtttggaacagtagccaagcagctgctttagtcgctgctgtgttagaaggtgacgcagtgatgcttgggaaggcattgtcgtcggataagattgtggagccgactagagcgccgttgattccgggaatggaagctgtgaagaaggcggctttagaagctggagcatttggatgtactattagcggagctggaccaacagcggttgcggtgattgattcggaggagaagggtcaagtcattggagagaagatggtggaagcgttttggaaagttggtcatttgaaatctgttgcttctgtgaagaagcttgataatgttggtgctaggcttgtcaacagcgtctccagatgatctttgtgtgctgtttgattatgttaagattggaactgtttgattatgttaagattggaaccaatcttgctctgtactgtaatttctagatgataataaagttctttgttttctacaccaataaaggacaacgttttatgtgtttgtttagctctttttggcttctgggagtatgaattgtgtgagacttgagagtatcacactctccaaatcagtagcaaaattgagtttcaaccttatgtagcaaacaactttagtcactgactagtggagcaaactttatagttgagagcccaaactataaggcccatgaaagcccaatttggagaagaggaggactcataaataattccggtaacggtaaagcaacgaatctatccgccggcatgaggaaacctaaattgaaattaccattttttctcttaaagattcgatttttccgccaacccgttcccgaaagcttggaactttatttgttgaaaaagtaaaagagagagccttgtgtttatttctgagccttgtctttgtccgtgagacgtggacgagcgatctccatcagaaaatgagaacccttcccacgtacacactctttgcctttccttttatagctttcctgtgacgtgtttcttcgtttctgggttttgggtttactagcgaaaacgtcaaagatcaacttttgttctgagagattacgattagggtttatcggggattttgaaacgatttttggtaagaag

SEQ ID NO: 11053 - DNA, 3000 bp, Unknown
  misc_feature (1)..( 3000): cDNA_ID_1808399_gDNA_ID_2214477_Annot_ID_133137 3000 nt of promoter + ATG
tcagaaaatgagaacccttcccacgtacacactctttgcctttccttttatagctttcctgtgacgtgtttcttcgtttctgggttttgggtttactagcgaaaacgtcaaagatcaacttttgttctgagagattacgattagggtttatcggggattttgaaacgatttttggtaagaagatgacaagagtcaagagtaaactagacgaggaactgtcgtctccttggttttatactgtttgtaccatgggaggaatgcttagtgccggaacaacccatttggctataactcctcttgatgtcctcaaagtcaatatgcaggtttgtgtttcctttctctgcttcttgacttcttcaaatctctaatcttgtttgtttcttctagttattgtctttttagggatgtataatgatcgatataactgctaaatttaggatcttttgcttttctctgagcttaaatttggaaccatcatgattgttcagtcaatgaggatcgatcattctctcttgtaggtgaatccagtgaagtacaatagcattccttccggtttctctactctcttaagagagcatggtcattcttatctttggagaggttggtcagggaagctattaggctatggtgttcaaggtggatgcagatttggactctatgagtacttcaagacactctacagcgatgtgttacctaatcataacagaacttccatatattttctcagcagtgcttctgctcaaatattcgccgatatggctttatgtccttttgaagccataaaagttagagttcagacgcagcctatgtttgcaaaagggttgcttgatggatttccaagagtgtatagaagtgaaggtcttgctgggtaagcccttttttcagaatcattctacttggctggctcactttgcgttcgtttttgagtcttttatctcttcaaatgcagcttccacaggggactttttccgctctggtgtcgcaatcttccatgtaattttactgcttcgtgcaatgcctgttttcacttaatctatttgatcatcaacgtctctcgttatcagtttgatcttaatcttattacaactctcaaactgtcagttatgtaatcaaatcattcagttttagtcattagcatatgagacagatacttgagctatagatgcacattagcatgtctgtagacttggttgtgttttctaccaaaaccatatcttgttgattatatcttctatgtggtttcagtttctatggtgatgttctcaacgtttgagcagtcagttgagtttatatatcaaaagattatccagaaaaggaagcaagattgctctaaagctcaacaactcggtgtcacatgtcttgctggctatactgctggagccgtaggtacaatcatctctaaccccgcagatgtggttctttcgtctctctacaacaacaaagccaagaatgtgttgcaggtcgactcttaaccatcattatttatcttttaaaatccatttcgaaatttcacaatcatgaagcaaagtattcttattgatgttggttatttgcttgagctttaggctgtgaggaatattgggtttgttggtctattcaccagaagccttcctgttcggatcactattgttggacctgtcattactttgcaatggttcttttatgatgccatcaaagtcttaagcggattgtaagtagaaatctctcaaaatttccatatcagaaactcgaatctctctgctccaaatcctcatctaaccagcttgattgtacaattgtgaaaattatagccctacaagtggcggagtgaagaaaccagtggatgcagctaaattatcagtgtgaagcttagaagagtagatctatctctatcaacaataaaaccaggaactcaaaacatacggtcatataagattctcttgcaagtagatacgaggcgttgtgtagcgattagaaggagctttttgatattttcgtttcatgcgcaaatgcatttgtcttgaacccctgcctgaaattggattgtaagtaaagtgctaatgatggatattgctgtaaacagaaacaatgatctttaactgattgatgtcaaaggaatgagtctggttttatctttggtatgctctgaacaatttttgtatgagaagagaagactgagatttgctgtttttagattgttcaatagcttccaagtactttggttttaggcttttagctaattagtttgtgccgtcttcatattttccccttcttctttgcaattttgctattttatggaagctgattatgaccaagcatcaatgaaggaatctctccactataacttatcaggttcacataactttcttaaaagtaaaacagtgaagaaccattcaccttccatatctccagagcaggttcattgcatcttagttagggtttaaccttcaaacttgtctttacactatcctaggattctattgttttcttgtcttctttgtattgctgcatttgattgacttaccactactctcttgagattggccaatttttgctgattaacagttcatttttgctctaagtttcatcagttttttttcttggcatggatgttttgctgaattatcattcgcctaatgagttacacaaacaaaattgtagattttcagagaaaacaaaacaaaacatatgaataaaaaagttatgcatatgatacgcgttaagaaaaacaaatgattaacgtacgtcggctgtgaagtgttgtttgatacaattgggggaagtgacggcacaatgggctggtttcacggcccctttctaagtcatacacgtctcctttttttattttcgtttttttcaaaataataaaaataatatagagagtggcatatccgacggtttaggatctctgccttttctcaacttatagtatataccaaacactttctaaggtaacatgagatatttcacatccttttctctcttattcgtttctgagattcccttcttgttgttgtagcc

SEQ ID NO: 11054 - DNA, 3000 bp, Unknown; identical to SEQ ID NO: 11052
  misc_feature (1)..( 3000): cDNA_ID_2716861_gDNA_ID_2214477_Annot_ID_183159 3000 nt of promoter + ATG

SEQ ID NO: 11055 - DNA, 3000 bp, Unknown
  misc_feature (1)..( 3000): cDNA_ID_2705209_gDNA_ID_2214477_Annot_ID_133138 3000 nt of promoter + ATG
tacataagttgttaaggagtttgttagtatagatgagtgaagatcacattgttaaagattgtttttatggatgcagggtgatcatccttgtgacaggcgaagaagcgtcactgagtacaaggctctctttcccgctattgatttctcaattgtaagaaaaacatcttatatggttaatatatatctctgtggaaatgttggcaagttgcttatgctttgacctctatggttttagattgaaaccgacaatgatgttctgtggaagccgagtccaagagagagccttgaagaagttgcagccagaggtgtagagttcatcaaatggtgagtttcatttttgttacttatttccacatggagatatatgtaaacatatgtatagctgaatctctctactgccatttgctttgtgaaggatatggacaaggaaagagaaggagatcgcaattgtatctcacagtggcttcttgcacggtctcttgagttctttcgggaaggattgttgcgatgacctaaagaaagagttgtctatacagtaagagcttaaacaaaaacttgatgtctacaagcaccaacaatttgtataacttgaaactgtttaactaatcaacatctttaactttgttcagtttgagcaactgtgagcttcgctcaatggttatcgtggatcgagggtaagcaataattacaataagttttgacagaatataaatataatttgagagtgtgttggattatttattatggtgttgggtgtgtaggaacctggggactgactctgcagagaccacaaactatcctgggaaggttcctgaaggacttgataatcctagtggctaaatggctgaagagtaagagagagaattctgagatagtttttctttctaaaataaataaattacatgatgtttccattggactagaatctggcattttcagttatttgatgaacattagtgttggtatgtagccatgtaggttgactctgctgctacatgaatttattgtatgattgttattatccaaaatttagcggtagctttaatatttctgctccaattctcattttagctgtgattatacaattgtggaaataatagcattacaagtagaggaactggtagatgcaactaaattataagtgtgaatcttagatgagtagatttatctctatcaacatgagaaccagcagaaacttaaaacattatttatgtaagatcaacttcatattttatggcagctgtgttgaattttcttatggccaagcattttaataaaacaaagagaaaattccaaaaattacactcagcttttcttatagtactaggttttatcttttggtgttgagattttttatgaaaatagaaaatgttttaagtgtttttatagaagtagatcaaagtttaatgctcttcgtacgttctatgtatttggactttaatataatcgataatcgtattcagattctttatagaaattacgctctctccaaactattggagaaagcttttaccattaggaattcgaaattttttgttccccaattttgaacatatgataagatcttttaaagaacactcgacaatgtaaaatttaaagtaggtctagcttcttatccgtttaagagaacgatttttttttttaaatgatatgattcacggtttgtaaagttatctattggaaaataaaaaaactgtaagtacaatactgtgatgtcaaaaagaaaaaaaaagtacacccaaactaaatttgtaccacgtgcgagacaaattgtagtctgcgatcttactcactacccgacaatgacatgccccatgccttagttcttgtaagaaaaaagtgatatcctatatacttcactaattattggtaaaattatgcaaaactttcagtgctaaaagtttgatttatactgtactagttgttatttcaacgtagacataccaaaatgtttattcaagaaagcctatatactagcaaaagtaaaaaagaatgtgacatctttgatgaaccaatgtgaaaagtcaacataataaaacttgagttttcagaacaaatttagttgtccattgtttcgatctgttaatcaagaccataaattaactcttaactatatgcatctaataataatattttgtagttagctaagttaagcacatccaactcttaaaaaaagctagtataacgttaggcttataatcattctcttaataataagttatcctaaacaaattattgcaattttttattctccctacttgcactaagtatcattacaccagtaaaagatgatgatcccttaaattaatactaattaaacaagcaattaaggaatgaagaaggtgagacgaaaccgcgtaaaagacctttcttctttgcaccatcctctctccttcatcatttcacaaatccacaaaagaatcaatctttttaacactctctaatgattcaacgaatccaattacccaaccagaaacagcaacacatatagagatatatactattaaacaataacataacaaagaaaccattttttctcttttgttattgacttaaacaaaaactatcaacgaataattatccttttttgagtttttcccatttcttcttcgtctccatttcatcgtcttctcgctgttctgctatattccggtactagatcctctgttttctcatgtttcttttattaccaaatgatttcttcatttattgttgtgtctttgattcttttttgggatctataatgatcgatgaacatttaaagctacgacttttcaggagctcttgtctttttttctttaatctttgattatgttacaaaacaattatgttttttgaagcttgatctgatgtgggttctttgatttcgttccaaagtttgatacttttttggcttctctttatctgattttttttgtgtatgtttgttcatgaaacagtttcgttggatgaggagaagaagaaagtgaaaaaagttgtgaaatagagagagtttgtttc

SEQ ID NO: 11056 - DNA, 3000 bp, Unknown
  misc_feature (1)..( 3000): cDNA_ID_2716859_gDNA_ID_2214477_Annot_ID_133141 3000 nt of promoter + ATG
aaaatgtaaaatatgttttgatatttttagctttattagaaaccgtgcgactaattttatagctattttgataattggttgagttatttttatttaatattttttgaaaaaaaatgtatgtcataacccttgtgttatagccaaaacatcaaacattttgaaacactagagctgttgacccagtggtaaatctctcatgcatgtggaaatgttgtatttgaggagataaatttaacttggtgtggctctcgtctctagaagatgtagactttcgggcttgaacttccagatattcaagaaaaaaataaaaaaaaattcatcatctctttatctcatagtaattttatttatggagatatataatcgcaattcagatatattattagttttattagtattatttaccttatataaaatcgcaatttttttatttttttgagttttgacatccaaaaggaaaataacatatactgtatataatttttggaaagcacttgtatgtacatatatttgccaatcattttctatgtaatgtttgcaggattacttctcaaaatggggagaaagtggggaagtggatctaaaggccgagttagagcgtctaatcaccttgactgctagtagatgtctattgggtcgagaagtccgtgaccaactttttgatgatgttgctccattgttccatgaccttgataaaggcatgcaacccataagtgtcatcttcccaaagctccccattccagctcacaattgtcgtgaccgtgctcgcggaaagattgcaaaaatcttttcaaacatcatagcaacaagaaaacgctctggtgacaaatcagagaacgacatgctacaatgtttcatcgactcaaagtacaaagacggtagagagacaactgaatctgaagtaactggtttgctcattgctggtttgtttgcaggacaacatacaagctctatcactgccacatggaccggtgcttatctaattcaaaacaaacactggtggtccgcggctttggacgagcagaagaaactgattggaaaacatggggacaagatcgactacgatgttttgtctgagatggattttctgtttcgcagtgcaaaagaagctttaaggcttcaccctccaaagatcttactgctgagaacagtacacagtgatttcaccgtgacaactcgagaaggaaagcaatatgagataccaaagggtcatatcgttgcaacttctcctgcattcgccaaccgcttacctcatgtctacaaagatccggaaaattttgatccggatagattttcaaaggaaagagaagaggataaagcagctggttcgtgttcatacatctctttgggagctggtaggcacgagtgtcctggtggatcatttgcgttcttgcagatcaaagccgtatggtgtcacttattgagaaactttgagcttgagttagtgtcacctttccctgaaatcaactggaatgctttggtcgttggtgctaaaggaaatgtcatggttcgttacaagcgtcgtcccttttcttaaaaaccttgttgcaacttttttttttttttaatctttcctttgatctttgtttgttatgttgcttgtttgatcgtatgctaataatttcactcataaatttcaacatctacaaaataaatgatatatatatatatacaaaaacaccacgaagtttggaatttggctactatttaaagtagtaaatacaagggtttatttgtaaagtagacactttttcaaaaataatttgcaaaataggtagttttttaaaaaattagagatatagacacttttttttactttttgtgagatagagaatatgtctaatagactaaaaaacaaaatacctatcaaatactaaaataccctttatcttgagagagaataaaaataatatgagagaccatttttattttattttgtttgtctttattttctatttttctttattttagttttcttaaaaaattatattgatttttagagtatttttatgtcatcaatttaatacacaaacatttcaaacatcgttttgtatactaactattattcattggtgtacaagtgtgtataccgatatttcataactagaggtaatgttgtttttaatattttacaaacataatgattgtataaaccaaatattattactcaatataatggtgtacatgatggtgtacataattaagttaatcttgatggtgtacaaaatgattgaaactattatgacgattggtgaatagaatggtgtatacaacttttaaatgatagcatataagattggtaaacaaagtgtacacttactagaaatgtataaatcattattttagttagtggtgtaaatcatctcgtacaccaatgttagtacactgttttatatatctctaaaggtgtacgatcatgtacaccatattttcaatcatctttgtacaccattttgtataccattgtaatcggtctatcacttcttacatcaatattatatattaacttttacattattatcgtacactaacatttgttcaccagttttaacaatattgcgtataccgtcggttgaaattaaataaaaaaatgctacatatttttgaaatatagcaaaattagtctttttagattaacataaaaaatttaaagttaatatgattatatggtaattttttatgaaaaattattatcaaacaaagtaaaaatatttaagtaaaaataaaaaagagaaaaagtaaaatttgacttaaattttgtttttatcttactacataacaaaataacaaaaggttatataaatcatttactaaatagagaggaaagagaaaagtgtctatttctaaaaaataactaaaaaactacctactttgcaaattatttgtagaaaaagtgtctacttttcaacttatctctaaatacaatccgaaaactgacccgtacatacccgacccggatctattagacactcgttcttcgtcgttatcaattcggagatg

SEQ ID NO: 11057 - DNA, 3000 bp, Unknown
  misc_feature (1)..( 3000): cDNA_ID_2705198_gDNA_ID_2214477_Annot_ID_133143 3000 nt of promoter + ATG
acaagtgaaacttacaaaggcaccaccaagtttatcaagcatccaatgcttaggagcattgagcctcttcaaatgcttcttcaaacctcttgcctgcaaaagaatatcgaacaaaaataaaaatcaaaacacaataaatgtttataatagctcaatcactaaaagtctcatcactcaagacctcaagtcacagaacaagagaataacgccagggaggtttcatatctgactaattgagtcctatcttttgagatctcaatatcaatccctaacccattttacagatcgcacaaaggaattcactttataaacattaacaattacccataattacatggaaatgctatctagattacaaagagagattttataatcccgcacaaaatgaattcacagatggagacaaactatccaaaaccaaaacaaacacatgacgcaatacgcttgtgaatacgagacttagagaaagagacgaagattacgaaccatgtttgcagcgaatgagttctgagttctccgcggctaagcaagccagtctcaattatatcttctagggtttgagaagaagcgaaacacaaagccctaattttaagtttttaacatgtgtaatccaaaaatccgctgccacacgtgtgacttatgttaagtacaggcccaatataggcccaataagagcccgcttttatttatttttcccactctgaagaagattagaaagcggaaaaaaaaacaaaaggtcgtgaatgtctctgtccctttcttcctcagttctcacgcaagcttcaacgagaaaagatcggaatctcgccgtcggtaaagcgccgccgtaagtaaaagacggaaaaccagaagaaggaggagattgtatttatgtgtagcagcgtttagtgtgaggaaggaggagattttgtatatagttagaatttgcttcgaagacgatgtcgctgagaattaaattagtggtggataagtttgtggaggagcttaagcaagcacttgacgctgatatacaagatcggatcatgaaggagagagagatgcagagttatatagaagagcgtgagcgtgaagtcgctgagcgagaagctgcctggaaagctgagctctctcgccgtgaggttcgtttttttttcaaattttgatttttagggcttttggagaatccggagaaatctgtgtggggatactgattttgttctgattttgacagacggagatcgctagacaggaagcgaggttgaagatggagagagagaatctggagaaggagaagagtgttcttatggggactgcgtcgaatcaggataatcaagatggtgctctggaaattactgtgagtggtgagaaatatcggtgtcttagattctctaaggctaagaaatgaggttggaaattggaatctggattctaaatttagggcacaaaaggaaaagatttgttcttgcgtttatgatggatgcaatgggaattgttggaatgatgcttggtttgtgtaaattattaattcaatgaagaaagtattgtgttttctggaaagagagtttgtctgatcacttcaagcctcaaggtgctttcttgctctattcaaacttttgttgattgctgtgtgacatgttgaaattcaggtttttagatcacggtatgtgtgaatgatgggtttagtttgattagtatagatgtttgtaggaaatacaggggcaacaccggaacatatctttccgttttcttctgttcttaaggatttttcatgtggttttgcttgaatgtgtaaacatcttgtggcatgaagagaatgaaaggtggccagggtaaagatgctaggatgcatgagtgagtgattattggtgttagtatctatcatgatttatggtgattgatgagagacaataaacaaatgtttttgggtagggattagggagatactagcatttagaatttcttctcctgttatagttagcttggtcttttggcaaagcagcacccagtagcaaacctaaggggtttcacttttcagaacatagggaagaagtagaaggttgtgcccgtatgagtgggcttgttagtgtttaagcagatagccagacagatgagctaggttccattatccactatgttacaatagtaataattgctttgctgctggaactaacattgtggtacagtgtacctatttccatattcttgctgtttcttaatttctttatctaggtttgtatatcttattccgaaggatgagtttttttcctggtcctgttagatttgcttgactcagaattgtgtccgacatcggtatgcatctatgaaaaggaaatatccatatgtttttctctacttttaacattctctctttgagttaaatctaaaacaaacttgtacctcagtggctttattcaagcagtaggtgttgtggctaggttggtattggatcactctaattgggagagcttctttgcttgtcaaggtgcctaggtgtggttttaccacttatgataagtagctgattacaattgtaaactcctgcaaaattgaacttctttatggcatatgaatgttttctataatctccagcttccttaccaaaacaggttactccttaatccaagagggcattgatattatgttcgacaaatacggttatacgggcagcaaacagcaagttttgccagagtttcaatggtttctacaattcagattgctgctcgagctaatatagccgaccacagataaggtatcaaatcatttgaagaccaaagatgactgattagtatagaacaaaaaacttaactttgcagaaacaaacaccacaaagataggaacttggctactatttaactaaatccaaaccaaacccaaagcaaaaaatgcaacatttattcgtgtggtagtggaatcactaatatggatctttgacccgtacccgacccggctctagatacacttgttcttcatcgtcatcaatcattgtatcatttctgaagatcatcacaagcaaagaaaatg

SEQ ID NO: 11058 - DNA, 3000 bp, Unknown
  misc_feature (1)..( 3000): cDNA_ID_2994689_gDNA_ID_2214477_Annot_ID_133145 3000 nt of promoter + ATG
catcggtagttgaggaaacggaaccatctctgaatcgctctccattttctttgcttgtgatgatcttcagaaatgatacaatgattgatgacgatgaagaacaagtgtatctagagccgggtcgggtacgggtcaaagatccatattagtgattccactaccacacgaataaatgttgcattttttgctttgggtttggtttggatttagttaaatagtagccaagttcctatctttgtggtgtttgtttctgcaaagttaagttttttgttctatactaatcagtcatctttggtcttcaaatgatttgataccttatctgtggtcggctatattagctcgagcagcaatctgaattgtagaaaccattgaaactctggcaaaacttgctgtttgctgcccgtataaccgtatttgtcgaacataatatcaatgccctcttggattaaggagtaacctgttttggtaaggaagctggagattatagaaaacattcatatgccataaagaagttcaattttgcaggagtttacaattgtaatcagctacttatcataagtggtaaaaccacacctaggcaccttgacaagcaaagaagctctcccaattagagtgatccaataccaacctagccacaacacctactgcttgaataaagccactgaggtacaagtttgttttagatttaactcaaagagagaatgttaaaagtagagaaaaacatatggatatttccttttcatagatgcataccgatgtcggacacaattctgagtcaagcaaatctaacaggaccaggaaaaaaactcatccttcggaataagatatacaaacctagataaagaaattaagaaacagcaagaatatggaaataggtacactgtaccacaatgttagttccagcagcaaagcaattattactattgtaacatagtggataatggaacctagctcatctgtctggctatctgcttaaacactaacaagcccactcatacgggcacaaccttctacttcttccctatgttctgaaaagtgaaaccccttaggtttgctactgggtgctgctttgccaaaagaccaagctaactataacaggagaagaaattctaaatgctagtatctccctaatccctacccaaaaacatttgtttattgtctctcatcaatcaccataaatcatgatagatactaacaccaataatcactcactcatgcatcctagcatctttaccctggccacctttcattctcttcatgccacaagatgtttacacattcaagcaaaaccacatgaaaaatccttaagaacagaagaaaacggaaagatatgttccggtgttgcccctgtatttcctacaaacatctatactaatcaaactaaacccatcattcacacataccgtgatctaaaaacctgaatttcaacatgtcacacagcaatcaacaaaagtttgaatagagcaagaaagcaccttgaggcttgaagtgatcagacaaactctctttccagaaaacacaatactttcttcattgaattaataatttacacaaaccaagcatcattccaacaattcccattgcatccatcataaacgcaagaacaaatcttttccttttgtgccctaaatttagaatccagattccaatttccaacctcatttcttagccttagagaatctaagacaccgatatttctcaccactcacagtaatttccagagcaccatcttgattatcctgattcgacgcagtccccataagaacactcttctccttctccagattctctctctccatcttcaacctcgcttcctgtctagcgatctccgtctgtcaaaatcagaacaaaatcagtatccccacacagatttctccggattctccaaaagccctaaaaatcaaaatttgaaaaaaaaacgaacctcacggcgagagagctcagctttccaggcagcttctcgctcagcgacttcacgctcacgctcttctatataactctgcatctctctctccttcatgatccgatcttgtatatcagcgtcaagtgcttgcttaagctcctccacaaacttatccaccactaatttaattctcagcgacatcgtcttcgaagcaaattctaactatatacaaaatctcctccttcctcacactaaacgctgctacacataaatacaatctcctccttcttctggttttccgtcttttacttacggcggcgctttaccgacggcgagattccgatcttttctcgttgaagcttgcgtgagaactgaggaagaaagggacagagacattcacgaccttttgtttttttttccgctttctaatcttcttcagagtgggaaaaataaataaaagcgggctcttattgggcctatattgggcctgtacttaacataagtcacacgtgtggcagcggatttttggattacacatgttaaaaacttaaaattagggctttgtgtttcgcttcttctcaaaccctagaagatataattgagactggcttgcttagccgcggagaactcagaactcattcgctgcaaacatggttcgtaatcttcgtctctttctctaagtctcgtattcacaagcgtattgcgtcatgtgtttgttttggttttggatagtttgtctccatctgtgaattcattttgtgcgggattataaaatctctctttgtaatctagatagcatttccatgtaattatgggtaattgttaatgtttataaagtgaattcctttgtgcgatctgtaaaatgggttagggattgatattgagatctcaaaagataggactcaattagtcagatatgaaacctccctggcgttattctcttgttctgtgacttgaggtcttgagtgatgagacttttagtgattgagctattataaacatttattgtgttttgatttttatttttgttcgatattcttttgcaggcaagaggtttgaagaagcatttgaagaggctcaatgctcctaagcattgg

SEQ ID NO: 11059 - DNA, 3000 bp, Unknown
  misc_feature (1)..( 3000): cDNA_ID_2705190_gDNA_ID_2214477_Annot_ID_133146 3000 nt of promoter + ATG
agaagcatttgaagaggctcaatgctcctaagcattggatgcttgataaacttggtggtgcctttgtaagtttcacttgtgttggattgaatcttattagagcttagttttcgtttgattcggtgcttataatgctatttctgtccaggcccccaagccgtcttctgggccacacaagtctagggagtgtttacccttggtccttatcatcaggaacaggttgaagtatgctctgacatacagagaagtgatttcgatcttgatgcaaaggcatattcaggttgatgggaaagtgaggactgacaagacttaccctgctggtttcatgggtgagtctgttagtgttgtgatacgttttcagagtctggctatagtccttgtgctgattgatttttatgcttcttgtgatcaatgatctaactaaggataaatatttatttacagatgttgtgtctatccccaaaacaaatgagaacttccgtcttttgtatgacaccaagggacgtttccgtctccactccatcaaggatgaggaggctaaggtttgttctcctaaatctcttacattgccatatactgaatctgtcaaaacaaagtcaagtctttattcattgctctatacttacattagaggtctgctgaatttgcatgttgattaccagtttgtaatatattccaacaagtatcctcttttgttgttgtgcagttcaagctttgcaaagtgagatcgatccaatttggtcagaagggtattccctacttgaacacatatgatggtcgcaccatccgttatcctgacccgctcatcaagcctaacgacaccatcaagctcgaccttgaggagaacaagattgtggagttcattaagtttgatgtgggcaacgtagttatggtcactggaggaagaaacagagggcgtgttggtgtgattaagaaccgtgagaaacacaagggtagctttgaaaccatccacattcaagactcaacaggacatgagtttgcaacaaggttgggaaatgtgtacacaatcggtaagggaacaaagccatgggtgtcccttccaaagggtaaaggtattaagttgaccatcattgaggaagccaggaagagactttctgctcaacaagcttgatagttaatactatgctctgttttccagtttcagaacaaaccatgctttagtttgcagcttttcaatgagtcacttttgttttaaaacttatcttttcggattgttatgagctatattttggaccttttgcgctattaatattaagtttgaactcaaccttgtttcttcagatagttattgaattgcttcgtagtatttaggggccattttgttaatgttagggtcttagggagatcacaacttctgctaaacaacagtaagataaatgtatcacttaaacatgtggtaacattctgattgatgtttcaaatttccgatctcgatgtcatatttcggtgtgggagacaaaacaaggtttatgggtttgctctagaaagtcttacattgattatggtgcacaagcatacgtgtctgctttaagaatactgaagtcatgttgatatcgttattgtcgctagcttcacgtggtagttgtggcgagtgttattttaaaatcgttagtagaagttgctcaaagattcttctccttggtgacttggtcaaacaaaaaatcctacaaaatgagaagaagataacaacaaaaacgacactgaagtcaatgtcgaaccaagtgcctcggaaatgcaactacagtcaggtatattgattgaaaacaatgtatctcttgtatgaaatcaaacgccatgcatgaatctgttttaagcttggggaaattataagagtaaatcaagaaaaatattctagatgatagaagcatagaacattgatcatgtaacttcatgacaacaagaaattgtcttcgaatcttttttgatggtttttctacattcaagttaaaaaaaatgtcatttgatgtgaaccggttcgacttagcatatggttaattgaaatccagcaaaataagaaaagacttgagaatatctaaagccaaaactgctgaattccaaaagccaaaataggtgttaacttatggtggatataaatataaatcatagagaaaattttacggagattgaataattaatacccgcaaaaggatcgggaaactgaatagcaaaaagacgagagagaatgagattttacttctttataattgaagttatgcgaatgttgtgtatttttacaatgaacggtttatcgttctttatatagagataaaaaaaaagataaaatttactgtgttggcatagtaacatttaaattttaaactacatcactaaataattagctttgaaagaatatatatttctcttagttttttttcttttctttttaagttattattaagaatgtggccaaatttacccaagagttaaaattttgtcccatcctttatattttaaggaaaaaattaatagttttagagattgatttttaccatttcaatttgggggaaaaaaataacaatctaaaagcattgaaggtttgaatttttgattcaaaaagacccaaaataaacgcctcatctttaggttaattttcagaataactattaaaaagtgaataattcttcactgatccatgttggactagtaagtagtaacaatcaaatccataacattaaatgtgttgaaaaaaagaatcaaaagtaacaaaaaccataaccctaaataatcatcccaaaagtggaaataataaaagaagcagttagattgtgacggaggagacaaaatcatcatctctgttcttcttcttctcctctctcacatacgatgatgacccaacaaccttgacgttgatttcgatgtcacacacaacactataaataacactcttcacctatttttgtcatctcacactttggactttggagcccaaaataatctcataaccattaaaaacaaatctcctccttctctccggcgtca

SEQ ID NO: 11060 - DNA, 3000 bp, Unknown
  misc_feature (1)..( 3000): cDNA_ID_2918714_gDNA_ID_2214477_Annot_ID_133148 3000 nt of promoter + ATG
acggtccagatttaaaacactaccccagtaaatacaaaaccaactgaagaaaaataaataaaaagtaaatttttaaagagtccgacccgggtccctcaaaaaaaaaaaactccgacccgggacaagatccgtatccaacaaacttatatgtgtatcggacacagaagaatactttccacgatcatcagcttctggagatctcttctgggaatcgagcttcactgttaaagattttccttcaatcggctaaaaatggtaacaatcgccactccctttgcttttgggcttctctgttatctgttcgaattttggatctgccttcgatcttgtactattgcatcgagtatctacgatttgatttgatgatgaaattgaatctaatcctccggtatccgtagatttctgcttggatctgtccggttcttttctcgcttacgaattgatcgattatttaggaagtgaaaggattagtttgtttcgtgaagcttgaaattgttatgtttctgttgcccattcgaatctcttgtgagttattaaatccaattcattgtttttgaaccactattgctcttgaagtaattaagcttcttggattcaaatgtaatagggtctaagctagttcatgtacctcacatctctttatttgcctctgtttctgaattggcaaaataagctcgttgatctctccatctttccatatctttaaatggtttaaaaacttttcttgagatgcttgtggcttgcgtttaggtgtatgatggtaaatgattctcaagttctggtacttgatctctcacaattccctcttttgcttgccttatgcaattatgtgcatttcaaatctttatgagttgccagaaatcgtgatatatactactggttttgtctggtcttgttttaattctctttatctcgatgctgtctttgtgattctagaattttctcatgcttgatatgggtgaggagacgtcaaaaactaattaatgtgttatgtattgccattcacaatgatagaataatgctttcttgaaaagaaaaaaaaaaacttctaaggtggctgttttgggttatgtttgtattttcagatacatttcgtgttactagtcagtcgacaagggaaagtaaggctcaccaagtggtattcgccgtatacgcagaaggaaagatctaaggtatgtacagcttaagtgttattgagttaatgccgcattatgctttgcatgcctatttaatcttacatttggaaaaatgatctggacaggtcatacgtgaactcagtggagtgattctgaaccgaggtcccaagctctgcaattttattgaatggagaggatacaaggttgtctacaaaaggtaatagacatattttatataagtagcatgtatttgctactttaaaaacaatggttataaacatgatggttttgtaattttgcagatatgcaagcttgtacttctgcatgtgcattgatgaggcggataacgagttagaggtactggagataattcatcactacgtcgagattcttgaccgctactttggcagtgtgagtaaacgcttatccaaaatatactcctaccactctatcataaccttacaaaacatctagattttgattaagagctgtttattctatgatcttcaggtgtgtgaactcgatttgatttttaacttccacaaggtatacatactcaactctatcaatgattctctactctctgtattttacttcaatatgacaattttcgaatctggttgttttgttctaggcgtattatatactcgatgagctgttgatcgccggagaacttcaagagtcaagcaagaaaacagttgcaaggataatatcagcccaggtatggtttcttaatcctaatgcccactgagacaaaaacgattagtccgtaagggttgtgtaaatgatgttgtgttataatatttgaaggatcaattggtggaagttgcgaaagaggaggcgagttccataagtaatataattgctcaggctaccaagtagtccttttctgaacttttcttatgcagctgaaacaatcgtaaatgagttaatattttccttaaactctgagatattctcttctgaatcacacttttgtttgtcatgtcatgtgattgtttgattgattagaagaaagaagcattcatcgttttgggtttaaaagtagtgattgatctgcgaaatcataaatggtatactattttttcacatatgttacgttttaaaacgtggaatgctgaaatttcatcaagttcatcatctcgaaattataatttgtccgattgattgaatagaattggtttttgagcctgaggactgatgcaccaaacaacatgccagtgtctcgttctttcttcttcaacgtgcctaattttgtaattcgggcgacctaacctcattttgtgtaaccgtgatccgccatgagaggaggtatccgctcgaagagttatcctttctcctcacaaaagcaacgccaatgtcccttttctcactttgccctgtttgctccttagtacttgtttcaccaaaataatctataggatttcaaatacatgaagaatgtttgatggtaacaccaaaaatagtggagaagaaacagacacttatgggcttgggctcaaggactcgaaacttgtatacccaaacttaaacgtgactgcgtcttgttcttaccaatccaataatttatagtaatgataataattcatctttccatatataattttttttaattattgaaattaaaaatgagggaaagaatatccgttttctttgccacaaaaacattttcatttgggggttttcataatttttggttcttcagctcctcaagcttcgataggtatcgatcgtcttcaccatacttttggattttttctgatcacgtttcaattccaatctgagagatcttccttgattcgatttctgaatatatctctgtaattttttttctggttttttctagggttttagtaattttccg

SEQ ID NO: 11061 - DNA, 3000 bp, Unknown
  misc_feature (1)..( 3000): cDNA_ID_2705186_gDNA_ID_2214477_Annot_ID_133150 3000 nt of promoter + ATG
tgagtgagagttttaactgtaaaactaaatatacgattttacaaaaagtaatataaataaattaagcattatttggaaaataatgtaaagctgataattatattcctaattttaaatccatattgtttccttaaagaatatttcaatataattgcaaaaagaaaagaaaggaaatatatcttccgacaatattatctgatgcgcgtgaaatagactatcaggccaagattaggtcaaaaagcccgtgagcccaaaaacctgagaaaacccggttcaaattgcaaaccctcgatttcatttctccaattcgatagacgctgggtaaaaaaattcggaggacgacgaaagagaaaacgagtgtttcagtcactgccccacggagctctcggaaatttgtcttccccttgtcgtcgtctccctatctactgcttcttcttcgttttcgtcttctttatcaaggtgcgctttagcttctcaacgccgtttgatttttagaatttcgatttttttttttttttcttctagttcttgaatcaatccggaatttggcgactatgttgcttcgtttgtaaatcgtattctcctgtttagaaatcttcaattgactgtgttataggaacaatttaaatctcaatttcaatgtctcttttagtcaccttcgtgtagtaatttgcttttgaattactgttaatgaatctcaaaaaatggattttataatttgggaaaaggggcttctgggtttaattaaagaacacgagataaggtctggttttttcttttcatttctttgtgtgtgtttttggtttctttgattttcttctgggttatggtccgtttgagtctggtgatagttagttggcaaccaatttttattgatctattacaatcgagaacacaaaactaaaccctaagaaagaagtacataaagttgttgaaaagatctcgttaactctcccaaagtcctagggctttcacacaaccagtgattaaataacctttgagctgttctccttcccacactttatatgtgtgtttgtggtttgtctaatttgtgaggagcttctatgaaacctctggttattttaattgttttctgcaattcctgattgatatgtttatatatatttcttgtatttgtgaatttgtgtaggaatgctgtttaattggaatcaacaatggagaatttgacggaaatagaatcaacgatggagagtttaacggaaatggagagtgagagagttgaacagggtaccgataaggaaattggaagtggagagaaaaggcaggatgatgtaaaggaaacggagaatgagaattctggagagagagtaggagaggaagctcctgtcagggaacatgaagattctccatgtctcattgttattgaagaaggtacttccctagcttcccttgaggaggtgaccaatgctgatgatctgccgaagattgatgatgagaagaattcccaatttgaaacaagcccgcatccaagtccttctccttcagtagctttagacactgaagaagggttaatcaaccctactgcagaagacactgtagaagagaacatagtgtctagcgaagtaagttcggatatcttgaaagatgacggagatgccgtcgaggttgacagagatactgcagaagtccaggaagaaacggccaacatacctgaatccaaactctcggaggacacaggatcacctcatcatcatgctgatattctgatggtgcaggaaaaagctgcagaagaacatgacatgatagcctctggagaccatgaagaatttccagtcaatcctgataacaaacactctgaagaaaatcagtcaccacatcatcatgctaataatgtgatggagcaggaccaagctgcagaagaacgtgagatcatatccccaggagaacataaggaaattccagccaatcctgatactaaagttgttgaggagaacaatgacaggatagatgagggtgaggctaacaatttgaatttggctggcgatggaagtggagcagtcgatcatgattacttgaccaaaacggagctggacaaagtgctagaggtgcctggttctgagaccatatcaaaactggaggataggccatctgagcatctctcagaaacctcaatgaacgtggaaaaagaactagaaatgcctgccgttgaaattttgccagacaatgacaaaaactctgatgtgttggcagttggagtttctggagacagtgacaatgtggtatctgtcttgcccgcttcccaaacttcctctgatcgtgatgaaggaatgattacagttgatgctgaacctacggaagacatgaaacttgatgttccagattctaaattggttactgatactactgttgactctactaataacaaggatgcccatgttgaggctaatactgaaaggcaagataattctagtgcacttgtgctaaatgatgcaaataatgaaagtgcaccagtgaaacgtgtacctggtccttatgttgcatcttccaatataaagtctgaagcgcggggtagtggagatttgaacaatggagtacataaaatagttcggaccccacctgtctttgatgggaccatgcgcgcaaagcgctctttcctcttggatgatgcgtctgatggtaatgaatctggaacggaagaggatcaatctgcttttatgaaagaattggatagtttttttagagagcgaaacatggatttcaaacctccaaaattttacggggagggactgaactgcctcaagtaagcttgatacccatcattatttggtcactttactgtgttacattttaaaattttcagcaggagctgatatctaatcaatttctttggcacaaggttgtggagagctgtaactagattgggcggatatgacaaggtacgggtcactgtgaatacgcctgttgaatgtcacagcatcttttttgacaagcaaatgtgacttcggcttttcatcttttgttccatcctggcttacttgc

SEQ ID NO: 11062 - DNA, 3000 bp, Unknown
  misc_feature (1)..( 3000): cDNA_ID_2705178_gDNA_ID_2214477_Annot_ID_183175 3000 nt of promoter + ATG
ttgaagccttagagaaaatcaaagctggtaagtgagcatatagccttggttttcttaaatctttttggttttggtttttaaatggtgactgattctacagagctgatgatccttggattcatttctttattactcacttttggagaaccatatattctcaagatctgtgttcctcgaaaagctgctctctctatgttaccttgtttatctgaagacacagtgcttttccagaaacttgctccatcatctcttagcaggcatcttttggctgctggtgatacatctattaattgcaaacaaggatctgagccactcataacattgaaaggcttgcaccaacttcacatcttgttgttcttcttggccatctttcatatcgtatatagtttaatcaccatgatgcttagcaggctcaaggtaccataaattctagttttgatcaaaactttgtttgatatagtgaataagtgcttcattttttgttggatttttggcagattcgtggatggaaaaagtgggagcaagagacattatctaatgactatgagttttctattggtactttgttcatcagattctgttttgtacccctgaactgaagtgttgttcttttacagacttacttctgttctgtggtgcagatcattcaagacttaggctcactcatgagacttcttttgtgagagaacatacaagtttctggacaacaactcctttcttcttttacgtcgtaaagaaaccatttctctcattcttcatctctttcaaatgatcaaaatgatcttcattcgatttattatatgctctttggttacagggatgcttctttaggcagttctttgtatctgttgaaagaaccgactacttgactctgcgccatggattcatctctgtgagtttttttttctaaatcttccatctctccatttccttctatctcaatcttgatatgtgattttcgtgatgttttgattcaggcccatttagctccaggaagaaagttcaacttccagagatatatcaaaagatctctcgaggatgatttcaagttggtagttggaataaggttacaacacaatcaaatcatcaaatgcaaatgaaaccggtcttacataatccggtcgtatataacagttttaacaaattgttttgctctgcagtccagttctttgggcatcatttgtaatcttcttgctgttcaatgttaatggtgagctaaatttatatctttaaatttaaattcaattcacatactgaagtctttctattcaattctaggctggagaacattgttttgggcatcgatacctcctctactcgtaagacaatctctccctctaatacatcttcttgaaagtttcttgatgaacaataagtatttttgcagataatcctagctgttggaacaaagcttcaagcaattatggcaacaatggcgctagaaatcgtagagacacatgcagtagttcaggggatgcctttagtgcaaggttcagatcgatacttttggttcgactgtcctcaactacttcttcatcttatccactttgccttgtttcaggtaattatgaaaacatcttctccttgatttcattcttgaactaacatgttttcgcagattctgtcttcttctagtaatgtttctctctctaaccggtaaatttatttcctctgtgttatgcagaatgctttccagataacacacttcttctggatatgggtaaagaaacatctattcttactttggtgttatagaatgatgttactgagtaacatctattactggcatttgcagtattcttttggattaaaatcatgcttccataaagatttcaatcttgtagtcagcaaactctttctatggtaaaaagcttattcataaacttacttatattatagaggaaaagtatttaaaaacatgtgaggatgtatgtatgtatgtatgtgcagcctaggagctttgatcttatgcagctacatcactctcccattgtacgccctcgttactcaggtaattaacttgtaaacaacagttttcgatcgatattttagtcgaatggtctattgaaggaaagaaaatagagagatgatgaaatggtgtgtggagcagatgggttcacacatgaagaaagcagtgtttgatgagcaaatggcaaaggcattgaagaagtggcacaaagacatcaaattgaagaaaggtaaagcgaggaagctcccgagcaagacacttggtgtttcagagagtttcagcctctcttcctcttcctctgcaaccactcttcaccgttccaagaccactggtcactcttctaacatcatatactacaaacaagaagatgaagaagacgaaatgtctgatcttgaagctggagcagaggatgctattgacaggattcaacaacaggagatgcaattccacaactcttagctgctttagtttcttctgttgttacttcatagttcaaatgaaacgatgctgtttactaacttagtcaggaaactattgtcgtacaagtgtttctttaatgtgttactacgtttaagccaatatagatatctaataacttgtcctaaactaaataactcgcactacatgatcattgttattattaatatagatttatttcgatttgaaaaatcctaacacgacatgatcatgttttcttcttctccttattatatgtgatccgtatcaaatacttaatcattgtttacgtcaatgcttgacattaacaaaattatcattaagctaaacagataaggacgcgagagatagagatagatagtgactaatatttttgaattatttaatgcagtttgagagaaagagacgaggaagaagaagaagaagaagaaaggaagtgacgaagaaagaatgagaagacgaagaaagagaaaacaagatccgattcaaaatatggaaacttgaatatcttcttcttcttcttccttctcctttctcatctctcactttgagggtgaattttgattttgtagaaa

SEQ ID NO: 11063 - DNA, 3000 bp, Unknown
  misc_feature (1)..( 3000): cDNA_ID_3038599_gDNA_ID_2214477_Annot_ID_183172 3000 nt of promoter + ATG
gagtctattgttcaccagaccgctagtcttggtgatgtcgaggtaaactgattcatacactgttagtctctcgtgtttctgacggtctatattttatacttaagtcggaatcattgatcgaggttagctcataaactctctgtgcattgatttcctgaaccaaccagggtttgaaagctgccttggcatctggtgggaacaaagatgaagaagactctgaaggaaggactgctttgcattttgcatgtggatacggcgaggtatgtcaacgtctcaacaagccttaacaaaaaaaactgtcgaaatgtcactatcacagaatcatggaaggcagtatatactaccaatatttactagcatcatgcacttgatggataagcagcttcggtttcacttagtagattattacacaattatctgtagcattctttacaaaggaaattgacagttgccattattacatctgcaattagaagttgttataaaagcttaatccgaagtttgaacccagctgacctaggttgagtttgtatgtaggtgagatgtgctcaggttcttctggatgctggagcaaatgcaaatgcgattgacaaaaacaagaacacaccattgcactatgctgctggttatggaaggaaagagtgtgtaagcctcctcctagagaatggtgctgcagtgtaagtttgcaacaacaagaacacaaattcgatttccaaacaacttagtaatggttatataagactcttttaagtgtcgtttcattttctgtttgcagaactcagcaaaacatggacaataaaaatcccattgatgtggccaggctaaacaatcagctagatgtggtgaaactacttgagaaggacgctttcctctgagctgctttgactcttgaaggatatgtttcttctctgtcatgtaatagtgtcacagagtctgattgcaaccttgtcttctgtgggggttttcatcattaaatctggaaaaaaaagatggagaaaatggatgtttattatggttttgtaatgaattattttcttcttgaattggttttttcttttggctcttaaagtcttttttgtccttctttgtgtgccacagggctttagtgttgcaatcacaaagaaaaaacccttaaactgttatattcgagaaggaatagactgtttaatcaaatcggtgataagataatttggagatttttaacatgccaaccgtaaattagaatgaagagtagaaagcccatagaggataacgatactaatagatgagatttgtacataagtaatgtgcagaatggaagtcgatagaatgaaatgcaaaagtgaactcaagaacagcaaagatgataaaacttggacctcaaatcatctttggctctttgctgtttcttttgttttctctcttgaaagtattattgaaaaaacagtaaaaaaaaactcaaaattgaggttacttcaatttaacaatagtaaaatcatcaacacaatttttttttttaaagacatcttaattttctaaaatggatatacaaaatcatatcttgcacctcggaatttggtccaccttagacgtttttagtggcaaaaattcccggatttatgtggattccaatattagtctaggtttcggcatagaattctcctggttaattaaaaatatgtatacaatgttataatttaatcaaaccaacaaaataaaaagagtttgtaaaaatttcaaaatagttctttcaaataaattctgaacagtcttttaaatttatttttagtgtttagtgtgtcatatgtcatatgtatacaaaaacttaatttaaaatttgttattttgagtgagagttttaactgtaaaactaaatatacgattttacaaaaagtaatataaataaattaagcattatttggaaaataatgtaaagctgataattatattcctaattttaaatccatattgtttccttaaagaatatttcaatataattgcaaaaagaaaagaaaggaaatatatcttccgacaatattatctgatgcgcgtgaaatagactatcaggccaagattaggtcaaaaagcccgtgagcccaaaaacctgagaaaacccggttcaaattgcaaaccctcgatttcatttctccaattcgatagacgctgggtaaaaaaattcggaggacgacgaaagagaaaacgagtgtttcagtcactgccccacggagctctcggaaatttgtcttccccttgtcgtcgtctccctatctactgcttcttcttcgttttcgtcttctttatcaaggtgcgctttagcttctcaacgccgtttgatttttagaatttcgatttttttttttttttcttctagttcttgaatcaatccggaatttggcgactatgttgcttcgtttgtaaatcgtattctcctgtttagaaatcttcaattgactgtgttataggaacaatttaaatctcaatttcaatgtctcttttagtcaccttcgtgtagtaatttgcttttgaattactgttaatgaatctcaaaaaatggattttataatttgggaaaaggggcttctgggtttaattaaagaacacgagataaggtctggttttttcttttcatttctttgtgtgtgtttttggtttctttgattttcttctgggttatggtccgtttgagtctggtgatagttagttggcaaccaatttttattgatctattacaatcgagaacacaaaactaaaccctaagaaagaagtacataaagttgttgaaaagatctcgttaactctcccaaagtcctagggctttcacacaaccagtgattaaataacctttgagctgttctccttcccacactttatatgtgtgtttgtggtttgtctaatttgtgaggagcttctatgaaacctctggttattttaattgttttctgcaattcctgattgatatgtttatatatatttcttgtatttgtgaatttgtgtaggaatgctgtttaattggaatcaaca

SEQ ID NO: 11064 - DNA, 3000 bp, Unknown
  misc_feature (1)..( 3000): cDNA_ID_3038603_gDNA_ID_2214477_Annot_ID_183171 3000 nt of promoter + ATG
taaccaacacttttttcctctcgctcttcttcgctactgtttattttcttcttagccgatggcgtgagaagatccgtaactcgacgcctcttcacgtcgttgacttatctgagatctgtgctctaatcggtttcgttgcttcgtttatctacctccttggtttctgtggtattgatctcattttccgatcttcttccgatgatgatgtttgggttaacgatgggatgattccatgtaatcaatccctagattgtcgtgaggttcttccgattaaacctaattccgtcgatcctcctcgggaatcggagcttgattcggtggaagatgaagaaatcgttaaattagtgatcgacggaaccatcccttcgtactcattggagacgaaactcggagattgtaaaagagcagcagcgattagaagagaagcggttcagaggataaccggtaaatccttaaccggtcttccattggaaggtttcgattacaattcaattttggggcaatgctgtgagatgccagttgggtatgttcagatcccagtggggattgcaggacctttgttgcttgatggggttgagtattcagtgccaatggctacaacagaaggttgtttggttgctagtaccaatagaggttttaaagctatacacttgtctggtggtgcttttagtgttcttgtgaaagatgccatgactagagctccagttgttagattcccttctgcaagaagagctgctcttgtcatgttttatcttcaagatccttctaatttcgagagattgtctctcattttcaacaagtgagttttgaaagtttctccttttacttagtgatttgagtgttgttgctgacttgtttgttgttctatatgttatagatcgagtagatttgctaggcttcagagtattacatgcacgattgctgggaggaatctgtatccgaggtttgcgtgtagtactggtgatgctatggggatgaacatggtctcaaaaggtgttcagaatgtcttggactttgtaaagagcgagtttcctgacatggatgttattggcatctctggtaaactcttctttccctctttggtgttgtctcgattttcgaaataaagttgaactctttttgattaatttggtgttatggtgttcagggaactactgttcggacaagaaggcttcggctgtaaactggatcgaaggacgtggtaagcatgttgtatgtgaagcttttattaaggctgagattgtggagaaagtgttgaagactagcgttgaggctcttgtagagcttaacacgctcaagaatcttgttggttcagccatggcgggttctcttggtgggttcaatgctcattcaagcaatattgtcagcgctgtgttcatcgccactggccaagacccagctcaaaacgtggagagctcacactgtatgaccatgattcttcccgatggtgacgaccttcacatctctgtttcaatgccttgcattgaggtataatgcatgttctatcttgaaattaaacccattattgcagagaacacaaagccgttagttttttgaattattgttggatccaactcatgaatgttttgtttattgatgtgactccaggttggtactgttggaggtgggacacaacttgcatcacaagcagcttgtttgaatctactcggtgtgaaaggatcaaacaacgagaaacctggctcgaacgcacagcaattggcaagaatagtggctggttcggttcttgcaggagagctttcactaatgtctgctattgcagctggacagcttgtgaagagtcacatgaaatacaacagatccagcagagacattggcccttcgtctcaagtcaacaggtgatgtttggagcacgatgagacggataataataaaacaacaaaaacccataattagatttgatgtaattctaacttcatttgatttcttcttcatcgatctcttttcttttctatctattttgtactaagtctccaaattttcttaatttatgtaaagtcttttgtccttccatctttatggcttatattaatatcatagcttagcatcaaaatgtgtaattaaattgcggtttaagctttaaagccatgatttttttttctaacattgaatagattattgtggcagtgtttgctttgtgatgattatgtacgtgacagagttaggtactactaataaatgtagaaatgtagttgtgaatattgcagacgatggaggagtgatatggtagtttgacaaatgaagcatttgaggcaatgaagtctctcctcatggcatgtgtgtgtatgggtctttgatgatatcttagaaagtaagcagtagagactgtgcagagagctaaaccaacaatcattattgattttaaaccaaagagagtaagagttttattattattgatttctgattacttctcttacaattgaagtaatgaattttatgttacgacaaatttgatcatttatatagacgtaaaaatgtaaattattatgcatgcatagtgacgctgaggctcatacaagttataatttactctcaatattttcaggttgcacatcaattgttgatattttgtttcctcctttgttctaacttttacaacaataatatctcattttgaaaaattgcctaaaccttttaataaaaagttgtgattttgttgcaatttttaatctgtaaaaatgcaatccgattaagtcggaccgtcagatcagtcctcatcttgtttgtttaacggtccagatttaaaacactaccccagtaaatacaaaaccaactgaagaaaaataaataaaaagtaaatttttaaagagtccgacccgggtccctcaaaaaaaaaaaactccgacccgggacaagatccgtatccaacaaacttatatgtgtatcggacacagaagaatactttccacgatcatcagcttctggagatctcttctgggaatcgagcttcactgttaaagattttccttcaatcggctaaaa

SEQ ID NO: 11065 - DNA, 3000 bp, Unknown
  misc_feature (1)..( 3000): cDNA_ID_2994689_gDNA_ID_2214477_Annot_ID_183169 3000 nt of promoter + ATG
tttaatgggattttctggttaaaaaacaggattgcaactgttgcctataagcttccagaaactactcttgatgtaaataagtcaaaaaccaagtaaacccaggaaagtcaacacaaacaacaaaccaacgacattagtcgaatttagctgaaagacgaaaagtttcctgagctttttgatatttgaggctaagagaagtagttttttggtaacaaaatcaaagcttggtctgacccatgaacatgaacagagtctgaatctggtcaaagtaaatagaaactaaataaggtcggaagagagaagtagtgagaagagaatgaacttgaaagaaggaatggaattggcgaagacgttgatccacgagatttcatttggagtggctttcttgggatcatcagaaggaaatctgtaaggaattgtgcaagctctgtagttgttttctattggcatcggtagttgaggaaacggaaccatctctgaatcgctctccattttctttgcttgtgatgatcttcagaaatgatacaatgattgatgacgatgaagaacaagtgtatctagagccgggtcgggtacgggtcaaagatccatattagtgattccactaccacacgaataaatgttgcattttttgctttgggtttggtttggatttagttaaatagtagccaagttcctatctttgtggtgtttgtttctgcaaagttaagttttttgttctatactaatcagtcatctttggtcttcaaatgatttgataccttatctgtggtcggctatattagctcgagcagcaatctgaattgtagaaaccattgaaactctggcaaaacttgctgtttgctgcccgtataaccgtatttgtcgaacataatatcaatgccctcttggattaaggagtaacctgttttggtaaggaagctggagattatagaaaacattcatatgccataaagaagttcaattttgcaggagtttacaattgtaatcagctacttatcataagtggtaaaaccacacctaggcaccttgacaagcaaagaagctctcccaattagagtgatccaataccaacctagccacaacacctactgcttgaataaagccactgaggtacaagtttgttttagatttaactcaaagagagaatgttaaaagtagagaaaaacatatggatatttccttttcatagatgcataccgatgtcggacacaattctgagtcaagcaaatctaacaggaccaggaaaaaaactcatccttcggaataagatatacaaacctagataaagaaattaagaaacagcaagaatatggaaataggtacactgtaccacaatgttagttccagcagcaaagcaattattactattgtaacatagtggataatggaacctagctcatctgtctggctatctgcttaaacactaacaagcccactcatacgggcacaaccttctacttcttccctatgttctgaaaagtgaaaccccttaggtttgctactgggtgctgctttgccaaaagaccaagctaactataacaggagaagaaattctaaatgctagtatctccctaatccctacccaaaaacatttgtttattgtctctcatcaatcaccataaatcatgatagatactaacaccaataatcactcactcatgcatcctagcatctttaccctggccacctttcattctcttcatgccacaagatgtttacacattcaagcaaaaccacatgaaaaatccttaagaacagaagaaaacggaaagatatgttccggtgttgcccctgtatttcctacaaacatctatactaatcaaactaaacccatcattcacacataccgtgatctaaaaacctgaatttcaacatgtcacacagcaatcaacaaaagtttgaatagagcaagaaagcaccttgaggcttgaagtgatcagacaaactctctttccagaaaacacaatactttcttcattgaattaataatttacacaaaccaagcatcattccaacaattcccattgcatccatcataaacgcaagaacaaatcttttccttttgtgccctaaatttagaatccagattccaatttccaacctcatttcttagccttagagaatctaagacaccgatatttctcaccactcacagtaatttccagagcaccatcttgattatcctgattcgacgcagtccccataagaacactcttctccttctccagattctctctctccatcttcaacctcgcttcctgtctagcgatctccgtctgtcaaaatcagaacaaaatcagtatccccacacagatttctccggattctccaaaagccctaaaaatcaaaatttgaaaaaaaaacgaacctcacggcgagagagctcagctttccaggcagcttctcgctcagcgacttcacgctcacgctcttctatataactctgcatctctctctccttcatgatccgatcttgtatatcagcgtcaagtgcttgcttaagctcctccacaaacttatccaccactaatttaattctcagcgacatcgtcttcgaagcaaattctaactatatacaaaatctcctccttcctcacactaaacgctgctacacataaatacaatctcctccttcttctggttttccgtcttttacttacggcggcgctttaccgacggcgagattccgatcttttctcgttgaagcttgcgtgagaactgaggaagaaagggacagagacattcacgaccttttgtttttttttccgctttctaatcttcttcagagtgggaaaaataaataaaagcgggctcttattgggcctatattgggcctgtacttaacataagtcacacgtgtggcagcggatttttggattacacatgttaaaaacttaaaattagggctttgtgtttcgcttcttctcaaaccctagaagatataattgagactggcttgcttagccgcggagaactcagaactcattcgctgcaaac

SEQ ID NO: 11066 - DNA, 3000 bp, Unknown; identical to SEQ ID NO: 11056
  misc_feature (1)..( 3000): cDNA_ID_3038615_gDNA_ID_2214477_Annot_ID_183165 3000 nt of promoter + ATG

SEQ ID NO: 11067 - DNA, 3000 bp, Unknown; identical to SEQ ID NO: 11055
  misc_feature (1)..( 3000): cDNA_ID_2705209_gDNA_ID_2214477_Annot_ID_183161 3000 nt of promoter + ATG

SEQ ID NO: 11068 - DNA, 3000 bp, Unknown; identical to SEQ ID NO: 11053
  misc_feature (1)..( 3000): cDNA_ID_1808399_gDNA_ID_2214477_Annot_ID_183160 3000 nt of promoter + ATG

SEQ ID NO: 11069 - DNA, 3000 bp, Unknown; identical to SEQ ID NO: 11062
  misc_feature (1)..( 3000): cDNA_ID_2705178_gDNA_ID_2214477_Annot_ID_133153 3000 nt of promoter + ATG

SEQ ID NO: 11070 - DNA, 3000 bp, Unknown
  misc_feature (1)..( 3000): cDNA_ID_2714595_gDNA_ID_2214478_Annot_ID_133154 3000 nt of promoter + ATG
ctctctgataaaaaaaaaagaatgatccagctaaacctatctcaggcagctgtcaaaatgtcttcaattcaacattcttacctcaaaacgttgatggaagatgtcgattgccttttgaacattgcgtgtaattagccccctcctataaagtaaaatacaaaatgtaacaacagtcaagttatctgaacaagaaaacaaaaaatcatagacagaagtatctgaaaaccacagactttatctttttggaatcaaggaagccacatagttcagcagtacctgccacataaatgatcacatatcagaagagaattaaacctctaaacgccaaagaaacacagtactccttctagattttcaactgctaaatcatcttatagaactcaacagcataaagtcaatgaccagtaaaggaatgatctcaaatcgtgatgtggggctctaagacaaaagtcaaacctccgttagaccataaagtcttcacttttaacaaatgttcattttatctttcagccttgaatttgcaatcttttctcatctttaactctacgaaattctcaatctttaacccattttacgatagattatcagacgaaaacccaaatccttaacacttcctcagcgcaaacacaaaatcaaaaataaaaaaataaagcagatgaatccgtaccaggcatgatttgaagcttatctattccttgtttctcataatcagcaatgatttcatacgccttctgctgtttatcaggactccacgactcaatatgatgcagaatatcaatcccactagggctctctgctttgattcgcttgtaagcatcttcaccaagaacagctctatacattgcggcgaaatcgatgaccggaacagtcagggttccgtccatatcgaatacaacacctctcaggcgagttttagcgttcgtcgttaaattcgccatggaaatcgaacaagaaggtctgagagtgagagaaataaatgttcttgataagaggaaagtcatggaaaagaaatggtgatgctcaaactgaaattgaggctcataattattctctatttttaaccaatttcggttcggtttaatttgaacaacttggtttgttttggtttagtggtttttcacttgagcatgtttgtgtatgtgcttaagaatggaaacaaagacaccaacaatctcaacaataatggttctgctgccttttctcttcttactctcttcctcttcggtaacggtttcttcttcggttcgcttgttggccgttcgggaatggtggtaccaagcccgtctaactcgtcccacccaccaaacttagaagccattccagctgaactacggttaactccacggccattgacattgtttctaacggttgatgggttgtatcgaatcctgctactacttctctccacttcttcttcttcttcctctatcccgaattgatttgctattgatgtacctctgcgtttatcccaaccaatcaacttctggaacgcataaaataacaatgatggcccgattgctacggctagtgacacgaggaaagctttgggtccggtgctgaagaaaagcgataagatgatgaatgggaggagatatccatacgatttgaatgcctacaaagtgaacataaaccaaacacaataaagatcccacaccaacaataagagagcaaaatctggtgtatgcaaataaaatgcagctatatatcaacaaagccgtttctcttatctttgagcagaaagacactatctagttagaaatcaaaactagttcagattcactacacaacgatattaactgtttcttacatgatcaccataaccattaccaaagaacaattttgatactttaatcaatcagcattttcaattagcagtagtagattcccggctaatttcataattaaggcttaaaagatgcatgattgaaactaattacctttaaaatccaaacattatctacaatttcctctaagatcttccacaggtcaaaattagcactaccaattccaccaccaccatcatcttcatcatcatcgtcttcaacattatcttcaaaaagttcttcccatagctcccgccgcttccttcccctttttcccctttccgtcaaacggtatcccctaccgtcatcagcggcggcgcatattttatagctgaatctccggcggttcagctgaattatcttcgccgaagttactctagagcatgaggaagagaaacagaggagttgagaacgagagggaggataagatctagggttgtggaatcgccagacatggaggtttgagaaactaagataagtagaagctcgcggtaacgaaagagctcctctatccgccattaacgtctggcgaagcgagaacagtgaagaaaatgctctgctccatgtatagacacactcaacttgcgccacgttgtcatcatctcctccattagaatcgaatactataaaccggcttggtccaggagaaatgttagaactgaaatccggtataattgcaggggtaatttcgagatcatcaaatgtctgacctgacacgcctacgtggattctcttttctcttcctttttccagaaacgagggagagagagacgaagcatcaaacaaggcaaaaacaaaaaaaaaccaggagagaatattccgagggaaaacgcgagaaaatttcttacgttctgcgagaatctccagctttcctggggaaatattggaaggcaaaagccgaagggtttaaggtctctgtaatcgtcggagaaatttgaaatatcgtccgtaaaacgtgaatgtagtcttaatcttccgcatttataacgtcgatcagagattttgaagctagtagagagagagaagcgttttgtgtttgatttatggtgtttggatccatggtgtggaaacaccagctgattgggttctcagggattttttctaatgtttctcccgttggaaatctttattcgggatcatttctaggaaaatcagaccagatttggccgtgataatg

SEQ ID NO: 11071 - DNA, 3000 bp, Unknown
  misc_feature (1)..( 3000): cDNA_ID_2705308_gDNA_ID_2214478_Annot_ID_133155 3000 nt of promoter + ATG
ttcaaaactttatatcccaggattgataataagcccttaagaaagaagccgttattgtaaacctaccaatcaaacaatttagaatagacaatcttggcaagagcatctctgcttagtgctgcactaccgggatcaagaggctttgtaatgctttcaccacgagtcaccatcaccctattgcacaaggagttctctagagctttctcatcacacctacccaaaaaagagcaatcagggttctacctcccattgacaagaaacctgtaatccgagaacacataatagtgaagcatatacatgaaaagttttgcagcaacttttagatggaaccgggatttatcgtccttgggttctgcaccatctgattcttcgctctttgcaaactcaatgtttcctagatgaaggatagcagcaactacccgaaagattgcatcctacaaaagtaaaatgtaagaagagttatcctcattgctgatcatgtcaatgaaaaaacaaaaggtacctgttcttcaggactaattccaacaacgtccatagctttcctcgtagctaggtattctttggaatcatcaattgcatccaatgcatggcaattcgattgatttaggtagtgaaatgtgcttggtttccctaactgataccgctcagtttcctgaaatttcagaacagaagctagttttcagtatgaatcccatatatggccaagcactggacatacagagccttcatatgttcgacctgatgtaaacatacaagggaccatgtttacctgttctggcgcagcgcaaagcatgtaaaagcaatgatagtttctttcaggatcagaaacttgacaaactcgtgacctctccagcaaatatgttctaatagcagctcctgagattcttcccatatgattgaactgaatctccacaaatttaccaaaacgactgcaatatgagatttgcctacatatgtcaaggttgacttcaagaacatacataaacttgaaaaatcaagaaatgtgaatgacattccaccttgaattattgtttctgacggtttttgcattaccaaaagcttctaaaactggatttgactgcataacaggatcataatacgagaagaataagaagatatctacagagagaaactcagtgagtctgtctctagtaagaatgtagatgcattgtaaacagactatctacctccaaaacttgctgttcgacagatcgtccttcactctcagcttttccacccatgtatgcaagatattgcatgagcatttttgtgctctctgtcttcccagcaccgctttctccactcaccaagatcgcctggcttactccctcgttgatcatttttctaaatttatattcttgatgatggtgaggcccaaaaaaaaatgatagtgcaacattagttaaagtttcatctatgcaacaaaagattacctgtatgcagaatcagcaacagcaaaaggatgtgggcttaactcgccaaaatctgtgcccttatattgctccattatctcatttccatataggtggggtaatcttttaaagggattcacagctatcagtatattccctgtgtatgtctgtaaccatcaagaagaaattagcttgctacaaacacttcagagaaatattaatgatattgctataactgtgcagtaattttcagcaaaacaatggtagagataatcatagaattcataagtgggtgtaatgaaagaaggaaaactgacaagagttacatgctgaagcgtacatatatttcatttgcattgtatctggcttttagattgagaagaacccctggttcatgcaaatacgcaagctttgtcatgtcgtccacaccaagctcaggaaactcaggatccttggggtggacagcattaacctttgccacaacctacaaacaaatgcatcacaaatatgagcaatgtattcttaaggtaccttaagaactaacacattgtctcgttgctttggagaaaagggactaaccgtcttggtttggcaattaactttgatctcttgaccgttagcttccacaacttctccatctagccaggcttcatctggatcttccacccagacctgtgaccccacagttaccttcactgaagcctgattaaagtagaatatattagaaacaaataaaaaaaatattgtcaagcttcattagctggttcttttgttctcttttagacacatcttataatgaaatctaaaatgtaaggggcaacataaaaatcagctcaaatagcaattatggttacagaagataaaaaaaaaaaggtaaaaatgaagaacacggagaaatcgcaatgcagataagagaagagagactcgtaccattatcacggccaaatctggtctgattttcctagaaatgatcccgaataaagatttccaacgggagaaacattagaaaaaatccctgagaacccaatcagctggtgtttccacaccatggatccaaacaccataaatcaaacacaaaacgcttctctctctctactagcttcaaaatctctgatcgacgttataaatgcggaagattaagactacattcacgttttacggacgatatttcaaatttctccgacgattacagagaccttaaacccttcggcttttgccttccaatatttccccaggaaagctggagattctcgcagaacgtaagaaattttctcgcgttttccctcggaatattctctcctggtttttttttgtttttgccttgtttgatgcttcgtctctctctccctcgtttctggaaaaaggaagagaaaagagaatccacgtaggcgtgtcaggtcagacatttgatgatctcgaaattacccctgcaattataccggatttcagttctaacatttctcctggaccaagccggtttatagtattcgattctaatggaggagatgatgacaacgtggcgcaagttgagtgtgtctatacatggagcagagcattttcttcactgttctcgcttcgccagacgtta

SEQ ID NO: 11072 - DNA, 3000 bp, Unknown
  misc_feature (1)..( 3000): cDNA_ID_1582654_gDNA_ID_2214478_Annot_ID_133161 3000 nt of promoter + ATG
aagtaatatgttttgttttttcttacaattctgatatactatctgactgatgtagacaatgttttgagataagttgatttatataagaatgcaataaatttccatttttaacagtcgtatatctaaatttttgtgtataacttccttaattatgtcttcggattttttttaaaaaactcgttgatatatactaacggaagcaataaattctttaattgctaaagattaataaagttgtaaccttttttttgggtctttttctttaaagatcgttatgaaatgggtatggaccatgctagtatgctactaattcaaaatagtacattggctatctaaagttggactgtgtgaaatagtttattctacaatttaagacctttttcaggtaaggagaaatcacatattagaactaagataatcttaaatgtcttcgagtgatcatttactttgttatacaaagacaatttccttttaatatctactgtaaaacatattaatatatcgacaatattgtttagtctcaaagtctttatgttatggtcctaataaaaacactaatttttctacatattgattttagtctagcatgtagtatttttatcactttctaaaaatcatgactagtccttaatcttactttacagaatacaatcctcttgcaaactaatactctcattatatatcttttcttagaatagttatatgttactgttgggatgtttataatataagatcaatcaaatcaaacaaatatgtatatttatttatatacatctacaagcgtgaaaattcatttggaatgtcacatatgttacaattttggaacgtttatactttatcaatatatatatatattaatatatatttacaagcgtgaagtcatctccatcatttatcttcaaccatttgattacaagttatgtatcatgaatctgcttttgtcttttccttatgattccaaatgatattaaccttcaacttgttgcatgttcacaagagacaaacacaattcacggtatatttgatcaattgtaattcgttacatacataactttaattcattgaaatatacacgaactagatcaattaaaaaattcaggacgttgaaaaagctttacaaaagaaaagaatgtataacttttcctttacacgaatagtaaatgagaaaaactcacatctacaattttcgttatcgtgttaaatagtatacaaatttaaaccactttttgagcatttagacctaagttttattttccggagataagctgttattttgctctgtttacgttttcttttgcatcactactcttatgcatatgtatataagtcctcactttactcattaataaatttcttatttaaactaaaaaatcatataccgaagttactataaaacctacgaattctctctaattcataaacatttgtaaacagcattcattaatactatatgatagataataaataactgttcgtataatctacttatttttcttatttcacctttacagacaaccccacagcccacttgggtatcgactttatagttaaagcaatgttcgtgccttttgtcctataaaggaacgacacaggtagcgcctaagaaaaaaataaaaactaacaagtgagtaaaaatgcaaaataagtagaagggaaaaagaaaaaacgagtataaaaatcacacgcaattctagaacaaacgtagataacgtgaaaaacatagaatcaactatttgatattgactaactgttagtgtacttggaactgtgagaataagtcgctttgaagtctgaagaggttcaggtgtcctgagtttctaaataaataaagagaacaaacttgtacttgttttttggttgtgaaatattactgtatcttaatactgtgaaatttcaacatatttcttgaaactaagtttggtatttctagcaaatccatcaatagagtatgaaattcaatgttctcatttagtcatgattttgatcaaaagagaattttccacacatcaattgcgattgaaaaagttttcaaaggatcatcatagctcacatcaagaaacatgatgatgaataatctcatcaccactatttatttaataattccttataatgaaaaccaattttgttctcactttatttggaacccatcatagtctagtcctccacgaaaaaaagaaaagaaaataaatgagcatatagtgacccaaaactaaacccaaattcaactttttttcaaaactggtacttagctatacgttttcacatatttaacagttgttactatgaacatgatataaagcatagctaaccagataagatcaaacgcaacgaatacaaaataaactctaatatagcaatcatcaaaacgaatacaaattcttgcaaaaatagaaaagaaagtgtgatgcaaaaacaaagctttccacaaatacaaacacataacacaaaaacaacagtttatatatttaatatagtttaataagatatgtttgttttgtttatcatatttttttataaacacaggagaaaacaataaggtaaacgggagcacgacaagtttgataatgtcgggaagaaaagttaaaaagaatttctttgttaataataaaattagggaataaaaaaagggtaaaagagaagaagaaagaatggcattgttgttggtatggccactaccagacatatgggtcctactcttctcatcactctctccaccacctaatcctctctctctttcttcttcctcaattcttgaaactctctttcagatttcaagaaacccttaaaatcctctctctgtctctttctgtttgtttgttttcttgtttccttctctctctctctttctttctttgtcttcctttcccaggttgtttttttttgctctctctgccttcttgactttcaaaagactctttctttcttttggattgattttggattctagggctctctttcttttagtgggtttttgttgttgttgttgtggtctctctgatg

SEQ ID NO: 11073 - DNA, 3000 bp, Unknown
  misc_feature (1)..( 3000): cDNA_ID_2705295_gDNA_ID_2214478_Annot_ID_133163 3000 nt of promoter + ATG
ggaactcttacagtccgttccatgttcttttaattcatatactttttgtgtaactttagttaatgatgctttattcaggtgcgagctgtaactgtgcatcccacaaataaatactttgtctcggcatctcttgatggtacatggtgcttctacgatctgtcctctggctcatgccttgcacaggtccctaaacactttccttaaagaaccaactaatacctgttttcctttctagctttgcctgtatgctatataacagaaatgattatatatatttacaagaaacaattgtgtggattatactttcttcatgagcattttcatatcagctaaaatccgtggttcggtgtatggttagagtacgagctcctttactcatgaaagcctttgtcatattccttgtttttattcaggtatcagatgattcaaagaatgtagattacacggctgctgcttttcatcccgatggtctcattctcggaaccggtacttctcaatctgttgttaagatttgggacgttaaaagtcaggtaaaaactatgggcttccaaactatatgacctattaaaattattaattgtgtacagtgttcttcattatagttttcatttttttggttgataataggcaaatgtggctaagtttgatggacacactggggaagttacagctatatctttctctgaaaatggttacttcctcgcggtgagtactttgaacaaaatacgagaagagagaatacagcttaagttatgcttacatgaatgattttctttttgtcctggaattgacagacagctgcagaggatggtgttaggttgtgggatctgcgcaagttaaggaacttcaaatcatttttatctgcagatgcgaactctggtacacaactatcgtatctgtttctactcattttgttgatagagaactttctatgtattataagctcgctttgattaaacctactttttttttgtgtgcagtggagtttgatcctagcggatcttatctcggtattgctgcatcagatatcaagtgagtacacatttgaaaatagtgatcaaaacatccaaagctcagctaaagaaaatatccaaagagaccaagctagcttgattaatctgcacgttgggttaacacaatttatgtgttttggctgcagagtataccagacggcaagtgtgaaagctgaatggaaccttatcaagacactcccagatctctccggcactggtaaagtcccttacctaactccttcaatgatcacatagcgataatgttgctaatttcgaagcccttacacttgcaggtaaagctacgtgtgtgaagtttggttcagatgcacagtacgttgcagtcggttcgatggaccgtaactacggatatttggtcttcctggtgatgaaaaagccaacgtcgatgatgactctgcgcaagactcgtgaacaatccgtaaaaaactcagacagaacattccaaatgtccatctccagtgttatctcgctcaaatttctcaagttctgttgtatcttacagtatttgcagcaatgggggagaatttcataggtgcgggtcatgagtgagtggtgattgtgatcatcctcgctacctcttggaattcaaacaatgacactcacaaaccctcgagttttcttataggctcttttaatcgctttgtaccttcaatatatgtaccaaaaaatgtgttctttctgttgccaaatgaattcagacactaatgaagatcccaaaccgatggtgctaaaccgcatttggtattatttaatctgttctagacagtggtggtctgcttagtattccgtattccaacaaatgatttcagctggtctctgagaacaaaattttaactaaatgttaaagaatacccttgactgtacttggtcaaaaatcactgggcacaatatttacatttatccacgaatatcagattcgtgattccttttgcaattccaggattagtttaacttcacgcaaaagataatgttttgtaataccctttctttattgtgaccaggattgacaattcgtgttaaggtataaccacgtgtttcctcacaattctaaagaatgcttatgtttctccctgtctatattatttttttaattttgtctgaaaatactaaaataacttgaacaaatcatcgtataaaaactacaaaatacataaactaagcttaaagaaatacctacacgatgaactttttatatagtaattagtaacaactacaaaatacataaccttactagctactgggaaaaaaattgtccagttttagatgatcagagtaaatataatactaattgtcttccattttaattattgtcgaaaacgtgttttcataaagtaactattattgggtttcattactaaattctaaacatcaaatggaattgaaaccaaaagagtagttattctaattttaaaaagttaggtgttgaataaacagtttaagtgaaatctaataatcaaagactgcaatacacacaccaagctcactgtactgtctttagactggtcagtggtggctgaagaaagaaaagagtgtttgattgttatattaaaaaataaagaaaacaaattacgctcccttctctacagactctctctatcctaatcctatttctttttccacatctcctaaagaaagagaaaagagtggtcatccatccatccacagcctcttacaaaatctctctctttcaccattaacaccaaattcagaaaactcagaagaagcaaaataaagagcttttactgatccaccaaacacagaatttcataaactcccaaaaaagttaaattccaaacaagccccacaacaacaacaacaacaaaaaagattttaatctttctcatttacccatatcctcaaaattcccacaaaaatctttcctccaataacataacaaaacaactcttcttctacaacaaactatgttctgattttttagtttcttcttccacacaatacaaaagaaatg

SEQ ID NO: 11074 - DNA, 3000 bp, Unknown
  misc_feature (1)..( 3000): cDNA_ID_2705291_gDNA_ID_2214478_Annot_ID_133164 3000 nt of promoter + ATG
tttgtggaataatattggaatgagtgatgtatgatgaacaagaaaatccatggaagaaattcaaatattgggaggaaaaaacaacaaaaactgaaaaaacaaagaggtaattgaattaaaaacagaacaaaggttcttctgtttggacagagaagaaattcaaattcttatagttttctggaaaaaaagaggttatgggagtttcacgtaacaatcatacatatatatatatacttttggttttatgtgtatgtatatatttgtatatactaaactaatgcatgtgtgtttcagtgtatgtacaaattattttcacataatttttataatatattccagcgtggacttgatgcaaaaatgtgataccctcgattctcctcttcacatgacgtggaaagcccacgtagatataatggtgttgacgtgggtaaaggatctcacgtaggaggaaactatttagaccggtcaatgagtttgacccaattcttgttccgtggattttgacgtttttgactgaaaatcgtcctaaattaagccctatattcgtggaattagtttctatgtttttaatttagatatgcatttttctatcttttatctcgtttgctaattttattgacttggctcatgatttcccgcaaaggagagaaaaagatttcgaccaggtcagtaaagtattagaaaatagaagatatctaaagtaaaatgctactggacaaaatgtctttggacaataagcatattatttgccttaagaaaatatttagggatatcagataaaattcgaaaacaatgtttaaccaacttcgaacattttttttaataaaaaatatgaaaatgatttcatatagaaaaatgctttgattgtgacagtttgagcatagggtcaatgcattgttattcaaaattgagaatatttcactttcgtacacttttgttattctaataaccataaggtccataacagaaaaaaattaatatgagaagatatgtgtgtagagactacaggctacatgctcgagatctcattatcggtacgtaagacacaaacaaaagtacgagtcgtacgtgttatccatcaaactataacttacgagtgtttatttcacatttatagtcttcaaataggtaaacacggattcactttttgtttaagcccacgatttacatttgtacttgtgttgccgataaaaataaaatattattttaatggttttgaaagcgtttttggttactatagtagatcttaagtgttttttgtatttcacttatttcattacatggaaaatatagttctcttctttttatttgttctaatcatgagacatcaacatcgcctttcagtatcttattttggtcacaaaagtctatctaccatttgaaaatcattgtcaagagtctatctagttattctatgtccaaaaatattattacttcactttcaagtcgtctgcacaaactaaattttatatgaggttttttttttgaacacaaaattgtgtatgagcttaaactacactacacacgtgcataatagcgattaagacacatattataaggattatctgggtgtagaagttcagaatttgggattacgagaattgcaataaattgtttacagattaaaatttaacgaaaggaaattaaaataaaagtaaaacagcttaagatcaaagctgatttgatgaattgatacttttgaagatatgaccatcttcatataaagtctgaaatgcaatatatgcatcacgcattatccaaatagaaaacgaccaccactttaatttcaagatataaaaccaatacctaaaatgaagaaaatttatatatgcatgtgcatctgtaatatataatcaaccattaattatctatatataattacgattcaccaatattaattacataatctcaaacgttatacgtacgtattatttagggttgaaaacaaaacaaaatgtcatgcgtatatgaactatacatatgcgtcattagctcgttcttcaatctaggtttaatatgaaaaataattttttcttcataaatatctttttcttggagcattgttttttttttcttttttctttttttcttggagcattgtatttgtatgagagttcgctttcatctttggatcctaagaatataacttttatgcaaatagaaaggacacagctattgtgcttaggatggtaccctcatcgtcctatctttagacattaaaaataaaataccattgattttgaccttaggtatataatttgtatatcgaacccgtggaggtcgcatttgcaacgtgaatccataacgatataccaacagataaaccatatctctaattgtcaatgaaatgtacaaacatatatcccttattctttcatcttagaacatatttttaggatctcttgaacggttgattttgtttgttgtgatcgaggatatgttgttaattgttatttgattgttggtgagtatggagtgttggtgggtaatgggtataagataggcgattaagatgcaaagaacaaacctacctcggtctcattcgatatttgtgctcgttctttagattaaaacatagtcgcaacaacatataacaaaaaaaaatctgtaacaaaacaatgggtttgttttataatctaatgagtaaatgtacatgaatcaaccaaaattactgaatgcccaattttagttcaacatgagttaaaacagattttaaaactaatataaaacgtcgtcaatttcaaattctaatggttggatcgatttaaaagcccaaatataagaaggtgatcgttaaaggcccaattaaattgaatccctaatatatcaagtgagagtgttaatcgtcgtctctctcttcaaccatttcccggcttccgcgtttttgctttgtagcgccggaccggagaagataaaacccttgctccgccccactcacaggaagttctacatcgacctgagttctcgtacttcgtcgtatcactcgttcttcctacgatg

SEQ ID NO: 11075 - DNA, 3000 bp, Unknown
  misc_feature (1)..( 3000): cDNA_ID_2705289_gDNA_ID_2214478_Annot_ID_133165 3000 nt of promoter + ATG
ctagattgaagaacgagctaatgacgcatatgtatagttcatatacgcatgacattttgttttgttttcaaccctaaataatacgtacgtataacgtttgagattatgtaattaatattggtgaatcgtaattatatatagataattaatggttgattatatattacagatgcacatgcatatataaattttcttcattttaggtattggttttatatcttgaaattaaagtggtggtcgttttctatttggataatgcgtgatgcatatattgcatttcagactttatatgaagatggtcatatcttcaaaagtatcaattcatcaaatcagctttgatcttaagctgttttacttttattttaatttcctttcgttaaattttaatctgtaaacaatttattgcaattctcgtaatcccaaattctgaacttctacacccagataatccttataatatgtgtcttaatcgctattatgcacgtgtgtagtgtagtttaagctcatacacaattttgtgttcaaaaaaaaaacctcatataaaatttagtttgtgcagacgacttgaaagtgaagtaataatatttttggacatagaataactagatagactcttgacaatgattttcaaatggtagatagacttttgtgaccaaaataagatactgaaaggcgatgttgatgtctcatgattagaacaaataaaaagaagagaactatattttccatgtaatgaaataagtgaaatacaaaaaacacttaagatctactatagtaaccaaaaacgctttcaaaaccattaaaataatattttatttttatcggcaacacaagtacaaatgtaaatcgtgggcttaaacaaaaagtgaatccgtgtttacctatttgaagactataaatgtgaaataaacactcgtaagttatagtttgatggataacacgtacgactcgtacttttgtttgtgtcttacgtaccgataatgagatctcgagcatgtagcctgtagtctctacacacatatcttctcatattaatttttttctgttatggaccttatggttattagaataacaaaagtgtacgaaagtgaaatattctcaattttgaataacaatgcattgaccctatgctcaaactgtcacaatcaaagcatttttctatatgaaatcattttcatattttttattaaaaaaaatgttcgaagttggttaaacattgttttcgaattttatctgatatccctaaatattttcttaaggcaaataatatgcttattgtccaaagacattttgtccagtagcattttactttagatatcttctattttctaatactttactgacctggtcgaaatctttttctctcctttgcgggaaatcatgagccaagtcaataaaattagcaaacgagataaaagatagaaaaatgcatatctaaattaaaaacatagaaactaattccacgaatatagggcttaatttaggacgattttcagtcaaaaacgtcaaaatccacggaacaagaattgggtcaaactcattgaccggtctaaatagtttcctcctacgtgagatcctttacccacgtcaacaccattatatctacgtgggctttccacgtcatgtgaagaggagaatcgagggtatcacatttttgcatcaagtccacgctggaatatattataaaaattatgtgaaaataatttgtacatacactgaaacacacatgcattagtttagtatatacaaatatatacatacacataaaaccaaaagtatatatatatatgtatgattgttacgtgaaactcccataacctctttttttccagaaaactataagaatttgaatttcttctctgtccaaacagaagaacctttgttctgtttttaattcaattacctctttgttttttcagtttttgttgttttttcctcccaatatttgaatttcttccatggattttcttgttcatcatacatcactcattccaatattattccacaaatcatccttgaagcctcgttcattaattttcttgctataattcatattttctcgggaattttctttattttcccagaaagttttcgcattaacattggagatatacaaagaacacaaacatgttgcaagacatgatctcgtctcactctcacgatcagctttccatcgtaattctcttctcattattgctttcatttttattcatgcaatgcgtagatgtttttgtctttgaaattttgcttacatgtatagatcatataaactcgagtctaatcttataaactgattaatttttattccgtagtcttttattcggcaactaccctataatttcagctagtttttcttttttggtgtaacgtcattttcttctacttatattccatttgatcttcttataaattgcttcattcttttcgcttttctttctttgttattctctccgcacttcaatttgtccttccatgcgatttttttttgaacaatcattatcataattctcattggcatacgattattacttataaaccaatagaaaatcgtcacatgatatggaacaatattgttctacaaaataactgtaaccataattcactatatctatcgtattttagtatagatttttattctcatcaaacgaaaaatgctagatttaatctctcaccttggattttatgcaaaatctacatattacgtgaatttcactaggagcattgtttgttatcatgatgggtttgtatatgatcatgatcataatgggtttcacacatgttctgatattttatgaagtgccctttactttttctttgtgggaaaaaaatctggatgttggttcataccaggcaattttaaattattttgtcaatacgaaaaggaaataccagaatcagaaaactttccgtttatagaaactccactcttctttactttatctttttagctattggaagtaattggaacacttcttcttaacatgtcacataaaagaacag

SEQ ID NO: 11076 - DNA, 3000 bp, Unknown
  misc_feature (1)..( 3000): cDNA_ID_2705285_gDNA_ID_2214478_Annot_ID_133166 3000 nt of promoter + ATG
cgataaatacagttttataatcttacggtcgaataaatgcaaagtgatttctttttttcttttttgacagcgcaaagtgatttcattgtttggttccttaatttatcgtataatcgaagtgttcagagcaaacaaaacttatcctaaaagtccaatgagttaaaaatttcatcatggctataattactcttttgaaaattaaaacatccgatcttgatctatatagatgatagacttacacaacttgatcacgacacaagtcttatcaacttcgagtctattttataacttattttccagaacatctacacgtgtgtcaaaaatcaaaaatatcgatagatatgattttcgaccagacacactaacgaactataaaatccaagaaataagactaaatcacatgcatgaagaaacatgtattctggttgatgcttcacatttcctttttaaaaaggttaatgagattagtgcaaacaaatggaccggatttggtggaggagaatcttagagtatacaaaccagagcatcaattttataatacgtacggtaggtcgactgaatttacacgtatatttaaagtcatatagatatatatttacaaacatataatcttctagatgaataattgaactgacatttacgatcttcaagaagaataatacacatatgtagtggaactaaatttcactatactattttatcgaaatttacgtatttgaattttgaaatttaaataaaaatgtaagtgaaggtgcaaccaaatggtcgagtcaaccatgtgccacaagctcacggtccggaatgagacaaaacagttttgtaattttgttgggttggtccatatattctcaatattcgtagataaaatatcaatatatgttctaaagcctccaaatgtcaaatattttaatcatgtataaaaaaggcaaaatatgtattgtagggtttgttttaaaactttcaaacaatatataggtttaatttaacctttgccattattgtatacggagctacctactttggaagtcgaccgttttctaacaaatcactcaatatctatctaattaaaaacctaccatttttataacacaatcatacaatttaaaaacctcttattttctggttgaatgtttatattagtcaagtcagtattgcatgtttagtacaaatttgttaaaatttaacaacaatcaaattgcaaaactaactagagaatttagaaactttgttgaaactcgtataataaatacatgcttgaaatttaagaaatttcttcttttgatgtgtaactaaatcttattacaattaatactacttttgtctttttttcttattcgtatcttttttttttccttaaataatggcctaactcgatccggtcttggtaaacatcatggacacttgtataaatttcaatatcaaaattggtcatccaaaattttctaatgatcgggctaatttcgttagcaaaagagttatatactaatcaactacatataagaacgtccaaatcaaaacctaagcacatgaatttgaatcgatccactacatcatccatacaattaacataaaaaagttctaaaaaatcaataattgaaaaaagaagatctaatgaaaaaaaaaactttaatgaaaataaaataaattaataaagaataaagaaagaaaatagtgaaaatagaaaaagtaaatagtagaagaaaatgggggagttaataatgtgggcactagtctctgaaacagtaacttctactactaaaaactcctgctttttcgccaacaagtagccatcactaccttccttttgattccctctctctctctcgatcgtgcccaccagctcactcaccctcctaaatccacactttaaactaaaaaaccctaaatctcgagccttgacacaagagagaaaaaagaaacacacaacacaaagaagtgggtccgcatttgtaagaatcaccattccttagtagtggccatagtcaagtgtcaccacacacacaccaaaaataaagacgttccttttttctcttcgtctccattggtacttacttactagtcagacattaacgtgcctttgtgaaaaaccaacccatctctttccctctctctagaaacccagagaagaaaactcttgcttccaagcttttcccactcataattgcttattagaaggagaaattttgcttcttttcctctgcttcctcttaacatagaagaaattggagacacggaaggaagaagatcgcaacaatccagaattggtggaggagattgcttcgatctaatcacttcttcttccatcctccaggtatagattggtttttaaaaatctgttcttggagttattactagtaactagcttgtgggttcctttttactagattggctttggtacatgaagtgattcagatagagaattttagtttctaggtcactcctgagtaaaattcctacctttctactttttctctgttagcttgagttaggtgcttattcttcaaatgtttctttcgagcttggaaacttcatcaaagttttagctttttctgtgattcaattaatggctacatctaaaaattcaagcttttctttgattgtcaatattgtgtagggttcttcgtttttagctttttgttgcttttaggtaagagattaggtcatatttaaagaccttgacttttccgcaaattagttttgttagcattaagagtctcaaattcagcttctatttgaaacagtagatttctgtatagtacattttgggattctgcacaattttgatttttgacaatattacaaaatacaaaggttgttgaagatgtcttgtgtccaaaatagttaaaatcttgttcacttttgacttaatatgctcacttgttctgttcatgtttgtctttcagattacttggaacttggaagtggtctttcttcaatctgtataagaagatgggaagttgaaatttgctcggctttgatttgagtatagcgagcggaacg

SEQ ID NO: 11077 - DNA, 3000 bp, Unknown
  misc_feature (1)..( 3000): cDNA_ID_1808535_gDNA_ID_2214478_Annot_ID_183228 3000 nt of promoter + ATG
aagatgcacgtgcttttgcagctgctttagatgcttcttttgagtcaagttttgccagcttccatggattgatccttacttgttgacgctgaggtggcttcttctgtgaaagtgagtcgggatctattgtggatcgtacaggtccaggctccaaatgctggataacatcgtcctggcaaaacaaaatttattatacaactgaagaaagcggaaaacagaagagatttggtgtttttacctgttggtccacgaatatgtttgggggtgtacacaaggaggcaccacggtattgaatgctcaatccgagagagcttctagcactcgtggctgtcacagctgagcttgcaggtgaaggatactggcttgtttggtctagctcatctacagatgttccaagtggttcagtttgcgctctcagggcaacaacatattcatatgttgtgattccctacagccacaaaagtgacatatcaacgctcagctttgtgtttccttatgtgtttgtcagtggagcgtagaattcaaaaaatggtgcaagaaaaagtatatacaaaacctttcggatcaaaatcatatggaaaaagaaaagttccccaagaggtatcaaagccagtaacgagagagttgtacaaacaacctgcagaatgagaaagcaagctcaagtcggaaactaagcattgatagaaaacagaataaaccagtattttctttgagaatacttaccacaacagcggcaaatggaggacgggagaacccaagcccaagcttttcagttataagatgttccatcgccttttggtccacgaaacatcgaacaaatacagtaacaccaactccaaattcagctataagctgacaccatatttgcaaagtcatatcatatggatatgttaaaatattatcagatgagataaagcgtaggcagaaacaaccttaaaataacaaactgtgttggaaacatacccaaaagaagcttgctgccataagacacacaaagctgatgtagtttttctgccccacacagttattcagccactaaggcaaaaagaaacttaacatatcagtttaaattgctaagtcagaaacccaacaaaaacaataaaattttcaagttgcttacccggcaatggtgatcaaacccatctacacacttgccacaacttcgacagtgcttgctaaacatacgtaccttcaagaaaagaatgtgctgttacagtacaagatgcaatgagaagcttctaaccagaaggtaaaaatgtactatacctcagcattgcacaatgagcagaacaaagcttcttcttgttcgtttgattgctcttgttgggtatctctacggcaatcttgtattactaaacaaccacaaatgaatcttcctatagcactacagcaacctgagccgtgtctaatatatggcccaccatcaattgctgaagcattctctgcaacagagacatcactataagaaagaagtatccgatttatgtaagccttatacacaacatcatcgggtagagaacgtaccaggaacatagttactgttctgtgacttatgagctggagtgttatcagccttcacaaagattccaggatctgcaggatctataccagtgcatcggatgtaaagaactaaaaccgaaaacgcctgtaaaatcattatgcaaactctatgaataaattgccatagtgatgagagatgtgagataaagaacaagtttaatgcaactgagagcttagtgtaacaatgtttcgttttaggtcttaccaggaaagagtaaacaccaatggcaatatattcatagagtttgtttccaagaaatggagcaaagaaggcatagtaagcgacagttagcaagaaaaatacagttatggcaacaacctgcacagcaacatgagcaacagaccatgttagataaccatatacataaacttaaatgtgtgttttatccacaaacacataaagcagaggaaaaagaaaagattttgaaaactatgtgaatactatatcacaacaaagtaaactaccagatacgaacaaaacatttgatgtcattttcaaaaggattagaaaaaggaacaaacttgtcacaatagcagattacgacaggaatttcccaaatcgttaaaaccaaagtcaaagacagaacccaatcaatactctcagtgaagtattgtaaggaaaaaaacctgaaatgtgtgagctggaagttgccatccatgtcttctcgccattgcaatgaagaaacccacaacccctaattaatttatctcgggaaaccagataaaccctagattactagaggaaatatcctaaacctaaaaaccttgaactcgttaaaaaattgaagatcaatagattttcgaaattctttttttccccctaaactcagctcctacactaacatcatgagcttgaccgagtgtatagcacttgattaagtcgactagtgaggaaaatttcaggacttaaaaggttcatctgcttgaattttatcaatcagagagtgtctctcggggacgaagtcacaggcagttagagatataaatgaagaacattaaggactggtttagacttacacaagaattttctttttatttctgaaattcacaaaaattcgatttgttaatatatttatttttaatttaacagttttctaatattaaatttgttaataaatttttaattcaatagttttactcttgttcaaattatctcaatcaaacattaaatgttaatgtcaaatagaaacatatttctccctattgttttttctatctttataaatgagattatatagtataattagcaaattacaggatgtttgtccataatggggagaaaacaaataaaagtataaaaaacaattcctgatcaaattagttaagttaaagtgtatacgtggcaaaccattatagctagctgggtttggaagaagtcagagacgccgtgtcgtttctcatctcgccggtcaacttttgagagagagaagaagaaaaatg

SEQ ID NO: 11078 - DNA, 3000 bp, Unknown
  misc_feature (1)..( 3000): cDNA_ID_3034366_gDNA_ID_2214478_Annot_ID_183227 3000 nt of promoter + ATG
tcatcaattaatcagccaaaacaataagaatttcttttggaaaatctttcaaaaacatgcattgaaaatataaaacgataactaatttaatacaaaatttaatttctaaaacataactaatttagaaaggagtgagtgatatttaaaaaaaataaagaaaaaacgaaaatgttttttttgtgggacaagttaaaagtggtagaacatcaatttattagaaacaaagagagtgtatttttctttcttccccatcgggaaaccaaacccaatttatttatatattaaactcgtacaatataaaatcttttatatttaactaaaaattcagtaaatatccattcttcgtaaatatttaaactctattttttctttttaaaaagatcaatttacatcttaaattcaaaatataaaccataatatattatgtacatattaatactgcattctaaacaatttcccaatataaaaaataaaaatatatagaggtaaataacttatcataactactttattgatggcctttataattagtttctgctttggtagaattttttagttcagcctttatctcgttatctgcatgtctctaattgagctttgttgctaagttttagcttttttttttcttatgcgatcactttgctggttgttgtgttggttggttcggttccttgtacctttgatgtatcctctatttctctttttatctaggttaagcttttttattaatgaaatattaagtttgattggaaaaaagaggcacattaatagaaagttagctttgttgtttaggttttatttaatatatgtacgtgtgtcatatgtcataggtaacaatcttactatttgattattaagccggtttttgcgtgacggaactcttcttgtatttgccatcaagtgaaagaaagaggaacatctttgccatagtttagtttgcactctctattggtagcttgagttttcagctattcgaatgtggccttctacacctgcttcccttctatttgacatacttatcatgtggtaagctaacccatccgtcaacgaggaagtacaccacatatagtaagtatatatattagactatctagatattttgttaaagattttatgtaaataacttataaaatatattgttattgttttccaaaacaaataaactagttgacacatacttcttaagttcattgttaatttatataatacaacaacctaaacccatggtgatgattacctttagatcactaaaacttttatcaaaaattttgcctaattttcagtagattccatcagagaaacagcttttctacaaaaaaatttcaccaccaaatctcttttctttaaaacttatcaccacaaacacttgtttttctactaacttttttttaatattgtaaaatcttacaatattttaaaagttaaattttgcttatttcacgtcaatttatatgtctcttacaaaaataacaatatttctgcatcaacaatattttcgagtcattaatatatatgttttacaatattgtaaaagctaatgttttttaataaatcttaaattcattgtcaatatacaacaacttggacccctagagatgattacctttagatcaccaacacttttatcaaaatgttttcctaatttttagtagattccatcacggaaactgttattctgccaaaaacaattttacaccaaatctcctttctttaacatttatcactaagactttttcactaacttttctttcaatattatgaaaattaaataataaattttacaatattttaaaagttaatttttgcttattttccacgtcaataatatatgtctctttaaaaaacaacaatacttagcttaaaaagtattatatttctagatcaacaatatttccgggtcattaatatctatattttacaatattgtaaagctaaaaaaaaaaaaatctatcttgcgtgtcaataataaatgtctcttactaagaaaatatcaagattttgtctaattactaattagaaaggaagcactaatttttggggtgaaaaaatatgatttctggacaattagataaaaaacaaaaaaataattggactaaataaaaataaaagataaaagtgaaaatatttaaaaaaattggggataataatccaaataaaaagatttggtcactgggacagattccgcactatatatatattcttgtctaaagaaaataaaaaaccctaaaaaaaagaggcagacagagagatctcctctttgtctttttactttatctcctgaagtttcgcctcagtcatctcgtaagttttctctctctttctcattcaattcaatttttaatgtaatttcttgtttgatttttctattttcttcgagaaaacaaaattctcctgtaaaatttaatattataaaagtggtttctttttcatttatgtttatataattttcatctttaatcttaaattctggtaaccttaatgcgcgatccgcttttctaaagttttgtgagagagaagagatctaaaaaaatccacaattttgttcaaatcttggagttaaatgctgaattttaggccttgttgcttagatttatggcttaaagtttcaaacttttcattggatatggtacaaatcttgtagttaaacactgaattgtgtccctcgtgggcgttgttgctttgatttatggccaaaagtttcaaacttggatatggtacaatcttgtagttatacactgcattgtctctcttgggtgttgttgttgctttgatttatggcttaaagtttcaaactttttcttggagatggttcaatcttgttgttgaaagttgaaacactgaattgtctctcttgtgcgtgttgttgcttagatttatggctaaaagtttcaaactttcttcacttcagagcttcttgaatggaaactatggttttgtggttttggttaatcttctgctaacactttttgccctgttttggtttgggaaagtgagaagaaa

SEQ ID NO: 11079 - DNA, 3000 bp, Unknown
  misc_feature (1)..( 3000): cDNA_ID_3034370_gDNA_ID_2214478_Annot_ID_183226 3000 nt of promoter + ATG
acaaacaacacatctctctgcttagttttgtacactcaaaaccatccttgacaattttttgagcgaaaaccttttgtcttgagaacagactaattgctgtcagctcattactgatttcattcaataagcaatgacacttacctttagatcagtgttttgaagtttctttaagacctaactttgatccaacctctacttatccaatgttagatacattgatgcggaagatagagtgaaggtgagttcagagaaattgcagaagttgggttggacttaccggccgttggaggaaacacttgtggattctgttgagagctaccggaaagctaagcttgtggactgaaaacttggaaagaagagcaaaatagtgttttagcttcatatgttatagttatagtgttccattctgcacacacacacacactctctcatcgtttactcaataataagagttgtgcattcaccatggatttctgagtttttgttattttctttttagatatcattacttttattaccaatctacaattttctttccataatattttacaatatctctctattgtatatgttgttccaatttctaccgaaatcttactttcaaaggataaaacacacaaacttttatctcaattggtacgtcttgtttctgtataaatttgttaatcattgtagaaaataacataacaaatgtggatttaagctgaacataaatattaatgctttttccgatgaataaaattagtcgaacaaaagttgagatatggagctgaagcagagatggtcaaagtcaaacaaatagctaccatttgcacaaggaagaatcttcttctcatttgggtgatcaaaaatggcggttgtgcagaaaggaaaggtttgtgtaaccggtgccggaggttttttgggttcttgggtcgtcaatcatctcctctctagggattacttcgtccacggcactgtcagagaccctggtactactctcctcaccttttatctctccctctgtaaattgtcaacctttattctctcgcatttctagttcatcgaatttttgtagctcagcctggtcaaaattgattctttcgtctactttctaaggttttctattcccaattctttttgtagctccgatgtttctgtctacagacagaagattaagccttttgagtttgtctattgttctgatgaagagtttcgcatggttcttgttataggtaatgaaaagtatgctcatttgaagaagcttgataaagctggtgacaaactcaagctcttcaaggctgatttgctcaactacggctctcttcaatctgctattgctggctgcagcggcgtcttccatgtcgcttgccctgttccatctgcttcagtccctaatcctgaggtgaggatttcatttttacaatctcattggtggctatatgcattgtctcactatggtttcactggttttgcaggtagatttgatcgcacctgcagtggatggtacgctgaatgtgcttaaggcatgcgttgaagcaaaagttaagcgtgttgtgtatgtttcctctgtatctgcagttgctatgaaccctatgtggtcaaagagtcaagtgttagatgagaccgcttggtctgaccaagattattgcaaaaaaactgaggttaataatgcatcttgaatccctcatctcacttttttttcttcttttaaatctgactttcgtccctctggcagaattggtattctttgtcaaagacacgagcagaaagtgaagctttcgaatttgcaaaacgaaccggacttgatctcgtcagtgtttgccctacccttgtcttgggacctgtattgcagcagcacacagtaaatgctagtagccttgttcttctcaagcttcttaaaggtattataaacaagcctctcatttcatctgggattgttagaagcagcaacttggtatatgagttggtattgattttatacttaagtgtggtgcagagggttatgaatcgcgtaataaccaagaacggcatttggtagatgtgcgtgatgtggctcaagctttacttttggtttatgagaaagcagaagctgaaggaaggtacatctgcataggccacacggttagggaacaagaagtcgctgagaagctgaaaagtctttatctaaattacaactacccaaagaggtaagcaaacaacagctgcacatctctctacccaatttgagtgaaaacctttaaaccttaataagctgtttttgttactttcatcagtaaacagtgtcacttacctttacatcaatgtctctgaagtttcttttagaccttacctttgatctaaattctacttatccaatatcagatacatcgaagcggatggaaaagtgaaggtgagttcagagaagttgcagaagttgggttggacttaccggccgttggaggaaacacttgtggattctgttgagagctaccgcaaagctaagcttgtggactgaaaactgggaacgaatagcatatgagtgttttgggtccatgtgttaagtgttcctatctgcacacgctctttcatcttttactcaagaataagagttgtgcaacatattttccatcatgaacttctgagtttttgttactttcttagacaccattacttttatgaccaatctacaattactccttccataactatgttccaatatctctttgatacgttccaatttctacctacttacaaaggataacttcaccattaatacatgaaatcagtaacgcacaacttcaccattcgaattaacctctaagcctagcgtagcagatgcactacatcttggctgaccatgggactaaaaaaacattcgcaatatttaacaactaaagccaggttaatggacctgtattagggcccaaaccaggcccgtttagatatccgactttttttttaactttgcccatctcgatagctagattctcttttccctcttccttctccggcgaagttgcgttagttaaacagagagtc

SEQ ID NO: 11080 - DNA, 3000 bp, Unknown
  misc_feature (1)..( 3000): cDNA_ID_1808370_gDNA_ID_2214478_Annot_ID_183225 3000 nt of promoter + ATG
ccattgattgatgcccaactatacgaactggtctaaggttcttctggatctcttctctgacaattgcttgactttgatgatgattcgatttggaactgaaattgcaagaaaagtaaaagcaggcgatttgattttgattcgcatttgcttggtgaacactgccaaaggctaaaccggtcgccgagacggttaatctgatgtttgggattgacacatcatgcggctgttgtttctccacgtaacatttggagacccgctcaaatatattgtgggccggagaacattgttttaccatatagggcccatagactttgaatatgtgtaggtaaataaaatacaatctgtggaacaaaaatggcaaaaatatttgaagtcagcaggattggttaacaatttgagcacagaaatacatttggtaacatctgagcatatcattcatatcatatcgctgtcgaatttgaaggaaaaaaaaaagactaaggaagtggatatattggtgaatgctgatgatgagaaaacttattattatatacgaaaaatttactaaagacagcaatattccaaaataatgatagggaagattctgagatggtgtgtggtcagtgtggaggcactacagatggtcaaacagtagcatacccacctggctatttggacaaggacaaggaagaagaaaaatcgagaaccatcttctcagccgattttagtaaccatcttcttgtttgctccgaacaatcaagagatcgaaaatggctgatgttcacaaaggaaaggtttgtgtaaccggtgccggagggtttttgggttcgtgggtcgtcgatcttcttctctctaaggattacttcgtccatggcactgtcagagaccctggtactgaatcttctctccttttactctcttcctctgtaaattttccgcctttattcactctgatgtctcgttgacttgtgtgtgcgtgcgaagtagaaagtctgttcccaaagtttgatttttttcttaatctactttctaggtgtttagattcgctagtttctgttctctcgacggataaaagccttagcttttgatttttgtttgttgttcccaaatcattttagtttgcttctcttcttttagtgtagttgttgttgttctgatgaagagtttcgcatggttcttgttatagataatgaaaagtatgctcatttgaagaagctcgagaaagctggtgacaaactcaagctcttcaaggctgatttgttggactacggctctcttcaatctgctattgcaggttgcagcggagtcttccatgtcgcttgcccggttccaccagcttcagtccctaatcctgaggtgaggatttcacttcactcctgtaatctcactggggatatataacatagtctcactctgcttccactggttttgcaggtagaattgatcgcacctgctgtggatggcacgctgaatgtgcttaaggcatgcattgaagcgaatgttaagcgtgttgtgtatgtttcctctgtagctgcggctttcatgaaccctatgtggtcaaagaatcaagtattagatgaggcatgttggtctgaccaggaatactgcaagaaaactgaggttaatgcatcctcaatccctcatctcatctcacttgttatatatcacatcttttttttgctgacttttaaattcctctggcagaattggtattgtctggcaaagacacgagcagagagtgaagcttttgaatttgcaaaacgaaccggacttcatctcgtcagtgtttgccctacccttgttttgggacctatactgcagcagaacacagtaaatgctagtagcctggttcttcttaagcttcttaaaggtatacaacaagccttatcattcacatctgggattgttagaagcagcgtggtatacatgggttggtgaatctcgggttttgattttacttttgtgtggtgcagagggttttgaaacacgtgataaccaagaacgtcatttggtagatgtgcgtgatgtagctcaagctttactcttggtttatgagaaagcagaagctgaaggaagatacatatgtacatcccacacggttaaagaagagattgtggttgagaagctgaagagtttttatccacattacaactacccaaagaagtaagtaaacaaacaacacatctctctgcttagttttgtacactcaaaaccatccttgacaattttttgagcgaaaaccttttgtcttgagaacagactaattgctgtcagctcattactgatttcattcaataagcaatgacacttacctttagatcagtgttttgaagtttctttaagacctaactttgatccaacctctacttatccaatgttagatacattgatgcggaagatagagtgaaggtgagttcagagaaattgcagaagttgggttggacttaccggccgttggaggaaacacttgtggattctgttgagagctaccggaaagctaagcttgtggactgaaaacttggaaagaagagcaaaatagtgttttagcttcatatgttatagttatagtgttccattctgcacacacacacacactctctcatcgtttactcaataataagagttgtgcattcaccatggatttctgagtttttgttattttctttttagatatcattacttttattaccaatctacaattttctttccataatattttacaatatctctctattgtatatgttgttccaatttctaccgaaatcttactttcaaaggataaaacacacaaacttttatctcaattggtacgtcttgtttctgtataaatttgttaatcattgtagaaaataacataacaaatgtggatttaagctgaacataaatattaatgctttttccgatgaataaaattagtcgaacaaaagttgagatatggagctgaagcagagatggtcaaagtcaaacaaatagctaccatttgcacaaggaagaatcttcttctcatttgggtgatcaaaa

SEQ ID NO: 11081 - DNA, 3000 bp, Unknown
  misc_feature (1)..( 3000): cDNA_ID_1033921_gDNA_ID_2214478_Annot_ID_183224 3000 nt of promoter + ATG
tccgccgtgttgtacggtggttgagaccagaaagtgaggtatgagcggcaagaaggtgggccgttacatgtgaatccgttggttatgttgtcgtagacacggacctcgcaggcgagctggtggttgttgacgtacggttgctgagctttcgccggtgacacggcaaagaagagaaggaggaataaggtgactgagagcgcgtggagtgtacacgcagccatgttttgtggtgttctgatctgaagagggattctcgtgagctttctcctgatttaaacagagaggacgatgatgaaccaaaggagacggcgaagacttatttagtcaatggaaacgcgtcgtatgtgttgactttttgtgacgtttctcattggtcctaccgtcaaaatgataatatgtgggattagaggagattttggtacgtcttctagaaagttgaccaggtcagtaaatttgttcagtaatagtcttaagctgaatacaaaagtgaactaagtaatactaatcatgctaaatgcccttaagctacgttagctctctcatggacataaagatggtcttggtctcttggatctcatgtgaaagagacacattgtctcagccaatacgtgttgctaccgtttttccttccgggtactcaacccatacccattctcgacgtgataaacaacttaaagatggtcatggactatttctcgtcaatctaaataatcttctctacaattttcaaacttctaagttggcgttgttcctagaaggaaagagattcatttggtttgcggtatgatgctgttggaaactcttaccggcaccacgattttctcatcatcctactatacggaagatttagtttcatcgtttcgatatgaaaactgtataactagattaacctatatcataaccaaactacagttagataaaataatgggccaactattaaagcgatccatgaacatggcttttggatagcaaagtcatgaaaggtttaccaaagaacttgcaacgcattacatatggttccgacggatacaaattcggttagaagactacatcaagtcatcaacaagcacaccaaactgatgaatctaaggacgcaaagcagaacaaaccaaatccatctgaccaactcatagaacatccaagataaggacactaaagcatatagctccaataatgagtcgaggcaataacttcaatactataatccacaacaaaaaacagaggtccattgtcaatcgccatcacatgatataaaactaagttatatcccggggaagtaagctttccattcacgatcgaactaaagaacaagacagacatgcttttctaatatgacacgagaaaatcacccatccttgtggcagagcacaaacataaaccaaccacagaataattgcaaggacctgaaatgatgcaagtcgatgcatctcaccaatttaaagggtaaaaaaatttcgaatccgacgtatataagtttacagcatcggtgttccaaactggcaaacttcaaaaaaaaagttactaaccatgaaaccaattggtgccaaattgaacagagtaaaaggaaatgatagaaagtttggagtcaaaacgaagtttcagatccatactcaatctcacaatgcacataaaatccttcagagatggtttggtaacaaaaaaagtttccatcttttattcgttgtaagttacaactatagtgtctatacatgatcattagctataaggaacaaaactgtagaagctaacttacaaccaaatgttcaaacttaacagaaaattcaatcttctgacttatcagttccgttcttgtttccatatatcaaaccagtaacctacaaatagcataagaaaaaaccattgatactctaaacgaagaatccacaaatgaatactaaactactaataaatgttggaaatttacctgagggtcagcgattggtttcctcttctcaacgtattgattagtatcagccattgcaagagctgccctagcctaaatcaaaccagagataactgtggaaatgagactagaggattcaataaaaacacaaacttttttggatgtgcaaaaaaatcaaaattggtacctcttgttcctttttaagatcttgttctggcttaatccagagaaagtaagcaatagttccggcgacgacccaagaagcggcactctgaccacctctaagacctcccatggaattaccgatgaaagatctcacgtttccaattgatcttctccagctgctagccattgattgatgcccaactatacgaactggtctaaggttcttctggatctcttctctgacaattgcttgactttgatgatgattcgatttggaactgaaattgcaagaaaagtaaaagcaggcgatttgattttgattcgcatttgcttggtgaacactgccaaaggctaaaccggtcgccgagacggttaatctgatgtttgggattgacacatcatgcggctgttgtttctccacgtaacatttggagacccgctcaaatatattgtgggccggagaacattgttttaccatatagggcccatagactttgaatatgtgtaggtaaataaaatacaatctgtggaacaaaaatggcaaaaatatttgaagtcagcaggattggttaacaatttgagcacagaaatacatttggtaacatctgagcatatcattcatatcatatcgctgtcgaatttgaaggaaaaaaaaaagactaaggaagtggatatattggtgaatgctgatgatgagaaaacttattattatatacgaaaaatttactaaagacagcaatattccaaaataatgatagggaagattctgagatggtgtgtggtcagtgtggaggcactacagatggtcaaacagtagcatacccacctggctatttggacaaggacaaggaagaagaaaaatcgagaaccatcttctcagccgattttagtaaccatcttcttgtttgctccgaacaatcaagagatcgaaa

SEQ ID NO: 11082 - DNA, 3000 bp, Unknown
  misc_feature (1)..( 3000): cDNA_ID_3034373_gDNA_ID_2214478_Annot_ID_183223 3000 nt of promoter + ATG
agacagaaacatcggagctacaaaaagaattgggaatagaaaaccttagaaagtagacgaaagaatcaattttgaccaggctgagctacaaaaattcgatgaactagaaatgcgagagaataaaggttgacaatttacagagggagagataaaaggtgaggagagtagtaccagggtctctgacagtgccgtggacgaagtaatccctagagaggagatgattgacgacccaagaacccaaaaaacctccggcaccggttacacaaacctttcctttctgcacaaccgccatttttgatcacccaaatgagaagaagattcttccttgtgcaaatggtagctatttgtttgactttgaccatctctgcttcagctccatatctcaacttttgttcgactaattttattcatcggaaaaagcattaatatttatgttcagcttaaatccacatttgttatgttattttctacaatgattaacaaatttatacagaaacaagacgtaccaattgagataaaagtttgtgtgttttatcctttgaaagtaagatttcggtagaaattggaacaacatatacaatagagagatattgtaaaatattatggaaagaaaattgtagattggtaataaaagtaatgatatctaaaaagaaaataacaaaaactcagaaatccatggtgaatgcacaactcttattattgagtaaacgatgagagagtgtgtgtgtgtgtgcagaatggaacactataactataacatatgaagctaaaacactattttgctcttctttccaagttttcagtccacaagcttagctttccggtagctctcaacagaatccacaagtgtttcctccaacggccggtaagtccaacccaacttctgcaatttctctgaactcaccttcactctatcttccgcatcaatgtatctaacattggataagtagaggttggatcaaagttaggtcttaaagaaacttcaaaacactgatctaaaggtaagtgtcattgcttattgaatgaaatcagtaatgagctgacagcaattagtctgttctcaagacaaaaggttttcgctcaaaaaattgtcaaggatggttttgagtgtacaaaactaagcagagagatgtgttgtttgtttacttacttctttgggtagttgtaatgtggataaaaactcttcagcttctcaaccacaatctcttctttaaccgtgtgggatgtacatatgtatcttccttcagcttctgctttctcataaaccaagagtaaagcttgagctacatcacgcacatctaccaaatgacgttcttggttatcacgtgtttcaaaaccctctgcaccacacaaaagtaaaatcaaaacccgagattcaccaacccatgtataccacgctgcttctaacaatcccagatgtgaatgataaggcttgttgtatacctttaagaagcttaagaagaaccaggctactagcatttactgtgttctgctgcagtataggtcccaaaacaagggtagggcaaacactgacgagatgaagtccggttcgttttgcaaattcaaaagcttcactctctgctcgtgtctttgccagacaataccaattctgccagaggaatttaaaagtcagcaaaaaaaagatgtgatatataacaagtgagatgagatgagggattgaggatgcattaacctcagttttcttgcagtattcctggtcagaccaacatgcctcatctaatacttgattctttgaccacatagggttcatgaaagccgcagctacagaggaaacatacacaacacgcttaacattcgcttcaatgcatgccttaagcacattcagcgtgccatccacagcaggtgcgatcaattctacctgcaaaaccagtggaagcagagtgagactatgttatatatccccagtgagattacaggagtgaagtgaaatcctcacctcaggattagggactgaagctggtggaaccgggcaagcgacatggaagactccgctgcaacctgcaatagcagattgaagagagccgtagtccaacaaatcagccttgaagagcttgagtttgtcaccagctttctcgagcttcttcaaatgagcatacttttcattatctataacaagaaccatgcgaaactcttcatcagaacaacaacaactacactaaaagaagagaagcaaactaaaatgatttgggaacaacaaacaaaaatcaaaagctaaggcttttatccgtcgagagaacagaaactagcgaatctaaacacctagaaagtagattaagaaaaaaatcaaactttgggaacagactttctacttcgcacgcacacacaagtcaacgagacatcagagtgaataaaggcggaaaatttacagaggaagagagtaaaaggagagaagattcagtaccagggtctctgacagtgccatggacgaagtaatccttagagagaagaagatcgacgacccacgaacccaaaaaccctccggcaccggttacacaaacctttcctttgtgaacatcagccattttcgatctcttgattgttcggagcaaacaagaagatggttactaaaatcggctgagaagatggttctcgatttttcttcttccttgtccttgtccaaatagccaggtgggtatgctactgtttgaccatctgtagtgcctccacactgaccacacaccatctcagaatcttccctatcattattttggaatattgctgtctttagtaaatttttcgtatataataataagttttctcatcatcagcattcaccaatatatccacttccttagtcttttttttttccttcaaattcgacagcgatatgatatgaatgatatgctcagatgttaccaaatgtatttctgtgctcaaattgttaaccaatcctgctgacttcaaatatttttgccatttttgttccacagattgtattttatttacctacacatattcaaagtctatgggccctatatg

SEQ ID NO: 11083 - DNA, 3000 bp, Unknown
  misc_feature (1)..( 3000): cDNA_ID_3034386_gDNA_ID_2214478_Annot_ID_183218 3000 nt of promoter + ATG
ggacgaaattaaaataaaatgataacacaagggtcaattttatctacagtcaccaaattaaaaatcagattaagatacattaaaaagtcattatctcacaaaataaatcttttctttgctctttcatttgtagctcctctctctctccggcgctaacgggatgtcctcaccataacgccgttaagtctggaacccgtttgaacggaattatcaaaacgggaaggaatattccgtttgaatggctctggaacagttaggattaggagtgagcgccgttgacggtggagagaacagtagcgcgccgtcaaatgacggtggagatgacggcgttaagacggcgagacttcctcgttggacgagacaagagattctggttctgattcaagggaagagagtggcggagaacagagtccggcgagggagagcggcgggtatggctctcgggtcgggtcaaatggagcctaaatgggcttctgtttcgtcttactgtaaacgtcacggtgtaaatcgtgggccggttcagtgccggaaaagatggagcaatctcgccggagattataagaagattaaagaatgggagtctcagattaaggaagagactgagtcctattgggttatgaggaatgatgttcgtagagagaagaagcttcctggttttttcgataaggaggtttatgatattgttgacggtggtgtgattcctccggcggttccggttctttcgcttggattggctccggcgtcagacgagggattgttgtctgatttagatcggagagaaagtcctgagaagttgaattctactccggtggctaaatcagttactggtaaaattcagatcaaagtttaagtttttattttgtatgttcatcagaatgattccatttcttatgaagttcaatttttttgatgaagatgttatagacaaagagaagcaagaagcttgtgtagcagatcaaggtttgtttatctctctgtgtgtatttgcttgatctattgctctatatgctaatctcaaactagttttagagctctagagtgtgtttctcttgagtcttgactatgtagttatgttgtcatgtagataaatgatgttttcgtattctaaaatgcatctcaaattgtgttataaaagtagtttaacaatcttccctatggtgtgtgatcttttcgtttatgttgaagggtctctatgttcttgtttttatactaaaatgttgagtttgaacttgaaggtagagtgaaagagaaacagccagaagcagcaaacgtggaaggtggatcgacatcacaagaagagaggaagcgtaaacggacatcttttggtgaaaaggaagaggaagaagaagaaggagaaacaaagaagatgcagaatcagttgatagagatactagaaagaaacgggcagttgttggcggcacagcttgaggttcagaatttaaacttaaaactagacagagagcaaagaaaagatcacggtgatagcttagtcgctgttctcaataagctcgctgatgctgtggcaaaaatcgcggataagatgtagatttagtaaaagttagttgtatatcactttggccattacttctcattcttcttcttccttttttttcaatcatttatcaccattgttgattgaatattgatgccaccacaagaggttattatacacatcttatataaacattgagatttatacgggtttaggatatcatttgccttagtgttaccttttgactgatttgaacatcttgatgtgttgatgatttgttgcatagcatgaaattgagttttcatctttcttgcttcccctaacaacaggattaataacataatattaaatggtatacgtagtcatatgacccttgaacatatacaaatagttactcaattggttagaaaatgactttggtatatgcagattgaagatctgccactttatgttgtttggtaatctgatagctactttgaaaacaatttctgtattttaacttcttcttttataatctatagaaattaaattgaaaccgtatctaactcgaaccaatttttttgtctggattgtagtgcaacatgaactatatttaacatattatcgtgagcttgaatttgaaaccaaaagttgtactaataccaaaactcagtgatgcaaaatatcaaataagttcccatattactttggattatctttcacaaaatagttgttatgcacataattccagtccaaatttgtttttttcgtcagttataataaaaagacaagcaacagtttcataaaagccgcacgacatatttgaccactgaaatttatgtacgaacttcgacttccatagaggtaagttaactgacaaacttttcgagtcaaaaactttggatcatcagacacaaaactagtaaagaaaattcacagagatgtctactttcgtcatttaaaatacccctcatctggcgccaatcacacgtcgcgctgacataatttacctcgttcggatcgctgacgtgtacggtctagattaaactccttctctcaactagattctccttcttcttctctctctctcccttcgtctatatttcacattctcttcaagtttcggccttcggagaaaataataagcatctcaaaatttggatctggagaagaaaatttgaaaactctcttgttctctcaaaggtggtggtagatctcgaattgggaattttcgaaattgtgaatctttgaaaaaaaaagagttaaattgacaaaacatttccttaacttgaatctctgttttttgaatcgtttaaattagagaagaaccctaattttttctgttttggagatctcttctctggaccggggactaaagtgggcgattttcgaattcaaggtttttgtttctgaatcgggtttggattcgtttttgagcaaagttttgagatttttacatgcttgtagctcgatctggttgttctagaaccctaattcgaatgggcaacgatgaaaacttgatggtaatg

SEQ ID NO: 11084 - DNA, 3000 bp, Unknown
  misc_feature (1)..( 3000): cDNA_ID_3034390_gDNA_ID_2214478_Annot_ID_183217 3000 nt of promoter + ATG
cgtctaagttattggtaatggatcattattaaccgtaaaaccacaatggactatatactattaagggtaccatcaattggtaaatgactgaatggaatttggcacgtcatttcattctgcaggtactgatgcttttgatgaatatttagaacacacaaaaaaaaaacttttaagaactcagaaattaatcctcaggatctctctatgcttttgcaccatttgggtaatcgattcgattatgtgaagactataataaccaaaaatgctaattttaaaagaccaaaatgattgtatttctagtgaaagtcaaatcttccatataacaaaatcttgcacgcagcctctaccgagttgatgatttggagtttgaaattaatgtaataccttggtttaacaaattcaatatatatagtatatattctattaagggtgaatccttccgagagtatctttgctaaatttatcatgaatatcaaatatatcatagtattatcctattgttagcatatatttgatacactaaagataaagagaaaagggagagacaaaaggtatgaaattggtgataccacataagaagtggttgtgttataggcatgcggctctttaatttaatagtccccaccacatcatacacttttgccccatttctcgaatcttaatcaaacaagctagcttttgctaactatgggagaaggtggtcttgtgaatcatatcacatattgatttctaattatgttaatgaacttttcttccaaagtttagacccttttcaatctgacctaagtctttttgtgtaacttccaaaccaaattagcatggtatattatatacaaacgcacatcaagatggtagtaacacaaaagtgtcgtaggattgaaagacacaactttttggtcttgggattgtttttttgttttgtgtgtgtgtggatcttactgtttagcagggatatccaattaagtacaaataactcaatattaatcacatgttcatagaaaactataattcttttcccctgtctaaagtttacagatttagctgtttcaaaatgtacattattcaataatactatgtacatcattcttaaaacaaagagcaggtccatgataactcaaatttgaatccaataaagttaagatattgaaaagcaccacttggcttaagtaattaaacaaatgcaaagccaagagaccttaaaacctcaaggcagataaagcaacagagagatctgtcgagatgagttagtctgttttacagagaagattaatctttatttatcactcaatggttttaaactgtagtgattcagatagacaaaataaatataaaaaaattgtaacaaatagattttatggaaatagtttggtttacattggattgttctttttcgtttttcggttaccatttgaaccgaatatatttttaacacataagaaccgaaagtgtgaatgtgtgtgcgcatttctccttgtaattcgtgtattaaagaacacaatgtaataattattttgttgctaaaaaaagtgatagtacttaaaacttagttagtaaaggtgtttgccaaaaaaaaaaaagttagttaaggtaaaagggaattgagtatggaaaatggaagatcagagacgagaggtgagaaggtggggatgggccagtaacactcttttagccaacctatggctataaaggcaaaagttgttttcagtttcagaccaaattgaatttgtcttttacccatttctacctctctatttcatttccctaacaacttaaattgttataattcatttttctatggtcaagaaagataatgcatttaggctgtgaatggagcatgcggagcaggaggatccagttgcaagatggggtggattattgattatttgttgccatttacataagttatgttctctagagtgtgtttaggaaaataaactgacttgtcaaacatgtcattctttcttaaaccttgttcgcatccgcggtccatcaataaatgatccaaatagtattggatcaagttagcagagaataaaacgcaaaatcttacgttaactctattttgtacggtgtaactttcaaaatttggtgtagtatttctttgaagcttaacttctagtattagaaggaccttagctttatttgagatactaagcataagtttcaaaatgtatttatctgaaattcaaagaaactcttataggtaattgaactaatgtacacactattcagccttcggagacatacttgtgtcacacaaattgtgtgcattggtcttgcatatgcaattgggagaagctacgtgctcttataacacccacatattttctctattatttgtcctcaaatttcttgagcgttttttttctcttccacgcctaaaattttatagaaagaggaccacattcaagtccctttccaactttttattattatttagaaatggtaaatatgagtgagtcttttgggggtttgagtgaaagtccagccacgccaagctccatttgctgattactgcttaaaaacatcaccaaccgtttcttaattaccttcattgtttactcatgtttattgtgaatggttcattataaaatttctatgacataataacttgaatagctagcatcatctcttgaccaaaaaagaagaagaagctagcatcacccaaattagtcaatgattcaaaacgaaagttttagtacatataagaagaaaaccaaacctaaaactatgagtagtggtagtaaaaccatttcaatatgtttacttgttggaatgccatcataataacaataaaataagaaatgttttaagaaacttttacctgtgaatcacgcggcttacggcttttgcagagaagaaagatatttacaaatactcgattttcacaaaaataaaatacaaaaggtgatttcttgatataaaacccaaaagtcatctttcttctctattgacttgagaagaaccacaacaatgcctcgcctacaatgcctaacaatg

SEQ ID NO: 11085 - DNA, 3000 bp, Unknown
  misc_feature (1)..( 3000): cDNA_ID_2995213_gDNA_ID_2214478_Annot_ID_183214 3000 nt of promoter + ATG
cttatatttttataaatcgatcacacattatcactttcatctcatgcacgtatagtcacgattacattcaatatacgatttttcacatagtctaatgcataacacatcaatcttcttgctaagacggtcaccttttacatattcatctaatccattcatatttgaatagagtgaatacaacaaactataaccttaatccaataaatatttataagaatatgttatatgtgagttcaaatctaaaactcgatggctagcttgaggtttggtgcatacatcgaaagtcaatagcaaacaggatgatattttcaggatggaatgactatacgacagcaagtactaacctcgaaaatgaaatgaatctggccgtgagatgacaatttaaaatagctaaagcctaataatgcaatatgatgggtggagcaaaataattgaagaactaaagatttttattttagagaaagtcaaccaaattataaagaaagtaaatgcaaaatgtcaacatttgttttaacacattagagtaaagtattttttatgtgggcaaaggctctcgatctttagctgcaattattaaatttgtgaaaactatcatatattgatgcctcacttcactcatcttttgaataataaagccaagaacatcacgtcaaaaataaaaactacaaaagtcaagaccatgatcaccatgttcctactttcatcctaaaaagtttacgaaacaacaatacacaaaggaatgaaaaagatgagaaaagaaagccaataaatatagttttctcacccaaacaattgaagaccatgtgatatataactatataagatattaggtactaacatgaagcatgctatatctatatagtatggtttaatagaatattaggtagatgtatgtataattaacttcagattgcataacgtttattattgaactggtaaaatcgagggaaaacaaaaaaaacttaccattcttagttacgtacatacacaaaacatgcaaagaaagataactacctaactataaattacgtttttgttgttgctgcaaaaatacaaaaaggaagataaagagaaggaattgtgatagaccaatatatacagtggcaataacatttttacaccataccattatatatatagggaataaaggtattgtctggaggaaaatgacgtttccgtaaacaaaataatgataaaacaaaaatagtgaaaagagtgaaagagagaagtgcaaaagggaatctgttggaagtgtagaaagagaaagcgacgaccacttcaatccagtgttgttctttctttcttttttcctagaaaattaaagatattgctttttaccaaataataattttatcttggtggtagaaaggtttgcaagagttgtaatatacagaaagagagacaatgggacctaagaagggaatctctgaggagagacagagatgtttcagatcgaaagagacgccaaattgtgtctgtcactctgttcttgtgtgtgggtctcctctccttccttccttatcgaatccatattccattttgcttttttttccctagaagatttttaagaatccgaattttaacataatcttttgtttagtataattcactttccttcttttttaattactttttaagggttctttaaaggttgtgtttagttaaattttcgtttctctattatgaattcaagtgatatagagaataaagatttaagtgatatagatgataaaagttcacttgttaaagaatagttgaatattgaagtcctttatggtttcgaaaccgaatttacaacgtgattttctgtaggttttctacataataaagaatcaaaattcgtaaaagtaagaatatagaatatccattccaagtgagtttgaaacacataatagctaagtaacatgtgaaaaaaccttagggcataggaaaatagcaaaggttggatgttttgtttctcgcaccacataatgggcaatgattgtaacaccattcatcttctattcatataacaacacaagtacacaaccaataatgatttgtcacataggtgaaagcgacacatgtgtgggaggaaaattatgttcgctgagcttgatgaatcaatgagagaaaacatggctttaagagatgaatcaaagatggatgtaaaaggtaaaaaacacatcctcatccgattgaaaagtggaaatcagtaatttatttccaacgtttactatattccaaacctatggacaaacatcttgagttttggacaattcttagagatatgttattgatattcgactaaaagataataacctttctaaaagagaccaagaaagcaatctcgttaccaagataccaatgtcaaaaatagaatgttgttattgacattcaaaatgacattgcacaatgtttcaagatgtgctacaacagaacttgcaagatttttggatatttggatacttggtgtgaattcatggctggatttaggatatgttcctagtatatatatattgacttatttgttttctaaattgccaaataatgatcatctggaacgatttacgagttagtaaacttcgtacatgtgaaatattctccttatcgatcatgtcgttaacatcctaacgtcccatccaaataatgggcttagaattgggcttagcagaaacatgggctaaaatccttgtgcgtggatctgaaagaaaggcagccaattaatgtgcctaaatccatacactgtaatgcagccaattatttctcaagtaattaattacctatgtaaatgcaactttatttccggtacaacagttagatattttcaattaatgacatcttcttcttctcctttcactgcaaaaccgaaagcttgagactttgagattatgtctatgtcatcttcttcttcttccatcgatcacttcatcacctttcgtcatcttgatcttattctccactgtataaaatcagcgagattttaagggattgtgaaggtaccatcttaaacacaaaatg

SEQ ID NO: 11086 - DNA, 3000 bp, Unknown
  misc_feature (1)..( 3000): cDNA_ID_1806994_gDNA_ID_2214478_Annot_ID_183212 3000 nt of promoter + ATG
atccaccaatcaagcaagagcatcaaaacagcgtgagaagaaacaataaaacaagacaattattcgagatctattgattcaatggacgagaatgacgaatctaaggctgatctctaacggggaaggagaaagatcgtacctttgcctgagaattgaaaaaggtgggatggatcagattctgctactctgggattgtgttcttcgctctctggagttagaaatttctctttctctttaaacggctctcgttttagaaaataataattgtgttaaacgcctaaaacgtaacggaagtttctgaaaagccctaacatttagtatctttcaattacacccatttcatagaaaatgtagaaaacacacagttttattacatgcttgtcctgcggaccggtcctgacatatgaagttacatttgttgttgtaggtgtttcatcttgatatatgagattctcaagtggataaaatttgaaaccaaacaaggctttataccgaatttttttagataacaaaataaaaagtgaagagattatgtcgggtcagttgggtctatagtactcgagtattgccacataatagtttccatttcgtttgttgattttccaatcgcttggtcaaaactttagcatgttagttcattatccatagattctaggggttggtttgttttcatctaattaagaccgtaactcaaataaaatgatagttcactttgataatattttgtgaaattgtaataacctggattagtagaaatatcctggattagtagaaatataaacgagtaattgactatcacaataaagcttaacaagccgagtgagtaacaagtatgagcaagtaaagtatcatttcttgacatgtaattttcatttttcgtaactttctctacaacccaattattgaccgcaactaaaaataatattatgttgagacatacaacaagaacatatggaagagaaaaaaaaaaaaaaaaaaagtcgatatggatttcgttgacgacaaatccacattgtattatttggacaagagacatgacctttaccttctcctcacgcaaccggcatttgttgaagtctcccattgtccctcctttgggccctacctttaatgccaaactaacccattgtatttggtattctacataaaagttgtacactaatgtacgatacgattcaactacattaaccgtatgttaaattatatagtattcacttgttgataaataaattatgtttgaacacaacaaaacttagtttctatatccgctgctgttttgttatagtcgtcattcgtacgagtaattctttatgttccgcactaatcacgcttcttttgtaccacttagtatgtgattttctcattcgtggtctttgaattgtattagaggcaatttagtcttttgtgagattaggaggtgtgtacggaaaagtgtgtgagacaaatgaagttaatgtggaggagatctatagtgggacaaagcaattgaaagtcgctttagaagcaactaaatgccctcttgacttctccattctccttgcgatttacgcatttacctaattgcatcttttacttgtttagcttgttaagttcttctacaacattaccacttttgctctcttaagttattgcaacttgacaatttgttataccctttatcaaaaaaaatacctggcaacttgtttgagctcctgaattaatcacatctcttaaaagacgttttgcgagtataacatgagcttttctttttatagattcattcaccaatcaaatataaaaactataacacaattaaaatgccatgtagctaggtatattagcaagtcgtagaacagaaatggaaagacttgatgaaagcacgtcaattcaatttcatctcctataaataaattgttgtaggaagccaaccgttttggaatttcttttctttcgttttacgtaagactatatagattcaataacgtgttggtttagaaacccatacttataatggttgacaaaaagaagaaagaaaaaaatataaacatatacgctaaaagtgtttaccaaataacagggttatgtaatttattatctggattaggaaaagatgattggaccatgcgatggagtagaggaatctgcagggcatttgtcactttcatggaccccatgaaatcacatctcttttaattgaataatcgaaatccagttgcatacgcatctttgtctacgattggtcgtagcacatatacgacatatgccataactacaaactaacttaatcttctaataatattgttaacgatcgttaatactaaaaattactaatatattagtcgtgttatctatgtgttatgaggtgtgttaattgttgatgcataatgaatgaacatgatctctaatttgtttacctcacactatgtgattcaagggtggaagtcgttggttagcaaacattagtgtctcaggacaagatagctcaggacaagatgtccgagcggttcagaatcagtaatgtttttttccggagactctactcgttgagtttttgcttgtactccctggtgtttgtgttgtgatgtagttttgttgttttacttagtttttgatcttttatgtaatttgtatttcgctgtaacttcggtaaaaaacttgtgaaaatagtataagtacttaacattgatacaaaaaaaaaaaaaaaaaaaaaactcatgaggtcttgttatatatatggtgatcacatctttaaagaaaatgttatagtatttgttttagtttaaacaattttttatgtgccaaaaacattattaaaaagagagcaataccctactctaaaatagtaaagctaccaaattcaattcattacgacatggctcaaaagaaaaagtatttcgaatattatacgatatcaaccccattatcattgctataaaataagccaaactttacctctccattttcaataatctctcatcttctttcgtctctctttctacggttcaaacattaaaaagatag

SEQ ID NO: 11087 - DNA, 3000 bp, Unknown
  misc_feature (1)..( 3000): cDNA_ID_1019997_gDNA_ID_2214478_Annot_ID_183209 3000 nt of promoter + ATG
attttttgcctttgtccttcatttttgatcagttcttactgtgattttcggctgagtagttgtaggaaagtctatgaaaaatgactgattatcaaggctgtggactttgtccttctatttggccttgtacatcagtaccatgcattttactatgatttctgagctatgttatggttaccatccatgaagcaggttttcagacggttgctattttcatgcagaacggtgaattggagaaaaaagagccagccgcaaatgcagtaagtgacaacgtggaggactcatcaaacaaggtacaaataattgccctaaatttgcttcttacgacagtgggtaaaactttttatatcgaaaatgagtgtagagtgtcttttaaatatctcttaacgtattcccttttgaaagtactgtaattgtatatgtcagtgacccttggtttatagttcagatcaaatttttagtttgtgccatagtttcgataccactgtaatttgtaatctcttgctctagagacaaaacatcggtatttctaaatttgacttggtcctttccattcatggttcatgatgtggggcatatcttggaattttgttgcatgtttttcatgctgacagcttttatatccttttccgtttaattgtctgtcagtagaatatcaattttgttagagttaacaacaaaggaataaaacatgtggctggatcaacttttttgtaagtttggctggtagtaggtgttatgatcaaaagcttgttcatagtggttcaacctggaaagccaaatgtcagaccaccttattataatcttaaagtgaaaaacacgcagagaatagaagtgcagttctctccgcagctacggcatctttgtggttgataatgttgaaagcttcactgtatttgcttgctatactaatttctttttctgtcaagcttgatattgagcctagtgtacttgttgcagatcttcattggcggattttcaaaagctatttcatctgaaatggtatgctgaactgtaattctttgaaaacatttgacacgttcaatcttctattgtccccatttctatcgtttcaacttctaggattgtctgattcctctttaacgtttttccagcttatggagattgtcagcgtctttggacctttgaaagcataccggttcgtgagcaacaatgatctcaatcagcgatgcgctttcctagaggttagaatgtacttttatttgtggccaagatacccccatcttagtctgccatctcgatgtagttcttgtgattgtttcatatctttaatttttcattttccgggtagcatgggaaggtgttattaccttgtaacttttacagagtaaccatgaatgtgactgtagttccaagtatattcatattaaccagccctaactctttttaaatctctatatttcagtacactgatggatctgttaccctcaaagcttgtgctggtctaaatggtatgaggttaggtggcagtgtaataacagccgtttgtgcatttcctgatgcatcatccgtagcggtaattcagtgacccaactttgctttcgttagttcatgttgtgtttgtatgggtgacattgaacagaaattcctttagttacttgtgagagtggtgtgtgtacgtaatatgtgttgcaggtgaatgagaatccaccattctatgggatacctagccatgcaaaaccacttcttggcaagcctaagaatattctaaagctaaaaaatgtggtaagcataattggtgtatcctttttcttgtgaatctttcccaaataaactatgtgaggctatattaacattccattctttcttgtttgacaggttgacccagaagatctcacgtcgttttccgagcaagaagtgaaagaaattttggaggatgtacggttagaatgtgccaggttaagctctgagatcatcttcccatgagtccattgagcttttaaaagctagtaaattaagaaaataggcctctgggtcttgtcatgatgcaggtttggggttattaagtcgataaacatcttggaacacaagagcaaagatatcactgtttctgaaacaaatccattgttgaacttagaatcaactgattctaaagaaatgaatgtgtcagtgatcgaggagaaagatgaaggatccgagaaagcggaagatattgcagacaatgtagatcttgcagaggttgtcatgccagacagtttgacaggtgaagacaagttatgtgaaccgtgctcggatactgctgctgaaacaagcactcaagaaaatgaagatctacactccactgaacaagagcattgtgaaaagattgttgaagaaagtgcgcaggccgaggcagagaatccacaagaagtagcatcagtgcgtaccgtgaagacaagatgggatgctggcgacaagatagaagaagaacaagaagaagaccccgaggatgtatttgagacgggttgtatcttcattgagtacagaagaccagaagcgacatgtgatgcagcccattctttacacggaaggctatatgataaccggattgtgaaagcagaatatgtttctaaagagctttaccaaatccggttcccaagtgggtaaataatcccacaacaagtgagactctgtgattcttctcatctttaccacataaccggttcaaaccgagttcagagatacatagcatctacaatcaaaaacccttcaaaaatctctttgtaatcgttgggattgatcaggttggattattcatcaccacctgtgtctcgttacttttatgtattagagaatccaagaagggaaagatgaaaccatactattgtgttggtggctatatggaccggtttgcttactgaaaaattgttgtgttaaaagagaacgtaaccttctgaatgagaaagcgtctttcattttctacaaaataataaataaaatgaacccaatctccttctttatccaaatcctccttcgaagcagaagtaacagcaaccaaaa

SEQ ID NO: 11088 - DNA, 3000 bp, Unknown
  misc_feature (1)..( 3000): cDNA_ID_3034406_gDNA_ID_2214478_Annot_ID_183208 3000 nt of promoter + ATG
gcagatgattgattgttacattcaaaccctagcgaaagtcgttggaaggtataatcttcagattatatatgttaattgtctaggttgctgttgaaatataatgaaaaatgtatgaaaaaatctagggcagaaaattctgtttactttgtgtatttgactctgtatagtgtttgttgttggtttttggttagtgaggaagaggcgaagaagcgaatctacaatgtttcatgtgagaggtatttagggtttggttgtgagattgatgaagagacatccactaagcttgaaggtctttttacttagaacttgtttcttatgtttactatgtgttaactgataataaagaagagtattcttaaagtgttactttgtttacaacaggtttaccaggtgttctgtttgtgcttccagattcctatgtggatcctgaaaacaaagattatggaggtaattgttctgcctactattcaagtttaacctatatgtttgctttatttctccaaatgaaatctttgctagtgccattgtcattgcaaattttgagtcttagtgtgtgcctctcttgaaacatgaaggaaatatttttataagtccatcttggcaaagctaatgagtcttttggctatgattagctttgaatgctaatggactgacatcgtctattttctcttaaccgatttgtgcagatagttaataatatatctaactgcagtctggtttagatgaaaacatatattgcatgcaactctagagtgcttttctcttggaacgtgaagacgtgttattgattatcagtccatcttggcgaagctaatgagtctttgggctatgattagctttgaatgctaatggactgacatcaaataatttttatctaagccgacttttgcagatagttagtgtaatatctacctgcagaccggtttagataaaacatacattgcatctcctgagtgcttcttgtttcaattagtccattttggtgaacctagtgaatctattggctctgtgtgcgcactaaattaatgacatgaccagttgagaagataaaatatatacgcactgatagtatctgtgtgtcactctccctagccatgtaaaagatagttcaaagttcatcttggtaaagttaataattcttttttagcaatgtttagtttagaatgctaatagacttgtatcagtttcttcacttggtgtatgtgtggattttgaatagcaacatgattaatttcctggttgagaaaaagtatatatgtaaccataataacccggtatagagatgattggaggttttagtaaagaaccatggaccagaagtccttcttggcaaagctagtagctttctgccatttctagttttgaatgttaatggactcacatccagattcgctctttcttgtgctgtgctctttatattgaggaagcatggactcaattacgagagatacaccagctttacatttctcaaattaaatctcaactatacagaagaacatttactgtgatcgaattctgatttattcttaatcgttgtcgttgacttgcagctgagctgtttgttaatggagagatagtccaacgatcaccagagaggcagaggcgggttgagccacagccgcagagagcccaagatagaccgagatacaatgacagaactcgttactctcgccgcagagaaaacacaagatgaactgtaactgaagatggtatacatacacctaagctaagccagtatgaggatgatgatgatgatgatgataatggtggtgaggatgatgttactgccgccacacgagggctctgtattccagtccgttgcagttaatggaccgggcttactttggatattgttgaaattctaagttttgtttctatgtaacaattttatttaataatgtaaattgaggtttcactgttttaggaaattactttgggtagaagattagttttcttttcaagaacaattcatgtgggaaatggtaaatttattttagtaatcttttagaatgctgaagcatgctaaaaagagacgattactcttgtggtcaatctgtggaaaagcaaatacaatttggggttaaaaggaaacaatgtcaaaataaaagggcgatctgatgatatctccaataaataaggggaaaatgaaaaagtaaacaagttgattttaaaatccagcggacaaaatctgatgtgagtttttttcttttaatctctcgtccccgaaaaaaagttgacgaaactctctaccggaggcgctagttttcgccgtcggcgaggcaatttaactttccggaggtgcgacgcttctactccgcttatttttttctgctcttgttatttctcgtctcatgtcaagcttctttatgccttctctttgggtgtaaatagttggattagtcgcgaaaaaatcacgattggttcttcatttcgatgtatattagggtttgtgtgagcatatgattgctgagaagtagctagtaattgaatgtttatgtggttagtgggtaggagaatgggctgtggagatatctctactctgcgccgtctagttctttaggtcgtggattacttaatgcgattagattcaatcggatcgtagttctgatctattcgttcatcttgaagtttctagtcaagtagttaggaaatggtgttggtttttagaggcgcagtcactgtttcttgtacaatcagttaaataacttgctttttctggtggttaggagcttgttaaatgtgatcgaagatctatgatatgataaaaaaatctggaatagtattgtgttggtaggtttctgtttctgtgattttggctccatgtatcttgtaattttgaagttcctggtaatgatttctatgttggacgagggagtggaaactcatgaattcagctgtgcattgccttataattgtcttttgttctcattctattagtttgtgatttatgtctgctgatgattgtgctctctgctcattatctcaagggaataaagcagg

SEQ ID NO: 11089 - DNA, 3000 bp, Unknown
  misc_feature (1)..( 3000): cDNA_ID_2705277_gDNA_ID_2214478_Annot_ID_183206 3000 nt of promoter + ATG
ataaataaataaataaacgaagctgatatggaaaagtcttctctttctttttttttttttggtaagtcgatctctctttcactcactttaacccaattggccgctattttccaaagtctgtttatttttttaatctctctctcttctctctcacccaatttcacaaacccgaaaccctaattttctcgggacactgaaatttttacagcttctttcctcttcttcaccggggagatttgtcggtactaaatctagggtttttgggtatcaccggagggttgaagagagagaaaaaaactcacaatggaatcagatcagggaaagctatttatcggcgggatttcatgggataccgacgagaatcttctgagagagtacttcagcaatttcggcgaggttttgcaggtcactgttatgcgagagaaagctactggtcgtcctagaggattcggattcgtcgcattctcggatcctgctgttattgatagggttcttcaggacaagcaccatattgataatagagatgtaagcaaaaatcttgtttctcaaatgggtctttctaaattttgaatctttatagtaaaaattgatactttgaatcttgttgttgtcgaggtttgattttcatctttgatggatttaagttgtgttaatttcttaggttgatgtgaagagagcaatgtctagagaggagcagagtcctgctgggagatcagggacttttaatgcttctaggaattttgatagtggagctaacgtgaggactaagaagatattcgtgggaggtttgcctcctgcattaacatcagatgaatttcgggcttactttgagacttatggtcctgtgagtgatgcagtcattatgattgatcagactacacagcgtcctcgaggatttgggtttgtttcttttgattctgaagattcggttgaccttgttttacataagactttccacgatttgaatggtaaacaagtcgaagttaaaagagctcttcctaaagatgctaaccctggaatagccagtggtggtggtcgtggcagtggtggagctggagggtttccgggctatggtggttctggtggaagtggctatgagggtcgtgtggattctaatagatacatgcagccgcaaaacactggaagtggttatcctccttatggtggttctgggtatggtactggttatggttatggaagcaatggtgtaggttatgggggttttggtgggtatggcaatccagctggtgcgccttatgggaatcctagtgtccctggagctgggtttggaagtggtccaagaagttcatggggcgctcaagcaccatcgggttatgggaatgtgggatatggaaatgcagctccgtggggtggttctggtggtcctggttcagcagtaatgggtcaagctggtgcatctgcaggttatggcagtcaaggttatggctatggtggaaatgattcctcttacgggactccatctgcctatggtgcagtaggggggcgatctgggaatatgcctaacaaccatggtggcggtggctatgcggatgctttagatggctctggaggctatgggaatcaccaagggaacaacgggcaagctggttatggtggaggttatggaagtggtaggcaagctcaacaacagtgattgaagaagaaatactactagaatgtggttttatcgctgaccttgaaacctcctgctttccgccttaaccatgtcacgtctttggcggttagaccaggaggtggacctacgctggattatctcttttgttagtttctcaataagttgttttcaggcaattccggatactatttcctatcaagttgtagtttttaagtttgcgtgcttatttatatttgtcgctttggaatggttttctttctctgttatcctctagtgtttgtgtttaacgatacatcctccagattatcattattcatctcccttttggttcattcatttttgttgaatattccattcacagattcttgcttttgcatctcctctgtttaggggaagatgatttgctcagtgttcaatgtgatctaagaaaagtgtttggtagagcaagagctgcaataaatcactttgagattgcgttgttacatgaaggtcgtgttggcggaaacttaacagtcccaagaactttaaaatattgtcttttgtcagacaaaacctgactaaactggtctgtttggtggctgttcaaacatgacgtttctaatccaaaccggcccgtctctaaatcattttctctctcttacggtaataagttatcttctctactgcattccagtttttgcaaatcctgcggctaatctaacacttctgacatgtgagtaaagcaatacattgtagctagtagttgttttcccccagttaattatgttttaaacactcgctcagtgaaacctcttgagtttgtaatatatattttctttcaatacattagatttcgtaaccattttggaccgacagaagaaaagagattaccattatgtcttttttcttttctatatacgataactaaaagtctaaagcgtatttctcttcgtataggtaaaaatgtagattgagacattgagtagcatctacattaaagaaatatatacaaaaactggtatattgtgctggcaacaatctagtacatatatataaaagattttacagatgagatttggatggacaaaatttactcgaaataggaaattagctaattctagtgttatttttatttgtgagtattcctaattttactcgcatcctctatgattctctcaatacagattttttttgctgtagattacctttttccaacttgtcgccttcctcctccacctcctcagtttctccagttttatttttacgtttgtcttataataacacaagagatatgtcttttcctttcctctttcctctctcattgagcaatctaatttcataaaatcccgtaaagttttcctttccaccctctcccctcctccgcc

SEQ ID NO: 11090 - DNA, 3000 bp, Unknown
  misc_feature (1)..( 3000): cDNA_ID_2705281_gDNA_ID_2214478_Annot_ID_183205 3000 nt of promoter + ATG
gtataatatgcagcaatttattattttttctcttcttcttatagtacttgatccaaaaaagttgaaagatcacaacttgtatcaagatgtagttgcagaaacaaccagtgggaagaatagccctaaaagggaaaacaaatacaaacctccatccatacacacacaaagaatcagaaatgctacaaagacaaacaaacaaaacacagtttttcttcttcttccttcttgttaaccactgtgaaacctttacctgttctccatgttggtgatatccacaattggggatctcttcgatgaaccattcgcatgaagactctttggtgaggccaaccaattggaaaggctagtattaacgattatctccttcagtagtggttttgcttgatcatccatatcctcttcaacattctctttcattacccgtttaactttcactggccttgctttaaccgctttccactgagcaagattctccactggattcaaaagaggagccacgtcctgctcattctcttcttcttcttcttcatcttcatcatcagcatcatcttcatagtcgttttcattatcggtgtaatagtcttcatcttccaaatcactctctccataacccatttcatcatcttcatcctcaaaactatccacacagttgtggtatctatagtttgaaggatacacagatctactgcttagatcctctggtttcttatctatagccgaagatcccttgcttcttcctcctttcccctcttcatcatcactgcaagcattctcatatcttgaaggtacaataggttcataggtttgtacattcaagtcaaatctgactctcttcctcgtcttcttagtcaccttcttcttctcctcctcctcccctacctcactcctgacacagtaaacataaaatagccatttcaattgataatctctgctaaaattgggtttcattttggcttttcataactcagattaagaaaaagtttcagtttttaagtaaatccaagcccctaagacattatacctgaggttcgaatttgagatcttttcagggttatctgaaacagtactgaaatctgtcggatctgaagaaagcagcggctcatagctacagattctctgcaataaaggttaaggttcaaatcagagtaatggaaaaaaacctaaactttaaagagatagagtaagaagaaagagtgttattttacttattgtggaaaattgaaaaaagcttacttgatctcgaggaaggatcttcctaatggaatttctgcgttttttgttggaagagagaccgaaacaacccataaaacatcccattggtggtgatgtttctctgtttcggtttcgatacttgagaggaagaagaagaagagagatgattagttgtttactttgttgcctcgttgaggtgttttgaaaagagagaaataggaacgttggggtttcaaacggatgaaagtgacggtgggctcacggagtttatgccgtcttttctttatgaagatgagacaaaattaattattggattccttttctatttttataacattttatgccaaaataaaagcatttatttgtttctatgcacaaccaaggaatgttgggccttgcggcccatttcaaacagtttgttgttaatgtgctttttgacttttgaggtctgtaaagacagatttaggcctacgtttatgccttttaagttcaacgttcactctaaacaagtggtgcacaaattttgatcaccttgcgcaatatgattatgaatatgtgaaaactgaaaacagcttaagttaagtttgattttagaaatgttagttatcaccaaaatatgaaaatatcaggctataactatctaagaactttcttttgagattcctcgatccaatttttatttaataggaattgttttctaaatttataattttagagtttctaataatttaattttttttttgcgacaaaaatattcttaagagttaagagaataacgttgatgactagaaaaaaaagagagattaatgttgcttttttttttttggtcacagcataatgttgcatttaagagttcaaatttgcagtactagcatctatacaaaataacatgattaattggtttcccttgtaagctgaatttgtagattacattgtattctttgattatataaattcttctttaataccacaccctcacaaagtttgccaaatgaagtgtttattatttttcggatcaatgaccttcttaacatacatttgaattaatacgaaaatgtacgattcttagcacattccacgttgtttgattttttttgtaaaattgcagatatttcatttcttccatcaatgctcgatatatttcgatgagagaagtagaaagattgctttgatgagctcgatttgagatatggtttttttgtcgattaatgcttttatatatatatatatatatatatatatatatatrawagtaacaaattttaatacaaaaaatcaaagacttaaaatgatctaacattttttctcaaataataaggtcattgatccttatataacatggaatcactataacatttataacctacattcttgctcatatatctctctccttttttttccaacatattaacgactaataataaaatttatcaaccattttaaatctctaaatggaacttattattacatgactaaaaaataaaaataaataaataaataaacgaagctgatatggaaaagtcttctctttctttttttttttttggtaagtcgatctctctttcactcactttaacccaattggccgctattttccaaagtctgtttatttttttaatctctctctcttctctctcacccaatttcacaaacccgaaaccctaattttctcgggacactgaaatttttacagcttctttcctcttcttcaccggggagatttgtcggtactaaatctagggtttttgggtatcaccggagggttgaagagagagaaaaaaactcaca

SEQ ID NO: 11091 - DNA, 3000 bp, Unknown
  misc_feature (1)..( 3000): cDNA_ID_1807236_gDNA_ID_2214478_Annot_ID_183201 3000 nt of promoter + ATG
tcgattatatgtgctcttacaaaatgaaatatatatgatttggacatgcagtactcggtttcggatccaaatattgtgcatgtatcgacgtcgacgttgcttgagacacaaggagcagtgacattgaaggagatttcaagttacacttatgaggtgattaagaatattggagttggtgtgattgacatcgttgatccaccaagattagggtttcaattgacccttggcctaaaccttgataatataccacgtggcaaaggtaagcttcaatattgaaatgtactttttcccgctacttagttattataagtttttttcatatttactcattcaaatgcagaagcgattaaaatcattacaaggatttctgaactacaagcgataatattaagtagccaactaaaagagatgctgagaagtttaaattttcaagatgattcacgatcgatcaacaacatgcccatcaggattgtttatcacccaagtgaacctttctacgtctttaaacaggtttattttaccgcgttttattcgtttatctgagttacatccaactaaatataataatggatagagaccaacgtctaaaatttatcgaataactataactataagaataagtctttgaatgttttttcagccggaaaaaatcacggccgtgtttccgatgaattttaaagacaattcggatgtggtcatcgccacgtcattcttccaggtacaactaaaatgcatacaatcaatgggtgggactagagttttgcattgagacgtcactaaggtttcctttgtcaaattttatctttttatgttaaaaacaaattggacaatacatataaaaaggaactagttgaagtgggaagccaaaaggatatgggaaaagccccacaatgtagttggtcgccaattcctcctctccaacttagaggagaaccggttcaagacttgaccaccaattctggttttgtatcatttggtacgttttgtgtcattttatctgtttataaaacttaatccaacatctttaattagtattcttaaatgtcaaagttcaaacaattctcattgcagatattacttcacggcacattgaaggaaagagactggacaaaacggtttggaacttgctaaatttctacgcatgcgctaagtaccatattaaggtacattagttctagtttttcaaataaaatataatagattttgtgttcttgtaattgaaaattttcaacctcgtattgtttaaatagtgctcgagagggtacatacagagacggatgagaaaaagaatggaaactttagttaaggtatttttatcatatattacgtacacacacgaatctacaacaatagttgacatttcataaacaaaataacgtatgtttgtaaatttacattatatacgtagctgctaaataacacaagcctagaagaagaagctgctcaaaatggtatcctttttttttgttacctttaaccttacttaggtttgtatatataaaaaagttatattatcattttttcttttccattctctaatttctatatagaaaacggaagatgcaaatacgtaaaggagtttgtgaaggtaccaaaaggtaaattgatgatgaaacaaagatgcaaggagatgacaaggagagtgaagataagcaagttccggatcaaaatcaacggttgtgctcggtttcgattcaatcagcggtggatatctctccccaaattctcttcgaaaccatcagataaatcatacacaaaattggactaagtaatcacttaacttggaaagtctcaagaaagaggctcggtgttgttgttttttttctttgtcaacatgctttaaaattgaattcggggagcaatattatacgttaatgaatatcttgacaacaaaaaaaaacgttatcagataaacttatggatataatttggtaaaccaaaaataaacctaatcaaaagttggcattgaatgcagcatgttacgtaagagctttgtacaagtaccattcactctttttacttttcaatgtatacaatcatcatgtgataaaaaaaaaaatgtaaccaatcaacacactgagatacggccaaaaaatggtaatacataaatgtttgtaggttttgtaatttaaatactttagttaagttatgattttattatttttgcttatcacttatacgaaatcatcaatctattggtatctcttaatcccgctttttaatttccaccgcacacgcaaatcagcaaatggttccagccacgtgcatgtgaccacatattgtggtcacagtactcgtcctttttttttcttttgtaatcaataaatttcaatcctaaaacttcacacattgagcacgtcggcaacgttagctcctaaatcataacgagcaaaaaagttcaaattagggtatatgatcaattgatcatcactacatgtctacataattaatatgtattcaaccggtcggtttgttgatactcatagttaagtatatatgtgctaattagaattaggatgaatcagttcttgcaaacaactacggtttcatataatatgggagtgttatgtacaaaatgaaagaggatggatcattctgagatgttatgggctcccagtcaatcatgttttgctcgcatatgctatcttttgagtctcttcctaaactcatagaataagcacgttggttttttccaccgtcctcctcgtgaacaaaagtacaattacattttagcaaattgaaaataaccacgtggatggaccatattatatgtgatcatattgcttgtcgtcttcgttttcttttaaatgtttacaccactacttcctgacacgtgtccctattcacatcatccttgttatatcgttttacttataaaggatcacgaacaccaaaacatcaatgtgtacgtcttttgcataagaagaaacagagagcattatcaattattaacaattacacaagacagcgagattgtaaaagagtaagagagagagaatg

SEQ ID NO: 11092 - DNA, 3000 bp, Unknown
  misc_feature (1)..( 3000): cDNA_ID_1021787_gDNA_ID_2214478_Annot_ID_183200 3000 nt of promoter + ATG
cgaaaccatcagataaatcatacacaaaattggactaagtaatcacttaacttggaaagtctcaagaaagaggctcggtgttgttgttttttttctttgtcaacatgctttaaaattgaattcggggagcaatattatacgttaatgaatatcttgacaacaaaaaaaaacgttatcagataaacttatggatataatttggtaaaccaaaaataaacctaatcaaaagttggcattgaatgcagcatgttacgtaagagctttgtacaagtaccattcactctttttacttttcaatgtatacaatcatcatgtgataaaaaaaaaaatgtaaccaatcaacacactgagatacggccaaaaaatggtaatacataaatgtttgtaggttttgtaatttaaatactttagttaagttatgattttattatttttgcttatcacttatacgaaatcatcaatctattggtatctcttaatcccgctttttaatttccaccgcacacgcaaatcagcaaatggttccagccacgtgcatgtgaccacatattgtggtcacagtactcgtcctttttttttcttttgtaatcaataaatttcaatcctaaaacttcacacattgagcacgtcggcaacgttagctcctaaatcataacgagcaaaaaagttcaaattagggtatatgatcaattgatcatcactacatgtctacataattaatatgtattcaaccggtcggtttgttgatactcatagttaagtatatatgtgctaattagaattaggatgaatcagttcttgcaaacaactacggtttcatataatatgggagtgttatgtacaaaatgaaagaggatggatcattctgagatgttatgggctcccagtcaatcatgttttgctcgcatatgctatcttttgagtctcttcctaaactcatagaataagcacgttggttttttccaccgtcctcctcgtgaacaaaagtacaattacattttagcaaattgaaaataaccacgtggatggaccatattatatgtgatcatattgcttgtcgtcttcgttttcttttaaatgtttacaccactacttcctgacacgtgtccctattcacatcatccttgttatatcgttttacttataaaggatcacgaacaccaaaacatcaatgtgtacgtcttttgcataagaagaaacagagagcattatcaattattaacaattacacaagacagcgagattgtaaaagagtaagagagagagaatggcaggagaggcagaggctttggccacgacggcaccgttagctccggtcaccagtcagcgaaaagtacggaacgatttggaggaaacattaccaaaaccatgtaagtgtgaatgtccaaatttatgattttaatgtgtaacaagcgggaaattaagtggttacgttaaatgaaactacaaaaacatccaactattaacatgacaaatcgtatattatccatttttaaaagttatggtgaggacatgaacatgtttcaaattaagtgtacctttcaagatttgtagtgttcaacacaagtcacaataacttaaagaaaaaatgtaattttcttgaaaaagatacataataatctaacgtacaaaaatgaaaaacagacatggcaagagcattagcagctccagatacagagcatccgaatggaacagaaggtcacgatagcaaaggaatgagtgttatgcaacaacatgttgctttcttcgaccaaaacgacgatggaatcgtctatccttgggagacttataagggtaattattacttgttatagtctcttcaaagacttcaatcttcagaaaaaaaaaaaattcaaataattgtataaaaattgcaggatttcgtgaccttggtttcaacccaatttcctctatcttttggaccttactcataaacttagcgttcagctacgttacacttccggtatggaaaataatccagagacccttcgaatttaatttgaattttattattattttgtgattttaatttatgttgtgatcaattttatgtaaaaagagttgggtgccatcaccattattgccggtttatatcgacaacatacacaaagccaagcatgggagtgattcgagcacctatgacaccgaaggaaggtaacattaacatatatgtaaaatataatatccaataattttaaatagaattttcatgatactcaattttgtaaaattgcgattgtttataggtatgtcccagttaacctcgagaacatatttagcaaatacgcgctaacggttaaagataagttatcatttaaagaggtttggaatgtaaccgagggaaatcgaatggcaatcgatccttttggatggttagtactaaaaacattattggttattagttgatttttttgaatgaaatttattagttgattttacatacacggtaataagttaacactaaatcctaacgaaatctgctaaatttgttgtgttggttatggcaggctttcaaacaaagttgaatggatactactctatattcttgctaaggacgaagatggtttcctatctaaagaagctgtgagaggttgctttgatggaagtttatttgaacaaattgccaaagagagggccaattctcgcaaacaagactaagaatgtgtgtgtttggttagcgaataaagctttttgaagaaaagcattgtgtaatttagcttctttcgtcttgttattcagtttggggatttgtataattaatgtgtttgtaaactatgtttcaaagttatataaataagagaagatgttacaaaaaaaaaaaaaagactaataagaagaatttggtattgttcatttcatgattaaaatggttcatgggctatcatgggcctaaaaggccttttccataggtttaaaccctaatcctttcttctccttcatttttctacttcgatcagacgccaaacatcagaagccctagagcttgagccgtcgaaaatg

SEQ ID NO: 11093 - DNA, 3000 bp, Unknown; identical to SEQ ID NO: 11076
  misc_feature (1)..( 3000): cDNA_ID_2705285_gDNA_ID_2214478_Annot_ID_183199 3000 nt of promoter + ATG

SEQ ID NO: 11094 - DNA, 3000 bp, Unknown; identical to SEQ ID NO: 11075
  misc_feature (1)..( 3000): cDNA_ID_2705289_gDNA_ID_2214478_Annot_ID_183198 3000 nt of promoter + ATG

SEQ ID NO: 11095 - DNA, 3000 bp, Unknown; identical to SEQ ID NO: 11074
  misc_feature (1)..( 3000): cDNA_ID_3034418_gDNA_ID_2214478_Annot_ID_183197 3000 nt of promoter + ATG

SEQ ID NO: 11096 - DNA, 3000 bp, Unknown
  misc_feature (1)..( 3000): cDNA_ID_1442932_gDNA_ID_2214478_Annot_ID_183196 3000 nt of promoter + ATG
gcacaggtccctaaacactttccttaaagaaccaactaatacctgttttcctttctagctttgcctgtatgctatataacagaaatgattatatatatttacaagaaacaattgtgtggattatactttcttcatgagcattttcatatcagctaaaatccgtggttcggtgtatggttagagtacgagctcctttactcatgaaagcctttgtcatattccttgtttttattcaggtatcagatgattcaaagaatgtagattacacggctgctgcttttcatcccgatggtctcattctcggaaccggtacttctcaatctgttgttaagatttgggacgttaaaagtcaggtaaaaactatgggcttccaaactatatgacctattaaaattattaattgtgtacagtgttcttcattatagttttcatttttttggttgataataggcaaatgtggctaagtttgatggacacactggggaagttacagctatatctttctctgaaaatggttacttcctcgcggtgagtactttgaacaaaatacgagaagagagaatacagcttaagttatgcttacatgaatgattttctttttgtcctggaattgacagacagctgcagaggatggtgttaggttgtgggatctgcgcaagttaaggaacttcaaatcatttttatctgcagatgcgaactctggtacacaactatcgtatctgtttctactcattttgttgatagagaactttctatgtattataagctcgctttgattaaacctactttttttttgtgtgcagtggagtttgatcctagcggatcttatctcggtattgctgcatcagatatcaagtgagtacacatttgaaaatagtgatcaaaacatccaaagctcagctaaagaaaatatccaaagagaccaagctagcttgattaatctgcacgttgggttaacacaatttatgtgttttggctgcagagtataccagacggcaagtgtgaaagctgaatggaaccttatcaagacactcccagatctctccggcactggtaaagtcccttacctaactccttcaatgatcacatagcgataatgttgctaatttcgaagcccttacacttgcaggtaaagctacgtgtgtgaagtttggttcagatgcacagtacgttgcagtcggttcgatggaccgtaactacggatatttggtcttcctggtgatgaaaaagccaacgtcgatgatgactctgcgcaagactcgtgaacaatccgtaaaaaactcagacagaacattccaaatgtccatctccagtgttatctcgctcaaatttctcaagttctgttgtatcttacagtatttgcagcaatgggggagaatttcataggtgcgggtcatgagtgagtggtgattgtgatcatcctcgctacctcttggaattcaaacaatgacactcacaaaccctcgagttttcttataggctcttttaatcgctttgtaccttcaatatatgtaccaaaaaatgtgttctttctgttgccaaatgaattcagacactaatgaagatcccaaaccgatggtgctaaaccgcatttggtattatttaatctgttctagacagtggtggtctgcttagtattccgtattccaacaaatgatttcagctggtctctgagaacaaaattttaactaaatgttaaagaatacccttgactgtacttggtcaaaaatcactgggcacaatatttacatttatccacgaatatcagattcgtgattccttttgcaattccaggattagtttaacttcacgcaaaagataatgttttgtaataccctttctttattgtgaccaggattgacaattcgtgttaaggtataaccacgtgtttcctcacaattctaaagaatgcttatgtttctccctgtctatattatttttttaattttgtctgaaaatactaaaataacttgaacaaatcatcgtataaaaactacaaaatacataaactaagcttaaagaaatacctacacgatgaactttttatatagtaattagtaacaactacaaaatacataaccttactagctactgggaaaaaaattgtccagttttagatgatcagagtaaatataatactaattgtcttccattttaattattgtcgaaaacgtgttttcataaagtaactattattgggtttcattactaaattctaaacatcaaatggaattgaaaccaaaagagtagttattctaattttaaaaagttaggtgttgaataaacagtttaagtgaaatctaataatcaaagactgcaatacacacaccaagctcactgtactgtctttagactggtcagtggtggctgaagaaagaaaagagtgtttgattgttatattaaaaaataaagaaaacaaattacgctcccttctctacagactctctctatcctaatcctatttctttttccacatctcctaaagaaagagaaaagagtggtcatccatccatccacagcctcttacaaaatctctctctttcaccattaacaccaaattcagaaaactcagaagaagcaaaataaagagcttttactgatccaccaaacacagaatttcataaactcccaaaaaagttaaattccaaacaagccccacaacaacaacaacaacaaaaaagattttaatctttctcatttacccatatcctcaaaattcccacaaaaatctttcctccaataacataacaaaacaactcttcttctacaacaaactatgttctgattttttagtttcttcttccacacaatacaaaagaaatggggttttattcactgaagcagcttttgttactttacatcatcatcatggctctgttctcagatctcaagctagcaaaatcttcttcaccagagtacacgaacctaatctacaaaggttgtgcaagacagagattatcagatccatctggtttatactcacaagctctctctgcaatg

SEQ ID NO: 11097 - DNA, 3000 bp, Unknown
  misc_feature (1)..( 3000): cDNA_ID_3034430_gDNA_ID_2214478_Annot_ID_183192 3000 nt of promoter + ATG
tcttccttcacttatggcatttattctgcttagtaaccttggagcatccattactgaagtttctcaagacgctcttgttgcggaatacggtttaagatatcagataaatggtcttcagtcttatgcacttatggcttcagcagttggaggaatccttgggaacttactcggtggatattgcttactcaagacacctcctagaatcttgtttcttgcttttacagctttgttatctcttcagctcattgtttctttatcttctaaagaagaatctgttaacttgccacggatcggagaagtaactccagagataagctctgttttggggatcgtaaagaaacagtttttggatcttaagggaattgttcaggtagatgaaatctcccagcctttgatttggatagtatcttccattgcattggtccctcttctctcaggatcagtcttctgctaccaaactcaagttctaaaccttgatccttcagttattggtatgtcaaaggttattggacagttgatgcttctctgtttaactgttgtttatgatcgttactggaagaaacttcccatgagggcgttgatccatatcgtgcaactcctgtacgcgttttcattactgtttgattatatcttggtgaagcaaataaatctcgcgttcgggatctcaaacacggcttttgtgctctgtttctctagtgtagcggaaattcttgcacagttcaagattcttcctttctctgttttgctagcaaatatgtgccctggaggctgtgaaggatcaatcacttctttccttgcttctactctgtgtttgtcatcagttgtaagcggattcactggagttggaatggctaatatgatcgggataacatcgaagaattactcaaacctgcctgcaggaattctgatacagtctttggcagctttggtgcctttgtggtttattcattatgttccaatgttagagcctggttttgagagagaagggaagagagctatgagtaagaaaagcagaaggaatagacgtgtagggagagtcataggtcaggaaagttttgcttaccggcgggaaagagaaacataaacaagaatcagtctgagttatagttagagctagttcttcagctgacataacattgtttcttgggaggagaagattttgtgcccatgtaagtaaggatggatactgatgttggtaaacataaaagtcccaagattgacaagaatctcataaatccaatcaaagcaatgttatatctcagttcacaccaatcttgctgcagcaactccaagaatctccccactgtttcattcatcgttcttggtttggagacatgagatgtcatttcttccaagacaagccaacgcacagtgtaatatcttgtactaggataacaatgacctagaaatgaaattaaagttttggttagaccattttttgaatagtaatgaaattgctatgtaatgaaagaaaatttaggatgtgaattaaagttttgattagaccattttgaatagtaatgaaattggtatgttattttgtaagagatttacggttttcagaaagattgtttgaatagatttattagcaaattggaatattcagtggctgagattaaagattccgatgatcttgtggttgtgattttaggaacctagtaaattaggaggtgtcactttagggattaatggttttgcatagttgatttctctatttaagagcaactctgacttctctattgcttcattactcgaaatcctatgttcctccttggctcttccacctccgatcacctaccacaacaagtttttctcctccttttttcgagtctttctcttccccttttcaaaatttttgaccatccatcatgtttctatatcatgaagggaaaccatcatcgtcacaaagttcattctttccgagtaacacttttggtaagatttctaacacatatatcacgtttaaactatcctctagagtttaaaataaatcatatatgttagacattgttcaacattaaaatatggtggaggcaatagatccaaagtttactagaccacttatttttgccgatcaacgacggtcaatggccaagtcatattctcaaatttttttctagtagtgatccgaatactctgaccttctctcctagtctaaataggattctaggaatctatctttgacatcaaagattttgatatgaacatctaagtgagcagggtccaaaaattaaatattagtctaaaaagtgtaattttctttataatttattttttggataaaaaatgaaagtttttgtaagttaatatattgatataatcactttcaaagatttcatatatcaatataaggaaatgaatattcttttatgttataaaagatatattttatccaaaagtgataagagcacttgaatacaaatgtggattgtactggcatagaaacaaatcttttatatattaattgagaagtatatttcagagtctaatggtaaaattttaaggaaattaccaaataaatgacattagaaattaaatacaaataatttttcatttattttcctttaatttaaatagaaatgtatagttcctttttgcttgaaaaaaaataaaatataaaaggaaacatacatttatatttaaattaatgaatataataaaatatattgtatttaatggaaacgtcattttggtaactttcttataaaaaaaataagattctagtctgaaatatattttttaattaatatagaaagatatgttttaatgttagtacaaatcacattaaacaattttgaactattaaaatttaatgtagacgattaagatcaaagttaaaaaaaatatctcaaaaagatcagtcatttcctctataaatacgtgattttagtccattgtcaaaacgtcaaaaacttgtacgcaaggatggaaaaaccaaataattagtacagaagaaaatatttgtctcttaagtcttaatagatccaactagccgaagaa

SEQ ID NO: 11098 - DNA, 3000 bp, Unknown; identical to SEQ ID NO: 11071
  misc_feature (1)..( 3000): cDNA_ID_3034442_gDNA_ID_2214478_Annot_ID_183188 3000 nt of promoter + ATG

SEQ ID NO: 11099 - DNA, 3000 bp, Unknown; identical to SEQ ID NO: 11070
  misc_feature (1)..( 3000): cDNA_ID_3034445_gDNA_ID_2214478_Annot_ID_183187 3000 nt of promoter + ATG

SEQ ID NO: 11100 - DNA, 3000 bp, Unknown; identical to SEQ ID NO: 11092
  misc_feature (1)..( 3000): cDNA_ID_1021787_gDNA_ID_2214478_Annot_ID_133167 3000 nt of promoter + ATG

SEQ ID NO: 11101 - DNA, 3000 bp, Unknown; identical to SEQ ID NO: 11091
  misc_feature (1)..( 3000): cDNA_ID_1807236_gDNA_ID_2214478_Annot_ID_133168 3000 nt of promoter + ATG

SEQ ID NO: 11102 - DNA, 3000 bp, Unknown; identical to SEQ ID NO: 11090
  misc_feature (1)..( 3000): cDNA_ID_2705281_gDNA_ID_2214478_Annot_ID_133171 3000 nt of promoter + ATG

SEQ ID NO: 11103 - DNA, 3000 bp, Unknown; identical to SEQ ID NO: 11089
  misc_feature (1)..( 3000): cDNA_ID_2705277_gDNA_ID_2214478_Annot_ID_133172 3000 nt of promoter + ATG

SEQ ID NO: 11104 - DNA, 3000 bp, Unknown
  misc_feature (1)..( 3000): cDNA_ID_2705273_gDNA_ID_2214478_Annot_ID_133174 3000 nt of promoter + ATG
tttggatattgttgaaattctaagttttgtttctatgtaacaattttatttaataatgtaaattgaggtttcactgttttaggaaattactttgggtagaagattagttttcttttcaagaacaattcatgtgggaaatggtaaatttattttagtaatcttttagaatgctgaagcatgctaaaaagagacgattactcttgtggtcaatctgtggaaaagcaaatacaatttggggttaaaaggaaacaatgtcaaaataaaagggcgatctgatgatatctccaataaataaggggaaaatgaaaaagtaaacaagttgattttaaaatccagcggacaaaatctgatgtgagtttttttcttttaatctctcgtccccgaaaaaaagttgacgaaactctctaccggaggcgctagttttcgccgtcggcgaggcaatttaactttccggaggtgcgacgcttctactccgcttatttttttctgctcttgttatttctcgtctcatgtcaagcttctttatgccttctctttgggtgtaaatagttggattagtcgcgaaaaaatcacgattggttcttcatttcgatgtatattagggtttgtgtgagcatatgattgctgagaagtagctagtaattgaatgtttatgtggttagtgggtaggagaatgggctgtggagatatctctactctgcgccgtctagttctttaggtcgtggattacttaatgcgattagattcaatcggatcgtagttctgatctattcgttcatcttgaagtttctagtcaagtagttaggaaatggtgttggtttttagaggcgcagtcactgtttcttgtacaatcagttaaataacttgctttttctggtggttaggagcttgttaaatgtgatcgaagatctatgatatgataaaaaaatctggaatagtattgtgttggtaggtttctgtttctgtgattttggctccatgtatcttgtaattttgaagttcctggtaatgatttctatgttggacgagggagtggaaactcatgaattcagctgtgcattgccttataattgtcttttgttctcattctattagtttgtgatttatgtctgctgatgattgtgctctctgctcattatctcaagggaataaagcaggatgaacgaagttaataagcaaaaggaaaatcgtgatggacatgaaacacttgtaaatgaagaaggatctgctgctcgaacaagacctacaagtgttgaggagattaggctaaggaggaagaggaaagagtccttggaaaatgtgaaggaggaaactgtaggagcagcacagttactgggttacgatcttgttgaaaaggcttctgactatcatgagtccaagaatttgaggcgtgaagaacatgttgaagacagttcaagaaaggaaaaagaagccatttctagatgtagggaagaaaaaatagaaaaaccaatgaaagaggaccctgtgggagcagctcagttacccgataaaaatcttgttgagaaggttcttgactgtcatgagtctgaaaaagggtatgatagatccgagaaactgagtcatgaagagcttgttatggacagctcaagaaagaaagaagaggctatttctagttctagagaagaaaaacttgataaaccaataaaagatgatcttgttggaacagctcagttactgggtaatgatcttgttgagaaggttcctgaatatcatgtgtctgaaaaagagcatgatggatccaagaacgtgaggcgtgaagaacgtgttaaggacagtttaagaaagaaagaggacataacttctagttctagggatgaaacaccaatgaaagaggatcatgtgggagcagctcagttacggggtaacgatatcgttgagaaggtttctgacaatcatgcatctgaaaaagggcatgataaatccaataaagtgaggcgtgaagaacatgttaaggacagttcaagaaagaaagaagactacatttctagttttagagaagaaaaatcaagaaaagaggatcatgtgggagcagctatgttactgggtcacgatattgttgacaagttttctgactatcatgcgtctgaaaaacggcatgataggtcgaagaaagtgaggcgtgacgaacatgttaaggaaagctcaagaaagaaagaagacgccacttctggttctacggaagaaaaatcaatgaaagaggatcatgcgggagcagctcagttactgggtcacgatattgttgagaaggtttctgactatcatgcgtctgaaaaagggcatgatagatcgacgaaagtgaggcgtgaagaacgtgttaaggacagctcaagaaagaaagaagatgccacttctggttctagggaagaaagagtagataattcaacgaaagaggaccctgttggagcagctcagttactaggtaacgattttgttgagaaggtttctgactatcatacgtctgaaagagggcatgaaagatccaagaaagtgaggcgtgaagaacgtgttaaggacaattcaagaaagaaggaagaggctatttctagttctagaggagaaaaaccgattaaagaggatcatgtgggagcagctcagttactgggtaacgatcttgttgagatggtttctgactatcatgaaactgaaaaagggtatgacagatccaagaaattgagccgtgaagagcgtgttaaggacagttcaagaaagaaggaagaggctatttctagttctagagaagaaaacctagataaacaaaaaaaagacgagtctacttcaaatagaaaaaggaaagcagaaggagagtgttctacagctgaaacagaatcaattgaagaacatagtaaggatagacgaggaaagaaagaagaaactaattctaattgtagggaggaaagacgagataagaagatgaagaaggaagaccttgcttcaaacagaaaaattgaaggagaaatccctacaactgaaacaaaaaca

SEQ ID NO: 11105 - DNA, 3000 bp, Unknown
  misc_feature (1)..( 3000): cDNA_ID_1019997_gDNA_ID_2214478_Annot_ID_133175 3000 nt of promoter + ATG
ctttgtccttcatttttgatcagttcttactgtgattttcggctgagtagttgtaggaaagtctatgaaaaatgactgattatcaaggctgtggactttgtccttctatttggccttgtacatcagtaccatgcattttactatgatttctgagctatgttatggttaccatccatgaagcaggttttcagacggttgctattttcatgcagaacggtgaattggagaaaaaagagccagccgcaaatgcagtaagtgacaacgtggaggactcatcaaacaaggtacaaataattgccctaaatttgcttcttacgacagtgggtaaaactttttatatcgaaaatgagtgtagagtgtcttttaaatatctcttaacgtattcccttttgaaagtactgtaattgtatatgtcagtgacccttggtttatagttcagatcaaatttttagtttgtgccatagtttcgataccactgtaatttgtaatctcttgctctagagacaaaacatcggtatttctaaatttgacttggtcctttccattcatggttcatgatgtggggcatatcttggaattttgttgcatgtttttcatgctgacagcttttatatccttttccgtttaattgtctgtcagtagaatatcaattttgttagagttaacaacaaaggaataaaacatgtggctggatcaacttttttgtaagtttggctggtagtaggtgttatgatcaaaagcttgttcatagtggttcaacctggaaagccaaatgtcagaccaccttattataatcttaaagtgaaaaacacgcagagaatagaagtgcagttctctccgcagctacggcatctttgtggttgataatgttgaaagcttcactgtatttgcttgctatactaatttctttttctgtcaagcttgatattgagcctagtgtacttgttgcagatcttcattggcggattttcaaaagctatttcatctgaaatggtatgctgaactgtaattctttgaaaacatttgacacgttcaatcttctattgtccccatttctatcgtttcaacttctaggattgtctgattcctctttaacgtttttccagcttatggagattgtcagcgtctttggacctttgaaagcataccggttcgtgagcaacaatgatctcaatcagcgatgcgctttcctagaggttagaatgtacttttatttgtggccaagatacccccatcttagtctgccatctcgatgtagttcttgtgattgtttcatatctttaatttttcattttccgggtagcatgggaaggtgttattaccttgtaacttttacagagtaaccatgaatgtgactgtagttccaagtatattcatattaaccagccctaactctttttaaatctctatatttcagtacactgatggatctgttaccctcaaagcttgtgctggtctaaatggtatgaggttaggtggcagtgtaataacagccgtttgtgcatttcctgatgcatcatccgtagcggtaattcagtgacccaactttgctttcgttagttcatgttgtgtttgtatgggtgacattgaacagaaattcctttagttacttgtgagagtggtgtgtgtacgtaatatgtgttgcaggtgaatgagaatccaccattctatgggatacctagccatgcaaaaccacttcttggcaagcctaagaatattctaaagctaaaaaatgtggtaagcataattggtgtatcctttttcttgtgaatctttcccaaataaactatgtgaggctatattaacattccattctttcttgtttgacaggttgacccagaagatctcacgtcgttttccgagcaagaagtgaaagaaattttggaggatgtacggttagaatgtgccaggttaagctctgagatcatcttcccatgagtccattgagcttttaaaagctagtaaattaagaaaataggcctctgggtcttgtcatgatgcaggtttggggttattaagtcgataaacatcttggaacacaagagcaaagatatcactgtttctgaaacaaatccattgttgaacttagaatcaactgattctaaagaaatgaatgtgtcagtgatcgaggagaaagatgaaggatccgagaaagcggaagatattgcagacaatgtagatcttgcagaggttgtcatgccagacagtttgacaggtgaagacaagttatgtgaaccgtgctcggatactgctgctgaaacaagcactcaagaaaatgaagatctacactccactgaacaagagcattgtgaaaagattgttgaagaaagtgcgcaggccgaggcagagaatccacaagaagtagcatcagtgcgtaccgtgaagacaagatgggatgctggcgacaagatagaagaagaacaagaagaagaccccgaggatgtatttgagacgggttgtatcttcattgagtacagaagaccagaagcgacatgtgatgcagcccattctttacacggaaggctatatgataaccggattgtgaaagcagaatatgtttctaaagagctttaccaaatccggttcccaagtgggtaaataatcccacaacaagtgagactctgtgattcttctcatctttaccacataaccggttcaaaccgagttcagagatacatagcatctacaatcaaaaacccttcaaaaatctctttgtaatcgttgggattgatcaggttggattattcatcaccacctgtgtctcgttacttttatgtattagagaatccaagaagggaaagatgaaaccatactattgtgttggtggctatatggaccggtttgcttactgaaaaattgttgtgttaaaagagaacgtaaccttctgaatgagaaagcgtctttcattttctacaaaataataaataaaatgaacccaatctccttctttatccaaatcctccttcgaagcagaagtaacagcaaccaaaaatgacgaca

SEQ ID NO: 11106 - DNA, 3000 bp, Unknown; identical to SEQ ID NO: 11086
  misc_feature (1)..( 3000): cDNA_ID_1806994_gDNA_ID_2214478_Annot_ID_133178 3000 nt of promoter + ATG

SEQ ID NO: 11107 - DNA, 3000 bp, Unknown
  misc_feature (1)..( 3000): cDNA_ID_2705265_gDNA_ID_2214478_Annot_ID_133179 3000 nt of promoter + ATG
ttgttaacgatcgttaatactaaaaattactaatatattagtcgtgttatctatgtgttatgaggtgtgttaattgttgatgcataatgaatgaacatgatctctaatttgtttacctcacactatgtgattcaagggtggaagtcgttggttagcaaacattagtgtctcaggacaagatagctcaggacaagatgtccgagcggttcagaatcagtaatgtttttttccggagactctactcgttgagtttttgcttgtactccctggtgtttgtgttgtgatgtagttttgttgttttacttagtttttgatcttttatgtaatttgtatttcgctgtaacttcggtaaaaaacttgtgaaaatagtataagtacttaacattgatacaaaaaaaaaaaaaaaaaaaaaactcatgaggtcttgttatatatatggtgatcacatctttaaagaaaatgttatagtatttgttttagtttaaacaattttttatgtgccaaaaacattattaaaaagagagcaataccctactctaaaatagtaaagctaccaaattcaattcattacgacatggctcaaaagaaaaagtatttcgaatattatacgatatcaaccccattatcattgctataaaataagccaaactttacctctccattttcaataatctctcatcttctttcgtctctctttctacggttcaaacattaaaaagatagatggagaagaggagctctattaaaaacagaggagtacttagattaccaccagggttccgatttcacccgaccgatgaagagctagtggttcaatatttacgtcgaaaagtaaccggtttacccttaccagcttctgtaataccggaaaccgatgtttgtaaatccgatccatgggatttaccaggtacagaaattgaaaaatctactctagggtttcattcaaattcaatatttgatggtgtatatgcatgatgatcacaggtgattgtgaatcagagatgtatttttttagcacgagggaagctaaatacccgaacggaaaccggtcgaaccggtctaccggttcgggttattggaaagcgactggtctcgataagcagatcggtaagaagaagcttgtcgtggggatgaagaaaactcttgttttctacaaaggtaaaccaccaaacggaacaagaactaactgggttcttcatgaatatcgtcttgttgattcacaacaagattcattatatgtaagagaatcaaattcaaataaattagattcatcaatcagttggataaaaacttggctaaaaagtgtattttaatgtgtttttaaaagggacagaacatgaattgggttttgtgtagagtgttcttgaagaagagaagcaatagtaatagtaagaggaaagaagatgagaaagaagaggtggagaatgagaaagagacagagacagagagagaacgtgaggaggagaacaagaagagtacttgtcccatattttatgactttatgagaaaagacacgaagaaaaagagaaggagaagaagatgctgtgatttgaatttgactcctgctacttgttgttgttgctcttcttcgacttcttcgtcgtctgtttgctcaagtgctttaactcacacatcttctaatgataatcgtcaagaaatcagttatcgggaaaataagttttgtttgtttctatagattaacaaacttgggaacaacttctattaactttaataaattagattatgattgtttccaaagttaattatgcaatccaggagtctttcttggttttggtaattaatagccatattttatagcttatctaattgtatcaaatattgaaaactggttgatcaaatatctaatttgttaatgagtgtcaattaacaacaaggaccaaccatctagctaacaattcaagcaatcaaatcagagactaacactacattaaagatcactcttacaaaaaaaaaatgtggaacatttttttatagaaaaaatcatatacccaaacaacacaaattcatttattttgatatctgaaaaagcattatatgttaaaaatagaaaatgcataatgattatttctttcaattgttgggttgtttctaagtttttggacaacacttttttacccatactgtaaaagatcacaacattgataagaaaactctcatgtctggttgaaataaattagtaaaaggttagaataaattggtttaaaggtaaattaatattttagttttggcacaaattaacaaatcaattaatttttgtttatttttaactaaaacatcattgattatctatctatatccgattcaaccaatataaaataatttatcaaatataaatcacccaaaatcaataataaactagataattttgcaatggaagtcgaaaacatcatctcatttaaaattccaaaaaatcaaataaaggaatattaatataacatagacaatttagtatgattttggttttagttaaacatatctttgatcttcaaattttttttatttttttttcggtttgattgaaacttacttttatagtttgattttcagattgattaagaatgaatcggtttgataaaactctaatgtaaatggagtaattattgtaatattcaaaagcctaaaccatttgctgccatcattaattgcacttgctgacgtaattataagcgagaataatatgatcccaaaaagaaaattgataaaaaggacgaaagagaatcaaagagacgacgaagtcaaggatcaaagccttaacttttcctctaaaacaatcgcttttttatttttctaaatttctctctgttcttttttcctctggttttgattttttcctggcattattattagggtttttttcatacgttgttgaaaatggcgtagttggagaaaggagacgaatcgatcatctacctacttgcccattctttgtcgtcgtttttcgattttccttgattcgccggagaaatagcgtttccggca

SEQ ID NO: 11108 - DNA, 3000 bp, Unknown; identical to SEQ ID NO: 11085
  misc_feature (1)..( 3000): cDNA_ID_2686517_gDNA_ID_2214478_Annot_ID_133180 3000 nt of promoter + ATG

SEQ ID NO: 11109 - DNA, 3000 bp, Unknown
  misc_feature (1)..( 3000): cDNA_ID_2705261_gDNA_ID_2214478_Annot_ID_133181 3000 nt of promoter + ATG
gattctttattatgtagaaaacctacagaaaatcacgttgtaaattcggtttcgaaaccataaaggacttcaatattcaactattctttaacaagtgaacttttatcatctatatcacttaaatctttattctctatatcacttgaattcataatagagaaacgaaaatttaactaaacacaacctttaaagaacccttaaaaagtaattaaaaaagaaggaaagtgaattatactaaacaaaagattatgttaaaattcggattcttaaaaatcttctagggaaaaaaaagcaaaatggaatatggattcgataaggaaggaaggagaggagacccacacacaagaacagagtgacagacacaatttggcgtctctttcgatctgaaacatctctgtctctcctcagagattcccttcttaggtcccattgtctctctttctgtatattacaactcttgcaaacctttctaccaccaagataaaattattatttggtaaaaagcaatatctttaattttctaggaaaaaagaaagaaagaacaacactggattgaagtggtcgtcgctttctctttctacacttccaacagattcccttttgcacttctctctttcactcttttcactatttttgttttatcattattttgtttacggaaacgtcattttcctccagacaatacctttattccctatatatataatggtatggtgtaaaaatgttattgccactgtatatattggtctatcacaattccttctctttatcttcctttttgtatttttgcagcaacaacaaaaacgtaatttatagttaggtagttatctttctttgcatgttttgtgtatgtacgtaactaagaatggtaagttttttttgttttccctcgattttaccagttcaataataaacgttatgcaatctgaagttaattatacatacatctacctaatattctattaaaccatactatatagatatagcatgcttcatgttagtacctaatatcttatatagttatatatcacatggtcttcaattgtttgggtgagaaaactatatttattggctttcttttctcatctttttcattcctttgtgtattgttgtttcgtaaactttttaggatgaaagtaggaacatggtgatcatggtcttgacttttgtagtttttatttttgacgtgatgttcttggctttattattcaaaagatgagtgaagtgaggcatcaatatatgatagttttcacaaatttaataattgcagctaaagatcgagagcctttgcccacataaaaaatactttactctaatgtgttaaaacaaatgttgacattttgcatttactttctttataatttggttgactttctctaaaataaaaatctttagttcttcaattattttgctccacccatcatattgcattattaggctttagctattttaaattgtcatctcacggccagattcatttcattttcgaggttagtacttgctgtcgtatagtcattccatcctgaaaatatcatcctgtttgctattgactttcgatgtatgcaccaaacctcaagctagccatcgagttttagatttgaactcacatataacatattcttataaatatttattggattaaggttatagtttgttgtattcactctattcaaatatgaatggattagatgaatatgtaaaaggtgaccgtcttagcaagaagattgatgtgttatgcattagactatgtgaaaaatcgtatattgaatgtaatcgtgactatacgtgcatgagatgaaagtgataatgtgtgatcgatttataaaaatataagtatgaggctatgtgatctggttttgattgagtgatttgtggatctcaattaatgtttgtagacgagaatgatcttctagattgaatgagttgaaagccgtggtaagtcctagttatcattggatgaaggaggagatttatagatttttggatgtttcgagtagatattaaacagtagaacatagttggatttaaattttagtaaaggcttaatggctttaggatattataaagttgatcatgaacaatatttaggttggacggttcaagtttctcatgaatcaaatattcaagtgctaattgccgaaaggaaatactgaaccgaattcgaactgaacaaccacaaaaaacagctaatgtaaatttgtttgagaatatttttgataagaacttgaatccaattcgaaaccgaaattgtaccaaactttttatattttatatcacatcaaagattttactttgaaaaccattattgataacaaaaaatccaaaaactcaaactaaaattcagattaaacaccggtttaccatctagggaatgggattaatataacataaaaaatactaagttgtttcatttaataatcaagtaagattttgcaatgctaaagaaaaacgaaataacagaataaaggaagttccggcattcttttcgatatctacgttgatagtaatatttaatttaacagagtttttccttctttctaaaaacaaaaatctcaggtttaccaactttaacccttcccaagatttttcaacttttattctcctcttattttaaaccggccactaaccgataacaccacgcgcctaaaccctcgcgtgtgaacctaatggtcatacgttttcaagaacacggtaacacggacgtgagacaaaagtgcgagagagcctctgtggtcactttggtctctctgacagctacgggtccactttctcttttacccaaatatccccacgcgcttcttttacttgcgcgtgaactttcaaaaccaaccaatgctaaatttccgaaactacccttcactctgtttttttgttttcttcgttctcttaagattagttttctcatcacaaataataataaactcttttcttttgtttcatctctttcttcttctctgcgtctttgaggcaagaaaaaaagagaagatgaaagcacccaac

SEQ ID NO: 11110 - DNA, 3000 bp, Unknown
  misc_feature (1)..( 3000): cDNA_ID_1808053_gDNA_ID_2214478_Annot_ID_133183 3000 nt of promoter + ATG
agaccacattaaacagttacttgacgtctaagttattggtaatggatcattattaaccgtaaaaccacaatggactatatactattaagggtaccatcaattggtaaatgactgaatggaatttggcacgtcatttcattctgcaggtactgatgcttttgatgaatatttagaacacacaaaaaaaaaacttttaagaactcagaaattaatcctcaggatctctctatgcttttgcaccatttgggtaatcgattcgattatgtgaagactataataaccaaaaatgctaattttaaaagaccaaaatgattgtatttctagtgaaagtcaaatcttccatataacaaaatcttgcacgcagcctctaccgagttgatgatttggagtttgaaattaatgtaataccttggtttaacaaattcaatatatatagtatatattctattaagggtgaatccttccgagagtatctttgctaaatttatcatgaatatcaaatatatcatagtattatcctattgttagcatatatttgatacactaaagataaagagaaaagggagagacaaaaggtatgaaattggtgataccacataagaagtggttgtgttataggcatgcggctctttaatttaatagtccccaccacatcatacacttttgccccatttctcgaatcttaatcaaacaagctagcttttgctaactatgggagaaggtggtcttgtgaatcatatcacatattgatttctaattatgttaatgaacttttcttccaaagtttagacccttttcaatctgacctaagtctttttgtgtaacttccaaaccaaattagcatggtatattatatacaaacgcacatcaagatggtagtaacacaaaagtgtcgtaggattgaaagacacaactttttggtcttgggattgtttttttgttttgtgtgtgtgtggatcttactgtttagcagggatatccaattaagtacaaataactcaatattaatcacatgttcatagaaaactataattcttttcccctgtctaaagtttacagatttagctgtttcaaaatgtacattattcaataatactatgtacatcattcttaaaacaaagagcaggtccatgataactcaaatttgaatccaataaagttaagatattgaaaagcaccacttggcttaagtaattaaacaaatgcaaagccaagagaccttaaaacctcaaggcagataaagcaacagagagatctgtcgagatgagttagtctgttttacagagaagattaatctttatttatcactcaatggttttaaactgtagtgattcagatagacaaaataaatataaaaaaattgtaacaaatagattttatggaaatagtttggtttacattggattgttctttttcgtttttcggttaccatttgaaccgaatatatttttaacacataagaaccgaaagtgtgaatgtgtgtgcgcatttctccttgtaattcgtgtattaaagaacacaatgtaataattattttgttgctaaaaaaagtgatagtacttaaaacttagttagtaaaggtgtttgccaaaaaaaaaaaagttagttaaggtaaaagggaattgagtatggaaaatggaagatcagagacgagaggtgagaaggtggggatgggccagtaacactcttttagccaacctatggctataaaggcaaaagttgttttcagtttcagaccaaattgaatttgtcttttacccatttctacctctctatttcatttccctaacaacttaaattgttataattcatttttctatggtcaagaaagataatgcatttaggctgtgaatggagcatgcggagcaggaggatccagttgcaagatggggtggattattgattatttgttgccatttacataagttatgttctctagagtgtgtttaggaaaataaactgacttgtcaaacatgtcattctttcttaaaccttgttcgcatccgcggtccatcaataaatgatccaaatagtattggatcaagttagcagagaataaaacgcaaaatcttacgttaactctattttgtacggtgtaactttcaaaatttggtgtagtatttctttgaagcttaacttctagtattagaaggaccttagctttatttgagatactaagcataagtttcaaaatgtatttatctgaaattcaaagaaactcttataggtaattgaactaatgtacacactattcagccttcggagacatacttgtgtcacacaaattgtgtgcattggtcttgcatatgcaattgggagaagctacgtgctcttataacacccacatattttctctattatttgtcctcaaatttcttgagcgttttttttctcttccacgcctaaaattttatagaaagaggaccacattcaagtccctttccaactttttattattatttagaaatggtaaatatgagtgagtcttttgggggtttgagtgaaagtccagccacgccaagctccatttgctgattactgcttaaaaacatcaccaaccgtttcttaattaccttcattgtttactcatgtttattgtgaatggttcattataaaatttctatgacataataacttgaatagctagcatcatctcttgaccaaaaaagaagaagaagctagcatcacccaaattagtcaatgattcaaaacgaaagttttagtacatataagaagaaaaccaaacctaaaactatgagtagtggtagtaaaaccatttcaatatgtttacttgttggaatgccatcataataacaataaaataagaaatgttttaagaaacttttacctgtgaatcacgcggcttacggcttttgcagagaagaaagatatttacaaatactcgattttcacaaaaataaaatacaaaaggtgatttcttgatataaaacccaaaagtcatctttcttctctattgacttgagaagaaccacaacaatg

SEQ ID NO: 11111 - DNA, 3000 bp, Unknown; identical to SEQ ID NO: 11083
  misc_feature (1)..( 3000): cDNA_ID_2705255_gDNA_ID_2214478_Annot_ID_133184 3000 nt of promoter + ATG

SEQ ID NO: 11112 - DNA, 3000 bp, Unknown
  misc_feature (1)..( 3000): cDNA_ID_2705251_gDNA_ID_2214478_Annot_ID_133185 3000 nt of promoter + ATG
atcatccaagacaccttttgctatctacgcagatgcagtttcagacaccacatcagggaatcaaccagagtcagacaagtcaagaccagagtttggtagttggctcatgcttggaggcagagcagagaggaacaaagaaaacaattctttacctagaaaatgggcatcattcaaggttttccctctaccctcctaaacaaaactatctcacttggctcatactatctctataaattgatcactaactgcatttatatttattgtcacaggttcctcagaaacccattgtgagaactgttgcagcagcatctgcttccacctttgaggtttttgtcgatgaagaagaatgtacagagtaagtttgactaatttttcagaagttttctgaacaaaacatgtttccaccattaacatgattctgaaatgcagagaggaagaagaaaagaagaagaatgatgaaactatctcatcatcatcaaacgttctgccccttaatggcggccgtgagataaaaaagtaagcaaaaaaattcccctaaagattcattcaccaaacaaatattatatcatgacttggtagagatctaacaatggttacttaaaaaaatgcagagaaacagagctgctacgacagaaccctttaagacatttcccacccaacagcttcctacgatgatgatattggactttcttctctacacgatcttatggtttgagatttgagcttttgtctataaagctccttgtgtgtttttgcctatttggatttgtttttgtgatgtactgggatatactatcctactatgtaccatgatgtgcctttcatgttttgaaattaatgtgacttgtcttgtttcaatccttatatgatttgtttctcctaaagtaatcattctacaaaaaaaaactttatatcaatttccactaattaacctagattaccacttatgattaaacttaaggaatcattttaataatgccctaaatgtggccaagtcattggtttatatggcaagtgactttgtgatcccaataattttttggtctagtcgtctaggcaactagcgtacctttgttttagaaaaattctagagtttcattgtaaatcaatggatacgtatggatgggtacaaactagaaaagataatcaatccattgggcatttcttccatagaaaataaagtggctttaaacggatgggagggggcataaaacataatcaagcattaatagccatttaaattaatgattaaaaacgaatgatgcgattttggagatagactttgagtggtaaacaagggcaaatgaaaaaaaaaacttgggaattttatttggtgttagtggtaggggcatcatttcatttcacaatctaccctttaggggttttaagggttccctttaatgcaaagtattgcattaagtacgtagctaaacatttatacgactgagtcaagatttctaataaaacaaaaaacaaattctatgcgtaagatgaaattctatattcaaacagaaatggtatttacggtatcgatgtctcttggtttttattttattggctttagtttcatgtcctcttactagcaagcttgaacaaaacattggcattggttctctttctccatctcaaagaacattatggtttaatcttgatttgatttatacatgtttacccttagtcatgtgtgtttcataaatcatatctccattttggatttgatctatttcatagaaaactttgctctatagttctagagctctagagtttctctttctacttgtcaaaaatcataaaccttaacatgtagtagtgatatctctgtttttcttttcttcttacaaaccttaaacaacaaacttttttttatcatgattttttttcttatttttaaaccctcaaaagtgaatatattgatatatctatctctactcgtcagcaagctttcctcatgcttctctcgtcattcatttgctttttcataatgatgttgtcttattgtctacattgttttaaggaacggttagctacgatttgtttatacatttaagtaggctcagaattatgccaacaaaagatagtttcagagtttattgcaacaaaaaatagtttacaaaaagggtcccaaaacccatttaatcatttaaatgatttagggtactgttactaattatgatatgtgactgttgaaaacttctacaatgtttatagcattttttgtaatggaactcccaaaaaccctgagggctcttaaagatcactaggttattaaagcagagactcactaatattgtcattatcttaagctgacaaaaacgtagaaaaatccaaaaaaataaatggcggaggaaattgaccaaaacgcatatataaggattatggagtaaaagcaacttatggtagttggagagaaattaaccaatagaaatactcaaagggcgcgtttattgccataatctacgccccctccatatttacacacaaccatatcataatattaccaaatatgaaaattatatgtgcattatctttattacataaacaataaatacagtttattattaatataagaaaaagataatttttgattttatttttagagtgatcttggccgtagaaaatgaggtgatgaaagtgatgtgtcaaaaaaatcaggaaatagccatatcaagcatgtaatccctaattacggtctaaaggaattaaagattacggtctacttaaattcaacatatctacatgaaccttatgaaaggcttaagggacgaaattaaaataaaatgataacacaagggtcaattttatctacagtcaccaaattaaaaatcagattaagatacattaaaaagtcattatctcacaaaataaatcttttctttgctctttcatttgtagctcctctctctctccggcgctaacgggatgtcctcaccataacgccgttaagtctggaacccgtttgaacggaattatcaaaacgggaaggaatattccgtttgaatg

SEQ ID NO: 11113 - DNA, 3000 bp, Unknown
  misc_feature (1)..( 3000): cDNA_ID_2705247_gDNA_ID_2214478_Annot_ID_133187 3000 nt of promoter + ATG
acttgtctgactctggttgattccctgatgtggtgtctgaaactgcatctgcgtagatagcaaaaggtgtcttggatgatctgcaaaagacaaagttgcttaccatagtgagttgcagaataatttaaaggtatgagttgatagaaaatgcagataatgaaaacaacgagaaatatagaaccaatcaaactacttactgatttggctttagctttttggcttgtgggttagaacttcctaacgcctgccttcttgcatctacagaaaacattttcatgtaagatagcttaccaaaacatttcagtggtttccaagttaagttaatgtgactcactattatctcccctggacaataaagtgccaaagcttcttgacggtaagtcattattctcctttggttcctgctggtaggtagaacattaattatgattaggaaaaaccttagtccataatgaatagatataaagtgttacaaagagacaaaactttttacttcatcagctgtgttggaccttctcatcgttctcaccataaacttcttgtacgcgtcattcaacttttccactggctttgcatccctgcacaagttcccactttcaaatcagaccaataacttggagccgaaacatgaaagtaagattacatatctgttcatttacctagagattccaagattgaagatctcattagcagttttgaccttattcttaaactcaatgtgcaaagcataagctatatagtagacagcatgtgtctttccaatctcattgacctccaaaaacttgtaaatcacttccgcatcagcgcaatgctccgccttcaaaacacacacaaaaactatgagtactctctccataacaaagaaagaatcatctagagggtttaattaaagatagaatcattacatattccaaccagactttaagataacgaagatcatccttgtaacgttcagagtgccaaaatttacgaacacattgctcatatatcactaacagtcctgaacattctcctcctggtggaaaagcctcttgtacccattttatacaccttccaaagaaaccaattaagaagctcagtttacaaattggtcacagcataaagattggttcaagaaaaatttcaatttttcaacaacccaatcaagaatgataaaaggaactcactctatccatggagataaagggtcatctccttcatactcatcaatggcttcaatcaaattcctaattcacaaaaacaacacaaaattagacaagaatcgagcgattagactaaaacccaagagcaaagatgtgagattgaaatcagtacctgcgtttctcgatgagattctttctcaattggtggtcagagtgagatttgagagcgtggttgagaataccaacattgcgacctctcttcaatggccggacgttctccttgaaaagctcccactcgtatccagtctcctgcttcgaattaagaaactctgcctctggatctgaaacctgaaccttcgtttcggctgccatcgtcgtttcttcgagcaaattttgaatatcagagagaatatagccgttagtttactcaatgagagagcttcgcaactttttgctttgatgtacgcatactcggagcgtatagacgcttttgatgggcctaacttagatgggccatgatttgatttcttaaacccattaagtggccatctaaaccgaattgtgtatactcctactacaaataatcgataagagaagaaaaatgacaatgagcgaaagtaaaatagtaaaagaaatgacagaatacacttcattaattcaattggctgaacaaaataacacaataatccagagaaaattatttttactgttttgttttcttctaaattagatggttttggtcttttggagaataacaatcaaagcaaaagataaaagagaagatgtactctttttttaccttctttaaataaattacgagcataattcactttttgacttggaagctaaaaaaaagttcatccacaaccacaagatgctctctgtctgtcggttcaacaagggatgatcacatacattgcgttacacgctaaacctagtgtgctcaattatgaattcctaaacaaaacgtactcaagattagaagttgtatacaaagtctgtttttccattgtaacaacttccaccgacaataaaacagtaacagtttattgaagaaaatgaaatgaagaaaacataataaaagaattgatatttatggtatccttcagtttgggaatgtgacacacatgatctcctttattgacgtttaagtttggaaaaaaaaacaagtctttaaatgcatgcaatcgtattcgcaatcaatatacattttgcttgttattactaaagtctaaaactaaaagccttttgccgtacgtttaagaattccataactggaagaacaaatcatgtttttaattcaaatgtttaaaacaaagtctacattcaaaggaatttagaacacactttttttttttactttttgctgggaattcacaaactctttaacgagtctattcacatttcacctttccgtgcccaaactcattcgatttctctaaccgaaactaaatcatcaccaaagaaggtacaccgttacgccaacttgcccaaaggaccatgtgtccccaccatgctgccaattgggagccagcaatacataaaacagacttgatccaactttttacaagttagatgcagtgtctttttcgtaaatcataatagatccaagcccattctcgtataacctccaccacatcactcctcatatcatatgtgagacagccacgagtcttctaatttctacacgccgtgtcggcaaagcctctcgtcacttctctctgacgcttgtcgtcacttttgaatttttttaatttttaaataattgataaccgaaacggtgcgttttactcaccgtcgtcgggaaaaaaaacatgaggaaggaagttttgccgccggtgttatcaaccaccacagt

SEQ ID NO: 11114 - DNA, 3000 bp, Unknown; identical to SEQ ID NO: 11081
  misc_feature (1)..( 3000): cDNA_ID_1033921_gDNA_ID_2214478_Annot_ID_133189 3000 nt of promoter + ATG

SEQ ID NO: 11115 - DNA, 3000 bp, Unknown; identical to SEQ ID NO: 11080
  misc_feature (1)..( 3000): cDNA_ID_1808370_gDNA_ID_2214478_Annot_ID_133190 3000 nt of promoter + ATG

SEQ ID NO: 11116 - DNA, 3000 bp, Unknown; identical to SEQ ID NO: 11079
  misc_feature (1)..( 3000): cDNA_ID_1807490_gDNA_ID_2214478_Annot_ID_133191 3000 nt of promoter + ATG

SEQ ID NO: 11117 - DNA, 3000 bp, Unknown
  misc_feature (1)..( 3000): cDNA_ID_3034366_gDNA_ID_2214478_Annot_ID_133192 3000 nt of promoter + ATG
aaaatgttttttttgtgggacaagttaaaagtggtagaacatcaatttattagaaacaaagagagtgtatttttctttcttccccatcgggaaaccaaacccaatttatttatatattaaactcgtacaatataaaatcttttatatttaactaaaaattcagtaaatatccattcttcgtaaatatttaaactctattttttctttttaaaaagatcaatttacatcttaaattcaaaatataaaccataatatattatgtacatattaatactgcattctaaacaatttcccaatataaaaaataaaaatatatagaggtaaataacttatcataactactttattgatggcctttataattagtttctgctttggtagaattttttagttcagcctttatctcgttatctgcatgtctctaattgagctttgttgctaagttttagcttttttttttcttatgcgatcactttgctggttgttgtgttggttggttcggttccttgtacctttgatgtatcctctatttctctttttatctaggttaagcttttttattaatgaaatattaagtttgattggaaaaaagaggcacattaatagaaagttagctttgttgtttaggttttatttaatatatgtacgtgtgtcatatgtcataggtaacaatcttactatttgattattaagccggtttttgcgtgacggaactcttcttgtatttgccatcaagtgaaagaaagaggaacatctttgccatagtttagtttgcactctctattggtagcttgagttttcagctattcgaatgtggccttctacacctgcttcccttctatttgacatacttatcatgtggtaagctaacccatccgtcaacgaggaagtacaccacatatagtaagtatatatattagactatctagatattttgttaaagattttatgtaaataacttataaaatatattgttattgttttccaaaacaaataaactagttgacacatacttcttaagttcattgttaatttatataatacaacaacctaaacccatggtgatgattacctttagatcactaaaacttttatcaaaaattttgcctaattttcagtagattccatcagagaaacagcttttctacaaaaaaatttcaccaccaaatctcttttctttaaaacttatcaccacaaacacttgtttttctactaacttttttttaatattgtaaaatcttacaatattttaaaagttaaattttgcttatttcacgtcaatttatatgtctcttacaaaaataacaatatttctgcatcaacaatattttcgagtcattaatatatatgttttacaatattgtaaaagctaatgttttttaataaatcttaaattcattgtcaatatacaacaacttggacccctagagatgattacctttagatcaccaacacttttatcaaaatgttttcctaatttttagtagattccatcacggaaactgttattctgccaaaaacaattttacaccaaatctcctttctttaacatttatcactaagactttttcactaacttttctttcaatattatgaaaattaaataataaattttacaatattttaaaagttaatttttgcttattttccacgtcaataatatatgtctctttaaaaaacaacaatacttagcttaaaaagtattatatttctagatcaacaatatttccgggtcattaatatctatattttacaatattgtaaagctaaaaaaaaaaaaatctatcttgcgtgtcaataataaatgtctcttactaagaaaatatcaagattttgtctaattactaattagaaaggaagcactaatttttggggtgaaaaaatatgatttctggacaattagataaaaaacaaaaaaataattggactaaataaaaataaaagataaaagtgaaaatatttaaaaaaattggggataataatccaaataaaaagatttggtcactgggacagattccgcactatatatatattcttgtctaaagaaaataaaaaaccctaaaaaaaagaggcagacagagagatctcctctttgtctttttactttatctcctgaagtttcgcctcagtcatctcgtaagttttctctctctttctcattcaattcaatttttaatgtaatttcttgtttgatttttctattttcttcgagaaaacaaaattctcctgtaaaatttaatattataaaagtggtttctttttcatttatgtttatataattttcatctttaatcttaaattctggtaaccttaatgcgcgatccgcttttctaaagttttgtgagagagaagagatctaaaaaaatccacaattttgttcaaatcttggagttaaatgctgaattttaggccttgttgcttagatttatggcttaaagtttcaaacttttcattggatatggtacaaatcttgtagttaaacactgaattgtgtccctcgtgggcgttgttgctttgatttatggccaaaagtttcaaacttggatatggtacaatcttgtagttatacactgcattgtctctcttgggtgttgttgttgctttgatttatggcttaaagtttcaaactttttcttggagatggttcaatcttgttgttgaaagttgaaacactgaattgtctctcttgtgcgtgttgttgcttagatttatggctaaaagtttcaaactttcttcacttcagagcttcttgaatggaaactatggttttgtggttttggttaatcttctgctaacactttttgccctgttttggtttgggaaagtgagaagaaaatgtcaggatctgagacgggtttaatggcggcgaccagagaatcaatgcaatttacaatggctctccaccagcagcagcaacacagtcaagctcaacctcagcagtctcagaacaggccattgtcattcggtggagacgacggaactgctctttacaagcagccg

SEQ ID NO: 11118 - DNA, 3000 bp, Unknown; identical to SEQ ID NO: 11077
  misc_feature (1)..( 3000): cDNA_ID_1808535_gDNA_ID_2214478_Annot_ID_133193 3000 nt of promoter + ATG

SEQ ID NO: 11119 - DNA, 3000 bp, Unknown
  misc_feature (1)..( 3000): cDNA_ID_2705350_gDNA_ID_2214479_Annot_ID_133200 3000 nt of promoter + ATG
cacatcgattactcgagatattgtttaagagttactactctctttggataatgaactagaataaaagataacattctctcttaagtctctatttatccttccttgcactattgtagttgccttctagcagttgaggaagtagctcggtaaacaaataaaacgattgaaaacctacccaagttcttgtaaagtgatactggtctatgatctgtaagaagctaacttgttacaatgctttcttgtttgtaaggttggtgctaaggatcaccagagatttcaagcatcatatgccaccattcttaaggcccacatgactgctttgaagaagagggaaaggaaagaccggaagaaatcgacagaggcagagaagaaagaaagcacttcaaccactaaatctaagaaactttgatttctccttttgtgtttctcattgatttgcaattgctgcttaagagttgaattttgaaagctattgaaagatctaaaagattttgacttgtgttataatagagattttggtttgcatttgcttttccctcgagaatgttcatcgtgtataaataaaccaattccatacaaatgtacgaacataaatccaattcaaagaaactgattctaaatttcaaacactaagaaaaaaaactcaattgttattatggatctcttcctgttcctaacctagtaagatacctcatcagaatttgattccacataagcttcatcagaatttgaatcaacataagccttgataacacgtctgtacttctcagggctatcataccaggttggtgtgttgatgatcgccttttctagccaatactcatcatacactctttgcctcgacatcttctccaagaatccgttccaactatccatggctcgggtcaatcgaacagtcttaggtcttcccataagaaacctaatgtaatcccttgcaagcttgaccaattcctccccagtgataatgtatgtgtactgcaaaaacaaagatatattccatcaaagcaagatacgatatttgaagttcaaatctttcctgaaatttgtgtcatttaccaaaaagatgaagcctaaggtcgccaaaaccacttgcaaagtttcatctgcgatcccagcaagaccaccatcttctcctcctgacccttcaggacgctcctcaccatttccaccaccgccaccactgcctcctccacgtggaggcatgttgccgccactgtcagtatcataaaagtctttcttctgtatctgctctcgcaacatatcttcaaccgatttcttccccatagctttctctattgctttccatggcgatatctgataacaaaattcattacaacaatcactaagaacaaaattgaaaaaataagaagaacacacttatcatcagcaaacagaacagcaaagttcttagaaacaaacacaaaagaaatcactctccagttgcaaagtaaattcatttacaggcagaagaacttaacatgaggaaaaagcatctgacctcatcactaccatcaggtttatctttcccaccaaataagcacacagcagaactttgtttcgatttcccagtaggtaaacgacggcgatgatcaagaagaggcgaaaactgagtagacactgcagcagtagctcgaagagtaaacgaggtacgcgggaagtgatcaaagcgtactgaagacctaataggtacactggagatgcaatttggtcgtgttatccttgcaggatagtaggatggtcgaaaacaattagcctgagtaaagctcatcttttatcccaatgtttctcttaatgcaatcactttctgaaaagaaaacaaatcaacagcaaacaacgaacacaaccaattagaacccaacattgaccaaaacaaggattcttctgggcatgttcagaatttgagtatatccatttctaatccaaattcggagaaaagaacaaatctttgggataattatatcgtagtcatagaacaataagcaatataagtaaccagaaaccaataacttcgaatgtgatagaatataaaggcactggttcggtaaatataaggtaagaacactgagcaagctcgcaagaaattggaatatcatagagaaaggagagtaagaaaccataaatctaccttttcgaagctttgatgagacagagactttcgaaaccctagtttcgcttggagagaaagaattcaattttttttcccctttgcgtcgtcctgaaacacaacggaggagccgaaactctgtgagagatgaagcgatcgacaaaagtttttatctatcttgaaagatgcagcttaacggcgtcgtttttcacttgagctccgatggttctagagtctctagaccagggttggtaagactaaaccgctttttattgatatgctggtttaattttgacgcatgactatttggaaattgcaataattgagttggatttttctaattttggttgattttgatttataaatagaaacattttggcttcactagtcatttttctcacaattccatacaatttttgttaaaaatcaaagtaagactttaaaagaacgttctaaatgctatattagttgaccaaaaaaaatgctatattagctaacaatatcgtttgagctaattaacaaaaacttggaactattcaatagaaaaatctcaaacgtttgaactaatctaaacttgattatctcaatcaagtttttatgagaatgattttcatccaagtaacttggctctttaaaattttgattacatattcgtttttgatctgatctatgaccgacatggaatttctcataacgacaagagaaaaaactgtgtcattgacttttgttaagtggtacaaagtggcattgactttgactcagaaaaagccaatcaataatcgtgaaagatgtctaacactgatcaatatttcaatttgaatagaccaaatttacactataaatacatcaacacaccttcttcatttcttcacacaacaccctccatacacaaaatg

SEQ ID NO: 11120 - DNA, 3000 bp, Unknown
  misc_feature (1)..( 3000): cDNA_ID_3038701_gDNA_ID_2214479_Annot_ID_133201 3000 nt of promoter + ATG
ccagaaaaaaggttgaaatttagtaaatgcgtttattatggattggctgatagcctgatatacttcattctgtgacaaccgattcaaacaacacattggtacattaggatacaccgcataatcttttttattcgacacctttagttataaactcacacgtgaacgaccacacttatactatgaaaccgtgtcatacgaaccacattttaacatctttagcaactaagatttgctccaggagtgatcccaagcgtcctgcagaactccaagtaatagtttactctgctctgcacggctgcaggacgcctaccgttgcattcaccaccattgatcttcctagtggtggctccaaagccttggtccaagactggacgaacatttaggttccagaaccacatggcacactgaaaggcaacttgggggctacgagccaccatgtctggatcagtcaagagagggagtccgaggaactttccagctgcaccgtaattgtagttccatgtgatttggattggaccgcggccgtagtagtcttttcccggtgtacaagggtacgcagtgctcggtgagcagtatttccctctagctatttcttctttgtagcaaaaaccttgcataacgtaaaagaagatcgttatttataatagagaatgaatatgtatgaattttaatgataaaagaaatgatttgttaacttacccaagaaacattatggtgcttaattagtgtaataatattcttgataataataattcattaatttgcttaattaaataattagtatacatgcattcatgtagtagaactagaagggtttataaagaacttacttccagattcatgagaaaactgagccaacatagcggcaatctcacgcttagcgacggttcctttataggcgtcgaacgattgggcagccgcaatgaaagcctggcgagtgtagaaccctttcgctggacagccatttccgactttgctcatgataccatcaaaaaatgctggtgtgacaacattttcaattgtatcacgaggatcagcgtttagaccgcctgcaccaccgctaggagttggtgggataggtgtggttgaggagctgcaaggtccacttcggcacccggtaccacagtaggcatctgtggtgccacaatatccatatctactgcaacataagttggctgcacatccggttgtaccgcactgttgcgaaaacacggtttttgccatgatggttaaggtgaagagaaaaaggatgaaagcgtttttcaacattgctcttagggtagccattttgtgtatggagggtgttgtgtgaagaaatgaagaaggtgtgttgatgtatttatagtgtaaatttggtctattcaaattgaaatattgatcagtgttagacatctttcacgattattgattggctttttctgagtcaaagtcaatgccactttgtaccacttaacaaaagtcaatgacacagttttttctcttgtcgttatgagaaattccatgtcggtcatagatcagatcaaaaacgaatatgtaatcaaaattttaaagagccaagttacttggatgaaaatcattctcataaaaacttgattgagataatcaagtttagattagttcaaacgtttgagatttttctattgaatagttccaagtttttgttaattagctcaaacgatattgttagctaatatagcattttttttggtcaactaatatagcatttagaacgttcttttaaagtcttactttgatttttaacaaaaattgtatggaattgtgagaaaaatgactagtgaagccaaaatgtttctatttataaatcaaaatcaaccaaaattagaaaaatccaactcaattattgcaatttccaaatagtcatgcgtcaaaattaaaccagcatatcaataaaaagcggtttagtcttaccaaccctggtctagagactctagaaccatcggagctcaagtgaaaaacgacgccgttaagctgcatctttcaagatagataaaaacttttgtcgatcgcttcatctctcacagagtttcggctcctccgttgtgtttcaggacgacgcaaaggggaaaaaaaattgaattctttctctccaagcgaaactagggtttcgaaagtctctgtctcatcaaagcttcgaaaaggtagatttatggtttcttactctcctttctctatgatattccaatttcttgcgagcttgctcagtgttcttaccttatatttaccgaaccagtgcctttatattctatcacattcgaagttattggtttctggttacttatattgcttattgttctatgactacgatataattatcccaaagatttgttcttttctccgaatttggattagaaatggatatactcaaattctgaacatgcccagaagaatccttgttttggtcaatgttgggttctaattggttgtgttcgttgtttgctgttgatttgttttcttttcagaaagtgattgcattaagagaaacattgggataaaagatgagctttactcaggctaattgttttcgaccatcctactatcctgcaaggataacacgaccaaattgcatctccagtgtacctattaggtcttcagtacgctttgatcacttcccgcgtacctcgtttactcttcgagctactgctgcagtgtctactcagttttcgcctcttcttgatcatcgccgtcgtttacctactgggaaatcgaaacaaagttctgctgtgtgcttatttggtgggaaagataaacctgatggtagtgatgaggtcagatgctttttcctcatgttaagttcttctgcctgtaaatgaatttactttgcaactggagagtgatttcttttgtgtttgtttctaagaactttgctgttctgtttgctgatgataagtgtgttcttcttattttttcaattttgttcttagtgattgttgtaatgaattttgttatcagatatcgccatggaaagcaatagagaaagct

SEQ ID NO: 11121 - DNA, 3000 bp, Unknown
  misc_feature (1)..( 3000): cDNA_ID_1399134_gDNA_ID_2214479_Annot_ID_133202 3000 nt of promoter + ATG
tgagtgacagcgagtaagatcctaacttctaccttggctgtgtcttgtgtgattctatctactgaatcagaaacaggtgaagtgagctgatcttctttaaccaccttttgcactgctccattagcaatacttcttgctagggactcttcaaatccagggggaagctcttcatcaagttctttgatctaattttaaacaaaaaacatacattaactcagcagctttaatatataaacaaacatagcttgactagttgtagaagtacaacatgtagattgttgagagattaaaaacttaaaagggtacaccgcagaaccttatctaataaagatttgatctcgacaagacgggcaaggaccggatgatcacggatgggctgcccttcagacttgagtagaagataaaatgttatagattggcaataggtaagtagcagaagctgcttaacctccaggtaccttgctaaaccattcaacgaaatttctccttcctttaactgcaaggagacataattgcataaatttctggaggagtcacaaatcccttctttcgaactagggtgatataaagtggcaatatagaaacatattgaaaaaaattgtgaaacagtaaagaggtttaccttattcataacaggatttatcttactctcaagctcttcaactgcatcgttcaactcagacaaaagaccaactatttccggagcagaactacacgaaagacatatcacgtgaatattattttacataacatgtaagaaagtctaatacaaaataaactaagttaatgaaaaatttagaaccagaaaacatcaacattacctatatactacatccatttgctcttcttttgacaaagagtttatgtctttcttgatctcttcaacatgtgtatccttatcacccttctctttcttatctgtgatggattttgtagcctgcttacctttgtcagaaatttcctgccaaacataaaccagaatggtgcgtcaatgatctaagcaacaggatagttttcaactacatgatagtaacttgtaacacccatgacccacctccatggttaattctctgtcgctatcttcttcactatcatcgtctaacccagcatcagctgctgttatggatccaagttgttctgcccgtagtcgtatgacctcttcttcttccgctttaatgtcttcatcatcacttgataggatcttcaaaatcacatcaaaccagattagccacttacgtagagtttgtttcagagttaacagaatattaacaaaaggaatctagcttttaaaagaaatggaatcgaggcaaataatcagtgggttgcagatgtcgacacttcttacatcaaaatccacattatcaccactatggtataggccacttcttccgccccatgtgctccttttgtcttcctctttatccttatcatcatcagccatttcatcgtcaccatcaccaaactttgccctcagatatttcttctgcctaatcactgaacaattaaggccccgatgagaaaacgaataaggcacttagaaaaggagtagctacaggtataccattcagacagagtagatgcaacaactaactacatatagtaaacatgacataagaaggcatccttacttttcgcagtaagtccattctcggcctcctcttcgtcttctgtatcttcatcctcctcactttcatcatccacaccctataatccaaacaaaactgaaattgaaagggaagcaattgaaagaatcgaagcaaaagatgtctagaaacataagccaaaaaacaaacctgtaaatcaaatacaggttgcacatcatcttcatccgattcatcagtatcatcattaacatccaagggaactatatccctctgtttatgaactgtggacaaaaaaccaaacatcagacataaacttacaaaatctcaaacaatgagcaatctatcacacatatctcatcagaatcgttaattaagaagaaataagctagtaagcacttaataataaggacatagtcattccaataatcaattaagctttaggaaacaaaagaaaggacaaatttttcgaagtgggtagaagtttacaggcgtcaatctcgtcgtcgtattggtcttcgacgatatctttgcgagtttttgtgcttttgctacttctcttcaaagtccctccttttttccccattgttgtgttgcagagcaggttctggggataagcaaacttgtgcaactttacaatcccttatcgaattagggtttccccttcacaaatatcagctcgacggcaacgattacctaaagtttctacgacggggaacaatttagaggatatcaatggtgtctgaagaagaagctgagtttcagagaaagagaacgagaacgtatcgttaaaaccctagtaaggttttataaattactgggcctaataaggcccattattatctaaataagcccatatttaaatggtcctttagtactaagagtatacccgtcttttgatttgtggcgacttcctttttaccgaagagactcctccggccggtgagttttcggacgcagatcatcatcagattcttgtctctctctggtcagtttcatagtttttttctaagtttgaattctgattcttaaagctcgtggcttttgagctgggtttgttgacttgatcggatttgacgcctcctaattgttgcgaattgaattatattgtttccgtgttgtgatttgtcagaagctttgacgatctagggttgtatatcaatggtgtcttagcgtagaattgagtagaaatccgaatgatttgaagaaattgtttcaattgtgcttagattttatgttgcgtattccatttatatcgacaaagttctaaactttaagatctaactcttccctgcacttgcattgtgtttatggttttctctctcagttatctgagtgataagaagtattttcagtgcttgaggatctgcaaaagatatccatctgcggtttaacaatg

SEQ ID NO: 11122 - DNA, 3000 bp, Unknown
  misc_feature (1)..( 3000): cDNA_ID_2705361_gDNA_ID_2214479_Annot_ID_133206 3000 nt of promoter + ATG
ggttatagtgggaaggaatgtgggaagaatcaattagttgaaatattttattattcttgcttgaatgtattccaaagtataattatatgcgtttttaacactaattagtaaatcatttttccaagtccctaaacgatacattacatttgattcgcatgtcttcctcttagaccaagaacaaggtcgagttttttgtcaacagaaatcttctccccgaaacatgaaacaacttatagagcaaaagataaatattatgaactttaattgcccaagcatctgtgatccagtggtgggagaagatttggggaagggtgaaactttcagagctgggttcgatcctccctggaaacaaaaatcacatttgtttggaaagtctgtcagttgggctttagcccaattggtttacctggtagtcagaaatgcaggcggcctgactaccccctggcattagtcggaaagcatccaaattcgggacagacagtgtggtggtctttcggggagaagtccactctgaagtatttcggtgcatttctactgaggctgaccggatcagccgataaagtttataaaataaaataaataaatgaactttaattaaccagaaaatgtagaaacaaaaaatcttactaaacctatgaccaaaaaaaaaaaaaaaaaaaagttgtggagtaagaagtatgaagcgttttatccaacatatcccagaggagaacagtgattggtcgatgtcacgtgaaataacatttggcaaatagtgcacaaattaatgaaggcaagaaagtgagaccagacgcgagatgtgagcgcgtatgaagaaacatgatgagacaacaaagagaatcaacctcgtctatgaaaatttcttcagattctcttctcattgcgataccaaacaaaaactcgtagtatatttttgttggtcgtttttgtacaaaatatataaaaagcaaactgtcgcaattatggtttgtatattatacaccagataaacaaatcagaatctctccactaaacctaatatattttaaaattttgataagtctatatacttttttggcggggacaaccggatagttcttctttgagacttctggcttttttttctcttgatgataataagaaactgtatgaatatttgaaaatgccttatgacgttttcttaccaaaaaaaaaaggcaaaggaactacaaaagatagcttaaacaaatttagacaattcatgtggccttaccttaagtattttagtgatgatacgattttaaaattattagtgccattctatcatgttctatactatataaaatattcattcaatattgatttcatagttaaagtttacaccaaaaaattgacatcacatcctatcagctacggaaatggttaccaacacaaaatagtatatctatgtcctatatatatataggaatttaagacaaagcaatattagtctacttttggaggagatgaaaagttacaagaagtctccctataaaacactattaatgaaccaaaaacaatctactaatcaaacttatagtctactagaggtactttgttaccgtttggttagggatgagtttcaacgtttgtggtggttacaatgaaggtaaaagtaataggcccaagacattgagtgataaagtgactaactctttctctttcttcatgatgataaatcgatttgattaattccaaaaaggaagtaggaaagaaaaagtttcgaaattcatcgcaataccaactagacccagatccaaagttgcagacttttcaaagtaatttacccacacacactctaaaaaggatgggttagagaagactaattatttttcttaatagccaattaaaatagtatttctttattgtgtgtttgcgttagaaaaagatatgagagctgagagagagagagaggaagcagaggatagacagagagaaaagggaaaattaccagacaagagttcttctttcttctctctgcctgcttctttttcctctcttttctctctctctctctttctttgtgaaaatctagaagaagagaaagctacaaaaatctcaacatcgaggtatgttattcgtgtttgcttacctaggagatgatttaagttctgtttcttgatttttcactttctggttttctggggtgtttcaaaagatctgtctttttttgttctctttgatgtctctagtcttgttgggatgtgaaacacatgattttcgaggagtagagagagacagagagaaattaagggaaagagctcacttgtgtgacttgttctgtgagaaaattctctaagcaaaattctcaattttttcagcttctttctaatttatgcatattaaaattcagagcttttacacttgaaagttgtcatctttgtctcagtctctctctctctctctcgtttgcatagaagaaacaatttttgtgttgatttagtcagttcacctaatctgaagagaagttaaaaagtttggctaagatttgtcaaaaagttaaaacttccttttcatggaagctcaacaacttaatctctttggcagtttccttatcttagtttctttggatctgcctttgattttctttcatttgtcttttaactgcagtttccaatttggttcatgcaggtaagagttttggctacagagcaaccatgctaacttgcgccttctcccaaaatcttatccactaatctcggtaagcaatacttctgttctgatgatcaatacacaactgtactagtcttgaagtttctccatgcatagatcttagaactaccataaaggttaatcctttgagcctgaaacaaaggtttgagttctgtttgattgtgacaggtaaggaaagtgatgttggcaaaatggtgaagaaaggaagttggttttctgctatcaaaagggtttttactccacattccaaagagaagctagccaatgtaagctggttactccttactggattttcttagcttgcaaaaatgttttattacagagtttttg

SEQ ID NO: 11123 - DNA, 3000 bp, Unknown
  misc_feature (1)..( 3000): cDNA_ID_3100848_gDNA_ID_2214479_Annot_ID_133209 3000 nt of promoter + ATG
taatgtcaccttatcatcaccagaggaggcttattacccgaacaagcctcttctttcattgaaccaagatctatcaccctatattttggagaacatgtatgtgggcttctcagcctcaacggggtctgttagagcaatgcattacatgttgagttggtttgtacatggcggcgttgatgttccaaacctggacttgggaataccaacatttcctccatatcccaaggaaaaatctctggtttatcggattgttttggtgaccagcttggcattggttctctttgttgcgcttgttgcatcagctttaagtatctttttctacaggagacataaaaaggttaaagaggttctagaggaatgggagatccaatgtgggcctcataggtttgcttacaaagaactctttaaagccacaaaaggtttcaaacaacttctaggcaaaggagggtttggtcaggtctttaagggtacacttccaggttctgatgcagagattgccgttaaacgaatttcacatgattcaaaacaaggaatgcaggaattcttggctgagatatcgacaattggtcggcttagacaccagaacctagtcaggcttcagggttattgtaggtacaaggaggaactctacttggtttatgactttatgcccaatggaagtcttgacaagtacctctaccacagagcgaatcaagagcaactcacttggaatcaacgtttcaagatcatcaaagacatagcctctgcactctgctatttgcatcatgaatgggtacaagttgtaattcatcgagacatcaagccggcaaatgtcctgattgaccaccaaatgaatgcaaggctcggggattttgggttggctaagttgtacgatcagggttatgatcctcagacatctagagttgctgggacattctggtacattgcaccggagctcataagaagcggaagagcaaccacagggacagacgtctatgccttcgggctgtttatgctagaagtctcttgcggtaggaggctgatagagcgaagaacagcctccgacgaggtcgtcctagctgaatggacattaaagtgctgggaaaacggagatattctcgaggcagtcaatgatggaatccgtcacgaagacaatagagaacagctcgagcttgttttgaaattgggagtgttgtgttcgcaccaggctgtagcaattaggccagacatgtctaaggtggtccagatcttgggtggtgatctgcagcttccagataatctactcgatatagtcaaagcagagaaggtcagaatgtggtctgagacatctgagagtgtacttggtgttttgacatcacaagggtccattggtaccttgacgttaacggaaccttttacctcccggggacgctgagacgtgatgctgagttcggtcgtgaaatgatatatgacatgtttgtttgtaaatattttatgttttcgattgatgacaaaggagtcagaaaggacacttgaccatcacggaagcgatgacttccgtcggacggtaaaaagtgatggtcgaggtttggtgagaaatctaaaaatgtgacggtgtttgcttgataaatatctttattttggtgattgtattgaatgtatcgttttgatttctgtttatacttatatcggcggtggaataattacacatgacctgaaaagtatgcgtttgtgtttacttttatgttgtagtacttgttgtgtttttcagctatgaaaagtctacatatttcttctgtgtgctaacttattggataaattggatatttttaagagatctaatgtttacacaaacgtatggtgaacaccaatggggatgtttacacacacttatgatttatgactgaaagagatgttaatcgaagtatatactccattgattaatgttaatcaccgaaagagatgttaaacaagcattaatgtttacacttaaatgtgatggaacgaaaacaaagaataagtttaaatttgttgtcatggtctcaatgaaaaaccgaaaacgttgtgctatcaaattactcaaaacgttgagctagctaaacttggcagaaaagtatcgaatgatgctaaaatgcaaaaaaccattaaacccaatgtacggtttatagagttttcatatgccaagtgggacatccacgtggagatcctatgccacttgtcccctctctgtctctttcatgcttcaaacttatttggcttttacgtggattctcacgcccgagtacgtcgattattacaaaactcacataaattaatataaacactttatattttgttttgacctttttaccccttctcattgctcatcaattttcatagatctaataccaaattatcacacatataggagagtcatctaacaattagcacaagtcatgagtgaaagagactaagcatgaatcataatcatctttgacataggtgctcaaaagtaatcaattttttcaactttactattcaactcaataaaagaatttttaatcaacaattcttttcaagatgtatcccttttttttcttgcaactttttctcaactatattaatatttagtatactgctacttagctactcgatgttttgatgtatcattgatcattattgttgactaataattatttgatacaaatattttaccgacatatgtaagaacaatagtgtcaaaattgaagcatctcaagggtattttagaacagatacccaatttatttatttttataatttgtcaccttgtttttcacacacaaatgacaatatgacgtcattttccttattagaataatttttttaacaaaaaaaagaattatttattttcgtctctcttattgcttgctacgctcaacgctgtgcataagcattctctttctgtggacgaaactaaacctgagagaaaaagccagaagaaccaaactcagaccgagagatagagattgagggagagctctagctctgtagaaaagaaggattcattcatcatatccagaa

SEQ ID NO: 11124 - DNA, 3000 bp, Unknown
  misc_feature (1)..( 3000): cDNA_ID_1025215_gDNA_ID_2214479_Annot_ID_133213 3000 nt of promoter + ATG
tgagaagtaggctaagatggaaatcatgtcaagagagaatgagactgctttgtcaggtcctaggccgatggaatggtctaccgtcccacacagtgcttctcaaggacctggtcccaatggcaagaaccggacctcgagcttggaagcacctatcatgttgctaagtggacatccgagtgctgtctataccatgaagttcaatcctgctggaactctgattgcatctggatcccatgacagagaaatcttcctctggagagttcacggggactgcaaaaacttcatggttttgaaaggtcacaagaacgccatccttgatcttcattggaccagtgatggctcccagattgtatcagctagtccggataaaactgtaagggcttgggatgttgagactgggaaacaaatcaagaagatggctgaacattcatcgtttgtgaattcttgctgtcctacacgtagagggccacctcttatcatcagtggatctgatgatggaactgccaagctttgggacatgcgtcaaagaggagccatacaaacatttcctgataaataccaaatcactgcagtcagtttctcagatgcagctgataagattttcactggtggtgtagacaatgatgttaaggtttgggacttgagaaaaggtgaagccaccatgacacttgagggccatcaagatacaatcacaggtatgagcttaagcccagacggttcctaccttctcactaatggaatggacaacaagctctgtgtgtgggacatgcgtccttatgctccacaaaaccgatgtgtaaagatctttgaggggcatcaacacaactttgagaagaacctgctgaaatgttcatggtcacctgatggtacaaaagttactgccggtagctcagaccgtatggttcatatctgggacacaaccagtcggcgcactatatataagctcccaggccataccggttctgtcaatgagtgtgttttccacccaaccgagcctatcattggatcttgcagtagtgataaaaatatctacttgggagagatctgaatttcaaagctgtgaaacctttgcaactctaagtggaattgaagtctttagaatcgacgatgtgctttgagacattttgtttattgaaagaaaaaacgaaacattgctctttggtacaagtaatcaagatttgttatctcctgtaatatcttcattacgctctttatcttcttctactttaacagatgaggtcatcattttagttctccttaaaattgttatctttggtattacaatcttgcagtatcttcgattagattcttacagattcaagcagtagcaagtataagcccagtccagtaaccaactaacgcatataagtctttagattcaacaatgtgcttaagaaagtttgtctattgaaagtaaaaagcgaaacagtgttactgctacaagtgatcaagaagaagatttgttatctcctgtaatatctttatgctcttcatcttcttctactctaactttgcttccacagcaacctcttcttctatgttcttcaaccacagttttttttacaatgctgtctcttttctctgcaagctccaatcttttctccataaactcagaattctccttccaaatctctccattagtgtaaacctctttcttccatatcggaaccgatgccttcaactcgtcgatcaagaacttgcaagcatctaaaccatctgcacggtgaacagatgagaccgcaatgagcacgctagtttctccaacaggaactggtccaagacggtgagcaacagcaatcttgtggatatcccaagttgatctagcagttgtacagatcgagctgaggcatcgtgtggccattggcacatatgcttcataccttaactccaacactgtcttgccctcgaacatgtctcttgtagtgcctgagaatgtcgcaatagcaccagcttgaggggcactgacataatcaatgtacttaacaacatcgactttgtgaccttcctccaagatctctataaggttcttctcctctgcagacatctttgatccaatagtaaacctcgatacaatcgatgttctaggaagagtaaaccaagcttagcagatgatccgatagcaaattctaacctgcaattggaggaaataaacaaccatgactatctcatcacctatcatccaaaactaatcaaacagacaatttgtttagtcaaaggcaaacagagcaaatgaggaacctttcttgcgcaatctaatggcaatcacatcttactaatccagaaatggaagagtcaaatcaacaaagtaggagaatagtggaccaatgaacaaactcaaaaaacgatgtctcaaatcggattaagaatttgccaaatcggtcaatttttattgaatcagacaaaaacagcaaaggcacaaaactcgtctacaaaactgaccaaagttcgagtttttgtaagattgaggatcgaatggatagaatcatagaaagacagagataacgacaaagaagaatcgtctctttcagtaccttactacactaaaagtttgtaataactttaacagctacccagaaattaaaagaaggcaaagaacaaaaagagatccagaaagattttatctgacctttgagagtttggtagggctgcatgatgaagaagaacatgtgctctatattcaccttcttgttggatcagactagtaggttggtgagattgtaaaaaacaaaactttactaattcaatttcaaagtctcttcttttctccagatactctgttttaccattcaaggaaaaaggataaatcttgtagaaagaagatgccaaaatgatttttttatttagaaattaaacagcgacgtcgttttgcagctacagtgcgatcatctaatcagtcagtgtcttcaagtttaaaccgcatctctagtctctctctacttctctctgtgtacaatattcggaaagtgaggaagatacactgaagcaaaagagcaagtcatg

SEQ ID NO: 11125 - DNA, 3000 bp, Unknown
  misc_feature (1)..( 3000): cDNA_ID_2705315_gDNA_ID_2214479_Annot_ID_133217 3000 nt of promoter + ATG
acaccaagaagtatcatgaaacctgcacattctaagtaaagcctacaaaagcaaaaggttgcaatgtttattctcaagccgcaagtaaataaacacagatcattaagaaatcgatatctctctaaaacttgttgtggttttgcaccagagacgaaaaaaggacttcaagtccggttacagagatctcacagattcaattttgacataaagcaaagcaaccactaacaccaaatttagtactagcagctcgattcgtctcaaaatcgaaacatacatgcatgattcacctcccattatattacagacagtgaagagttcaagaaaaaaagcttgatagataccaaaattccagcagaagacttcatagaacgaaattacttaaaagagtaaccctacatagaaagaagttacgcaccgaagtcaaaggaaggggagggaggcacgaatcgctcggtgtcgtcgcaaaattaccggaaccctaaacccagagagaaaaagctcgcgagaaagaggaagagagagattcagaaattaaacaagtctgtatttaattttggtttatttgcaaaatattgataagaccctattttatgacggaatgaacccgatactattctttttgtcaaaataacccatctcctgcatgttttttgggctgacaaattgggtttcttttgattgattttgacggcgtagtaacagaaatttatggatagccacaccttagcttagaccaaacgtttaggtacaaagagtatgataaagttgagaacttaagacaatgtcaagaacatcaaaaccatgtcctgatcatacattctcttgtttaatcaatgtattatagattggactgagactcaaacacagatgccactcgatgtcagaaacgagccactttcgtgacaaaagaagcttggaaagcaaagataaataacgggtttggttggacatatcaagccagtgaggattagaccttagatggaaccttggtgtcagtgtccacctgtttttggccttcgaacttgtctatagccacttgaagctcgtctgtgccaccaaccgccctcattgtgtagaagtataccccaaaaacaaaagctgtcaagccaccagctacaaccgtgttcttgccttttgggcctaggtaactaaaacctggaaatcccgccattacttcaaagtctttaacctgcaagatccaatgtgtcacatgttacagaagagacccaagtatcagaagtattagattatgttatatcttcaatatcacagtttcataaatactaagatgaggaataacaagagagaactctgaagcatgatataacaacttttgattactctttttaacattgcagaagtgactccagaagccctgaggcatcgcaggacattgacatattgttcatatagtgaaaaacagattacacagattgaatacgacgaattttcgaattgttatacttatacctcatcctaagaactactacgccaagagtaagtgatagtactcacaacgagatcaaagatgagtacaatcatggtatgaatgaacaactgaaagttgcaaaacatttcagcaaaatagaactttcttctgcatcataatggaaacggagagaaaatcaattggtcacattcatgcccatcagtctaacataattgtccacaaaatcagcgcacttccctttaacgagtcaatcaaccataaatcatcaaccaaagcaaaaataaaggcaattagaaacctaactctacatctatacatccaaagctaacatcttttaaacgcaggctactgttactcaaccaaagttctcaaaaccagatcaaaatgtcaaaatgaaaggagagcagaaaatatcaatcaaaaattggttctttaagcaaattactccaaagtccacaaaattaaaatggaatcgaaaggaacctggtgatgaaggtttgatgatcactcgaaaatccgaaagatacaacaaagctgatatttttttcttctacagagaatcgtgcctaaatgcgacagaagcctaaagtttccctatttagttgacaactggttcggtgacgcttagtgtcgtggccacttaccaatctatcgaaaaccctaaacccagtaagagctctcgtgtgaaagagggatagaggcagaaagcaagccgtctcgagttcgaacccaactgtataacacaagagaagagatttattgcttcattatgtaaaaaatattgagatgatccttgtaattttggaatattatcaaattgaaccaccatactttttaaaaatccaaataaccctcaaccaagcatgtttcatgttgtggcctcattcacactatacgactatcaagttcatcgaaattcttgatagagaactttaaatacttaaatagttaatttagatactatctaataacttttggcggtttataagtttttgtgtttttcaatctacataaaatttagcgatttttcatgttacaaaaataatctcaaaattaaagtacaacccaaaaacataatatcaatgataataactacatttatctatgattcattttcacccaacatttacattcaaaaaaatgctgttgttacttgttaatgataacgattaaggaaggaagtcaatggaacaaaaaaaaaaatggtgataagtcaatgtaaaacgatgccgtttgtaaccataacagtgttaaacatgagaataaaggatcaaactttgaacagtggcttgcttgcttgcttacacacacgggtcaagtgaagacccaaaaaaaaataaaaaaattaatagatccgtacgcacatgactttcacttcttgtctctcagatctgttttgaccccaaaaccaacgaatatcaatttctccaatttcattcataattcactcaccccaaaattacaaaaaaaaaaaaaaaaaaagattttccatttccctcttctcgatccaccaccaccaccaacctcaaaagctttcatctttaccggtc

SEQ ID NO: 11126 - DNA, 3000 bp, Unknown
  misc_feature (1)..( 3000): cDNA_ID_2705392_gDNA_ID_2214479_Annot_ID_133218 3000 nt of promoter + ATG
tattttgcaaataaaaccaaactatacacgagcttatacaacaaatgtcacatttaaacatagtttctttaagaaaaagaactaatcatttctagtgaattattcaagtgaaactaaaaagaaaagaagaaaaaaaaatctagatgaagcaagctaaagctattgtagcactttagctttggctttcctatttttgccaacttttactcttttttatttagttttcttttactttttttcccacaaaaatccaatcctatgcaaaagattttgcctttcacgtcgtttggagcacgattcactctaaaaggtacgttttctcacaagtacccccaaaaaagttgcatactcaatatacacacaagctaatagtataaatcacttgcttgaagaatttgaaatcactgacgaaaataataagctccttttactttcttctctagtttcaaaacgttaaatactttatattgtttttgtttgtcaacgtactttatattttacaattttcaatacataaatcatagctttttattatctccaaagttgttctctttaaagaagaaactccaatcaaaaatctcacgtttgaatgatgatgcaaacaatcacatttaaattctacaataaatagtgatagagataattcattatttcatttgtacagtttggttgtatgatttgattatggtgtgtatatcttagttgaaagggtaacatcgtaaattaaatgttactttgaaaaccggaacaggtaatagtcggtgaataagagggctaacaaaagagagaagaagactgacacgtgtacataaagaaaacaaagtgggatgactcagtgaaacgttatggatttgcgtgattcacgggtttacagtaaaatgttctcgtcgtctagctctctctctgtacgctctttttgtactcagtttttgttgctccgactatttctcaccgacggttttgttctacgtcgtcgttttttgtttcacttgtagtgtataattgtttacacttattagtgttatcatgaagactaaacaatagtttaatggtggtcagaatgaatctttttttcaacagagggaatgttttgcatagtttattaactacatagcttaactttattgaccaaaccttaagtggaattttcaaattgcggttaattgtagttttggagaagtaatagatgaaaagttgtaaaagttaagacaacttaaaataaagagaagtacaagtgaaatttgaaatttctaagaagagagaggagaatctttggagaagtggaacatgatgcaaatcccaatactttttgttacttgaatacttgtaatttatagtactattcactgtcagtgaatactttttgaatatcgaatatttttctcatattgtatagtaacaaaattaatcatcaactaagacctaaatatgacattacatggtttgatatcagaacatcaaacttcaaaacactagtccaaaatgtatttgagcaattaagttgaaataaatacggttaatgtttttgttatcacattcttaactttacattgcacgtaagattataagtttggatattcaagatggacaataaatttagattagtaccgccgaccaaacaaattcattacccattttccttgtcacgatattatatcaattggctctgtgacattgaattgtattgtattgattgcattgactgaagctaacatttcggttgaactatataagtctaaaatcactaatcagtaatccaatgcaatgcagtaattagtcttcattaattatgcaaaagcaaaacacttaaatgtcatctatttaactaaaagtatcgtttcactaacttttctagatttgaaatgttgaaatacgttaatagatcagattcattatatgctttatgttttagataacttaaagtttgttggaaataaacatggcttaaaaaccaaaaataattaagtattttgccatttagagagaacttatttattcatgaacacaatcagtaatattgaggaaaatctattttatgttatgtgtttaggtgtatagtttgtaaaagatgttaagtaaaatgtaaaaataacaataagaacatttttgttttttgtatgttaaatgtatcttgtttgtctcaataaatttggttctttattgcagaaataatgtggttgtgttggaagaaaatttctgacttcgctcgctattcagtacaacaatccagaagattttgatgagccattatattttcacaatttcagctaaaattaagtagtctcttctttcacattctccatattttaacgatacttcaaaagtaaattcaaagtacaaaaacaagaagaagaagaaaccataaatgtttaactaattgtggcagtgaaagagtcacaatcaaaatctttttatcttactaattggtgatataaatataattaacagaaatcttgttgggaaagaagatgttcattattaattattacagcaatcattatgatcgaaaatcgatatttcttctaacaattggtccaaccaaacaacatatcatttaattttttgttctcaaacaaattaatgatcgaattgtatttttaattatcaattattcggttttacagatacaaaatttaaagcctttttggataagagaaaacgtggaaataaataaaacacgaactaccatttctcaatcaaatcaaatactagagagacgttaaatactaattcgaattaagtaatgacacctacttatactattccctccaatttctctttctaaaagagtccctcgtaaagaccaaaccttttttatcactctctctctctatctcttcatcgaccagaccaaacgcttcttcactctctctctctctctctctctctctctctctctctctctctctctctcttttctcttcaatgtcagattttgaatgccacaacaacaacgagccctaaaactagttgtgtgtgattgggggaaaaacgttgcaa

SEQ ID NO: 11127 - DNA, 3000 bp, Unknown
  misc_feature (1)..( 3000): cDNA_ID_1809253_gDNA_ID_2214479_Annot_ID_133220 3000 nt of promoter + ATG
acttatttgtaaatgcgtcacatgtcttcttcgctctgttcggctgcttcatcgagcggaagtctctagccaattaccgtttgttcgtggactcgaggttcgttgttcttagatttcccagactcatctgtttctgcaatccatttcaaagtttctctttttacttaatccaagtcattcgcgcatttcctaattggtctgaggtttagggttttagggcacatagttttgtttgattcgggagtaatcgttgagatgctacgagtttggtattcaagatgattccttttctcaaggtctttatgtaatttgattgatttatggatctcgaattgctgacatgaatttgttgcttaaagttgttggctttgtgggatattctgaggggtcttgtttgatttggatctaatttggtgggcagatattgtggtttcttagcaaagaagatgagtggagttggagagaaagcttctggaacaactaagacacctgctgatttcttgaaatctatccgtggtaaaccagttgttgtcaagctcaactctggtgttgattatcgaggtctgtctctctctctttctgcattttgtgttctcctctaagatgtatccagttcaaattctttttttttttgccttgtgtgatgatatcttatagtttgcttctgattttcggtggttattaagctatcggaagtctatgtaaacttctttatcactttgggtttagatgtctcaatgcctttctttctcgccatgttactggaacctttggatgttggtttacagaatgactcttttctttgtctaagaactgcttgcttgattctcatttgatttgaaagtcccatctctgaagattcatttttgttgagcttgcttgttttttccctatcttgtctctgtgtttgagaaggaataatacatttcggcttgagatatttgctttggattttgagaaatataatctagatgagcaggaaattaacatacggctttgaaacatatgctttttggaatttgagaggaatattagattcagatgatagctttgtgaattgagagagcttctctcatgagataacagacccaaatgtggttgaatttgagatgcatttactcttgcttctgatagaatatggactctcaccttgctatggagcctttatcacctgaaattaagaccttggtctcttgaactctataatataacttacaggactaggagaacttctagcttgaatatctttctttggtttatctacaaaagtcagacttattctttctttggcatatcatgttgtatcaatctacatatgacactttgtctctcttcttgtttgcaggcattcttacttgtcttgatggatatatgaacatcgcaatggagcaaaccgaagagtatgtaaatggccagctgaagaacacatatggcgacgcttttgtccgtggcaacaatggtaaaaaccaaatcacattcatcatcactctttaaatcggtttagtatgtttttttatatccaattctgaaaaatatgctctatgttggccacagttctttacatcagcacaacaaaggggacattgtcagatggagcatagctctctttcatcaccatgaatgttcatcttcttctctacctctggcatatgacaaatgtaggatttgtagcaaccagagtttatcaccactgcatgaattcgacatgtctttttcttccgcaactcagtttgtgtctaaatcatctccaaaattctgagatatagctagatttttatttgttatgaaattttttttaatcactgttggtctttggagcctaattatcgtgttttgatgacgcaatcactgcgtcacaatctgatgtcatcttaacaatcattaatgtattttttttttcttttctcgtaatattcttaattattcttcgacagcaaaggtttaaaaactccttatttcaatcattaatgtatttatgatttgatcgaataacaataatatagcttattttgttctattctatcgtatttgattcttctttcgttttttttttgtttgacttaagaaaccgattgtttatagtagtaaacatttgtttttaatgttgctcgattccagtgcacatgtccaggctagacacttgtcgttataaaggttgctttggttcaatattgatccactagagatgttacaactattgttgacatctgagattgtgtgataagaaaatatgaaactggatttagtgaaagttacaatatataatcatacatcatagataggaaataaggaaatgtcagatatacttgaagaatacatcaaatagacaaggtcctttttcttattgtcgactattatagagccgtacagaaccttttcacgtctttagtaattagtacattctccatttcggctctctcttattttttttccatctcttttacttctccaaataataacaataaaagcttcgattttgtgtgtgtttgtatttacatcttgacatcgatattcttttcatcaattttttaccaaaaatgtaataaaaacaaaaaaaaaccaacgctgaacacagacatggtttctccatccgtttatattcatcgtttgtatgtttacttaacaacttatttcaaaatagtacatatcatggttgtgtttttaaaaaaagtatacagaacagaaaagcacatggtagacaaaataatgaagccaaaattaatacaaagaagaagttcaacttgtatttattaacacattttctttccttgtcaaagacatgcaaattggttttgttttcttattcccattttttttttataataaaaagaagaagagtaaaacaaaaaaactatcatttcttcttatcgcaaaactcttatctaagcaagaaaccgacaaaacctatatctacatatattctcatcaacatctcttgagacatattcattttggttaaagcaaaagattttaagagagaaagggggagaagtgagagag

SEQ ID NO: 11128 - DNA, 3000 bp, Unknown
  misc_feature (1)..( 3000): cDNA_ID_2705321_gDNA_ID_2214479_Annot_ID_133222 3000 nt of promoter + ATG
tattccagaccaagcaacagttgctttgtgtacattattatcacctatttaaaaagaggttcagacacaacattcatcgcctgtgactgtgatgctcaaacacaaggattatcaaagattcaaagttcaggtacagtcagaacttactggctcaggaaaagatccaaacttcgccaacaaagatgaaattgatccaccaggaacaattcattgatccaccaggaacaaactgcatcataatattcaacgaatcactctctcttacagtacccaagtatctctgcaaaaacaaagataataagaagaatgcatgtggaacagacattaaacatatgaaaaatagctgaatggattcgccaactcacaacaatgttcggatgtgaaagattcttaagaagttgtacttcttcctcgcgagccaccagaacttttgtttcaactttagctaggcaaatgaatagaaactcttaagtaagcagcattttagatgaaagtgaggcaccaatgatggctcgctaaatcttatactcagttcaatttctcattattgtccaaaaaaggcttaaataagcttcgggccttacctcctttgtgtccaaatttgtgccgttcttcatcctcgtcaatgtagcctttaaaaagttttaagtgttcaaactcacaagcaaaaggccaactcttctttctacctgaaaatccaactatcaagatgagatcgcacatagtttcaataagagcagaataattttggtgtgcagcttaaatatgttccctaagttcactaggccaaatgggtgacaataaagtttcacaaacaacaactcatacgagaagctcatctgtacaagaaaacagaaacatgaatgggataatggcagtcatggttttaaaaacataaaacttgcaatcatatattgtaataacctcatggatagaactggaagggtgagacatttttgacgactttgggggtctaaaatgctgaacaaccgatgtttttaatccactacatacttgaaggtaggagaagagttgaagatgacattggagcagaagcactatatggggttcagatgtaacatttccatgtccaagtgcgtttctgcagagagcttcaagtcatcaaaaatcaccaaccaccactaaatgtgaactttatagttatctaaaattatcactaccatcagatatcatctagaatcaatcgtaactaaaaaaaaaaaacaactttcaaaaactagataataacatataggagctagcaacatgtatactatttcactttttttagagtttctaagccaatcagaaggctctatttcacacccactcgcacaaagtgagcgttgagcgcgtgagagcaattctgtgggtgtacccctttccaaaacacgcctttttcaatcgacgcatttgtctccaaaatcctcgtcgcgtgaatattttgtttgttacttcttctctatgtaaaccgaaccgcaaatcaattctaatttatttcaataccatttaaacctaaccgaaatcaattgaaattagtaatgactaaccgcttgtcctcatcggaagagtgatctaaagctagatttttcgagagagaatctaaggaaattccgacaacagaagaagggagtataccggagagctcgccaatcaccgccggagcgatggagtaaaattggtacgattttgaaaaagagaagcgtggtggaagaatttcggattaggattttgatagtgtgtaaacgacggtggtcgatccatgagctccgacgacggcgaactttactggcaacgttgtttagcatagtttaattggatatagtgcccatttagtcaggcccattaatatttattcggcccattgttttcctttttcaaatagaatcgtctgtgtgggcttgttttcatattttcgacaaataagaggcggggagaaattttcccaattgaaaacaatttattcttgttcctctcttgaagaaagtctttagggtttaggattttattccacaaacttaatatatggtgttttggctggaaaactaaaaaaaatcaacggttgggatctctgctttcttttcgccaaaaatttactgcagcaccttctccataaacaactttggatgtttgctcttaatatagaccaagccagactatgaaagtttatatttaaagaaatgtcccattctcgaaatttttattttgagtttattttcagtttagttttatatcaaaccgagatattgatacttgcatgcaaattagtactccaagttctgaaccctttatgaactgctagtgcttggctgctattcttgctttatttggtttaccaaatgcatacattatttttttggctttgttaggtttaacatatacatcacttgacatttgatttttgatttttttttggctttgttaggtttagattttttttaatatactaaggtttagaatttttttataacacccatatttgctattataataaacattttgccgagatcttattctaactatagagcggtagaaaatttcacttattgacttcctaattggatatttctatttccttaaattttaaatctcttacatatatattcacaattgatttcctgcaaaattttaattatactagttgcaactaaattaaaaatgttgtcgagatcttttattctaactacagaaccgtagagaatcttctgactttgttattacgtcccattttcatttccatgtgtctatgtactctccatcttcccaaagataacacaataaagtaaaaagaaataaaacttaaaatccaagcttttcacttgtcacccttatttagtttttttttggaccattttcttttcttgctctgatgaaaagctgttgtcttctggaagaacctcacaagtctattaatatatgtatattcccaatatccctttattcgttctgcggaaagcaaaagattgagagcgacagagagagataacgagagagagagag

SEQ ID NO: 11129 - DNA, 3000 bp, Unknown
  misc_feature (1)..( 3000): cDNA_ID_2716869_gDNA_ID_2214479_Annot_ID_133223 3000 nt of promoter + ATG
aaagttaaagaacttgaacatgcatgcgctatgattttttatataaatcactaaagtagttaagttagtgaatattaaatcatagtgataccaaaaaaaatacataaaaggacaccacaatcctaagaggtaataaatcttcttcttcttgttttcttcattccataattaattaatccaaaaacgagagccaccaaatcgatccataatcaaaattttccaattaaatcaatccatataactatctctgtcgaaaacgactaatctaatttcgtacattaccgtacactaatgcagtcatctaaggaaacttatcttgcgaataattactattatttcattaaaccaaccaaattttattacataacaaattacccggttatctaggtacacaagttgacacaatggtagatattaataaaatcaagaaagttccatataaactaatcattacgttactatcgtaaatcctataaattcccatctcatgtaccttcttctacaatatccttcatccttaaaacactaaccttctctgaaaaaaatccaaaaaatggtttataacacttcatgccttattcttcctttggctctcatcattcttgattttaccttaatctcatcattagcccatccgattccaagcacactcaacgtcttatcctacggagctaaaccagacggctcaaaagactcaaccaaagccttcttagccgcatgggacgttgcttgtgcatccgctaatcctacaactataatcgtaccaaaaggacggttcttggtcgggaaccttgtttttcatggcaacgagtgtaagcaagcgccaatatctattcgtatagcaggctcaatcgttgctccggaagattttagaattatcgcaagctcaaaacattggatctggttcgaggatgttactgatgtttcaatctacggtggaatacttgacgctcaaggcactagtttgtggaaatgcaagaacaacggtggccataattgtcctaccggtgccaaggtatgcttgacccacaagaaacaacaaatttaactctcatgaggtttttaatttttttttttgttaatcttatttgtagagtttggtgtttagtgggtcaaataacatcaaaatcagtggtttaacgtcgatcaacagccagaaattccatatagtcatcgataatagcaataacgtgaacattgacggcgttaaggtttctgctgatgagaatagccctaataccgatgggattcacgtcgaatcatctcactccgtccatatcactaactcaagaatcggaaccggtgatgattgcatctccatcggtccaggatccactaatgtattcatacaaaccattcgatgcggtccaggccacggcatcaggtaacacacacatacatttcttgctccccatctttcttgatatttcactttctaaaatgttctcttgttttttttgtttgtgtgaactctccaacagtattggaagtcttggacgagcagaggaagaacaaggagtagataatgtgaccgtgagtaacgtggatttcatgggaacgaataacggagttaggatcaaaacatgggggaaagatagcaacagtttcgctagaaacattgttttccaacatattaacatgaagatggtcaagaacccaatcattatagaccaacactactgtcttcataaaccttgccctaaacaggtaagaatatttattaattaaccatatctttacacccataactcgatatattgactcatttaatctgtatattaatttctattattataggaatcaggagttaaagtatcaaatgtgagatatgaagatatacacgggacttcgaatacggaagtggcggttttgttagattgtagtaaggagaaaccatgtaccggtattgtaatggacgatgtgaatcttgtctctgttcatcgaccggctcaggcgtcttgcgataatgcaaatggatcagcgaacgacgttgtcccattcactccttgtctaaagagggagatcattataacttaactataaatggatcgctgaacgacgtcgtcccgattgctccatgactaaaagatgagttcatgtagatatatctgcgaacgacgttgtcctatttgctacttgttgtttgatcgttgagaatcttttttttttcttttttcttgttttgtttttgataatttctttgagaatctttgtaatccaaactatgaagtaatgattaaattttggttcgcatactacatatagatgatttctgtagtaattgtgtctatagatattttgagagatatggaccaaacaacttgtgaaaaagtaacataattggatgaaatagaaggtgatggaaatatatgggtgtgaattaaagtaaaacataaactaactggaaaatgattagtatacattaatggttgattaatagccgacccattaaggcattaactattcttatactatactataattaacctatggagcatatgagatttgatactattattacataaaaaattagtggagtagcaccatattttttagtttttaatatttaaaatttaccatcatcctctccacttcactaaaaaaaaagtcaaaaacccactttctccaggttgtattccattatattaaagttttatcttttaattagtttcatctatatataatctacatgggattataatccaatcaaggctttacctccaaaatagatattttgtgtaacgaactttttggttaatttcgtttatggataatagtctcaattaattacaaaaagatagaaaatttaaacggactatatacgatcgtttgtttgctgtgtgacttgtcgtcttcttcttctgactcaacctccattgaccaaccctccaaagacggcaatgtgggttttattcttaatccattgatctcttgttgtgaggttttttgagaatttgcgtaaaggaagaaactttttcaaaacttttttttgcatcaatg

SEQ ID NO: 11130 - DNA, 3000 bp, Unknown; identical to SEQ ID NO: 11129
  misc_feature (1)..( 3000): cDNA_ID_3038648_gDNA_ID_2214479_Annot_ID_183282 3000 nt of promoter + ATG

SEQ ID NO: 11131 - DNA, 3000 bp, Unknown; identical to SEQ ID NO: 11125
  misc_feature (1)..( 3000): cDNA_ID_2705315_gDNA_ID_2214479_Annot_ID_183276 3000 nt of promoter + ATG

SEQ ID NO: 11132 - DNA, 3000 bp, Unknown; identical to SEQ ID NO: 11124
  misc_feature (1)..( 3000): cDNA_ID_3038668_gDNA_ID_2214479_Annot_ID_183271 3000 nt of promoter + ATG

SEQ ID NO: 11133 - DNA, 3000 bp, Unknown
  misc_feature (1)..( 3000): cDNA_ID_1534269_gDNA_ID_2214479_Annot_ID_183265 3000 nt of promoter + ATG
tgtacttggtgttttgacatcacaagggtccattggtaccttgacgttaacggaaccttttacctcccggggacgctgagacgtgatgctgagttcggtcgtgaaatgatatatgacatgtttgtttgtaaatattttatgttttcgattgatgacaaaggagtcagaaaggacacttgaccatcacggaagcgatgacttccgtcggacggtaaaaagtgatggtcgaggtttggtgagaaatctaaaaatgtgacggtgtttgcttgataaatatctttattttggtgattgtattgaatgtatcgttttgatttctgtttatacttatatcggcggtggaataattacacatgacctgaaaagtatgcgtttgtgtttacttttatgttgtagtacttgttgtgtttttcagctatgaaaagtctacatatttcttctgtgtgctaacttattggataaattggatatttttaagagatctaatgtttacacaaacgtatggtgaacaccaatggggatgtttacacacacttatgatttatgactgaaagagatgttaatcgaagtatatactccattgattaatgttaatcaccgaaagagatgttaaacaagcattaatgtttacacttaaatgtgatggaacgaaaacaaagaataagtttaaatttgttgtcatggtctcaatgaaaaaccgaaaacgttgtgctatcaaattactcaaaacgttgagctagctaaacttggcagaaaagtatcgaatgatgctaaaatgcaaaaaaccattaaacccaatgtacggtttatagagttttcatatgccaagtgggacatccacgtggagatcctatgccacttgtcccctctctgtctctttcatgcttcaaacttatttggcttttacgtggattctcacgcccgagtacgtcgattattacaaaactcacataaattaatataaacactttatattttgttttgacctttttaccccttctcattgctcatcaattttcatagatctaataccaaattatcacacatataggagagtcatctaacaattagcacaagtcatgagtgaaagagactaagcatgaatcataatcatctttgacataggtgctcaaaagtaatcaattttttcaactttactattcaactcaataaaagaatttttaatcaacaattcttttcaagatgtatcccttttttttcttgcaactttttctcaactatattaatatttagtatactgctacttagctactcgatgttttgatgtatcattgatcattattgttgactaataattatttgatacaaatattttaccgacatatgtaagaacaatagtgtcaaaattgaagcatctcaagggtattttagaacagatacccaatttatttatttttataatttgtcaccttgtttttcacacacaaatgacaatatgacgtcattttccttattagaataatttttttaacaaaaaaaagaattatttattttcgtctctcttattgcttgctacgctcaacgctgtgcataagcattctctttctgtggacgaaactaaacctgagagaaaaagccagaagaaccaaactcagaccgagagatagagattgagggagagctctagctctgtagaaaagaaggattcattcatcatatccagaaatggctctaaagtttaaccctttggtggcatctcagccttacaaattcccttcctcgactcgtccgccaactccttctttcagatctcccaagttcctctgcctcgcttcttcttctccggctctcagctccggccccaagtcagtctctttctctccatcatcgtctctcttatctactttcgattctctctgtttcatctttgtttactgtgttctgggttttgcttgttcttatcgatattggatctacgttttctcgattttgttcagtgttatttgcttacatttgcttaatctcgagtgtgatttcaataaaagtacgttcttttaatctgggtttataagaatgggccatcctctgttctcaggtgattcattaatgctctttttcattgaatctgatgtttgttgattgttccctattattctcacgtttctctgagattgccccatctatcaaatcgttgcctttaccatatttattctgcatcagattatgtagattgctcgttgattggttgttagttaagattaacactagttatcttctttatggtataatgatctttagattggttaagacttaacagacattgaggaaagcttcttagtcaaagagaaagttttgttttgttttctctggtttagtaatttttaatggtgaaatgtttatccacttgtttcttactcatttgatgagttttctcttttgtattgacaagagattcttgaacgtatcagtttacgtctgtttatctttcttcaaagacattacgttggatatcacgcttcgtggcctttctctatgcatgcgtacttcgtggcttctctctttagtttgcgtccaaaattttcacacttttctgtaatttattattcattctttctctgttttgaagacatttggctctttatcttgtctttgtctgatcagtagtcactacatttgtttctttcacaatctttcttttttgcttcatattgaactgcaagaccaatccatgaatgcaaatataaaatattgtcttacggttaaccatctctaagtgtttgctagtcatgaattgtgaaattgtttcgcttcaaacatagaattagttgatttggaaatgtagacatgaatgcttatctaaatacaataaactgtgttcttgtttcagttgtgtatcagagatgagaccttgactggtaatttcaatggagcataattaaatgctaatgatacttattttctggttaatgcagggaggttgagagtttgaagaaaccatttacgccacccagggaagtgcatgttcaagtcttgcactcc

SEQ ID NO: 11134 - DNA, 3000 bp, Unknown
  misc_feature (1)..( 3000): cDNA_ID_3038688_gDNA_ID_2214479_Annot_ID_183261 3000 nt of promoter + ATG
tgtaatatctatattatttctctctctctctctctccctgtatatatagatcggtttaacctagttttatagcaaagctgtagacgagctttcagacgtcaaacatggctaaagcacaaatatgtctttgtttcatcattttcttatacctctggccaggtaatcacaactataatcatgatgttaattagtataatataattggtatgtagcgatgcatacatacgggtttatatatagatcatttaataatcttatattaattgtaatcttttccaagtactgtaacaatttagtttcatttccatgtttctcttacagaaggaaatttcatcaaagtcaccaaggcagatgtaagaacataagtgaaataaccaagttataaaatgttttgtttattctttttctttttttttgtcttttcttgtaatgaactttgggtttgatctttgttacagcgctcggccggagattggtgcgttgctaaaccttctacggataacgaaaggcttcaagaaaacataaacttcgcgtgttcgaaaatcgattgtcagattatctcggaaggaggtgcatgttatttaccagatagtatcattagtcgtgcttctgttgccatgaatctttattaccaagctcaaggaagacatttttggaactgcaattttgaaggctctggtctcatcggcataactgatcctagtgagttttctttttatatttttttcctctaaacaactatggaactattattatgtctgatatcatatcaatttttatttattttccacatttacaggctatggaagttgcatttatcaatttcgtaagtaaaacatatcaaggttcgatcttgttgcaagaagttagaggactgtatctgaaatttcctatttaaaatctaatgtttggatgttttaattggatttctcaacagttaaatgtttgagcctagatatgtgtatgccattgttaaagcaatataatttaatttactgatcaatacttcgcatctattcaatattaatattaactaacatataccagtataaatacattagatgtgaattgtttaatgtttttgcctataaatagatgtatagtactatagtttgattttcttgccaacaacacctaaacattaagttttctacagttttcaacaagagatatggctgtagatcacctaattgtgttgtgtttaattatcagttgagggtagatatagttttctaattgtgtgtaaatatttatatcttagcatcatatcgaccaaagattaatccatattagccacacatagatattgtgtaatataggtagggttaggttaggtcctaatgcggaaaaaagaattattaaatcacacacacgaccaaatgtggcagcatatgaaaacgggttatagtgggaaggaatgtgggaagaatcaattagttgaaatattttattattcttgcttgaatgtattccaaagtataattatatgcgtttttaacactaattagtaaatcatttttccaagtccctaaacgatacattacatttgattcgcatgtcttcctcttagaccaagaacaaggtcgagttttttgtcaacagaaatcttctccccgaaacatgaaacaacttatagagcaaaagataaatattatgaactttaattgcccaagcatctgtgatccagtggtgggagaagatttggggaagggtgaaactttcagagctgggttcgatcctccctggaaacaaaaatcacatttgtttggaaagtctgtcagttgggctttagcccaattggtttacctggtagtcagaaatgcaggcggcctgactaccccctggcattagtcggaaagcatccaaattcgggacagacagtgtggtggtctttcggggagaagtccactctgaagtatttcggtgcatttctactgaggctgaccggatcagccgataaagtttataaaataaaataaataaatgaactttaattaaccagaaaatgtagaaacaaaaaatcttactaaacctatgaccaaaaaaaaaaaaaaaaaaaagttgtggagtaagaagtatgaagcgttttatccaacatatcccagaggagaacagtgattggtcgatgtcacgtgaaataacatttggcaaatagtgcacaaattaatgaaggcaagaaagtgagaccagacgcgagatgtgagcgcgtatgaagaaacatgatgagacaacaaagagaatcaacctcgtctatgaaaatttcttcagattctcttctcattgcgataccaaacaaaaactcgtagtatatttttgttggtcgtttttgtacaaaatatataaaaagcaaactgtcgcaattatggtttgtatattatacaccagataaacaaatcagaatctctccactaaacctaatatattttaaaattttgataagtctatatacttttttggcggggacaaccggatagttcttctttgagacttctggcttttttttctcttgatgataataagaaactgtatgaatatttgaaaatgccttatgacgttttcttaccaaaaaaaaaaggcaaaggaactacaaaagatagcttaaacaaatttagacaattcatgtggccttaccttaagtattttagtgatgatacgattttaaaattattagtgccattctatcatgttctatactatataaaatattcattcaatattgatttcatagttaaagtttacaccaaaaaattgacatcacatcctatcagctacggaaatggttaccaacacaaaatagtatatctatgtcctatatatatataggaatttaagacaaagcaatattagtctacttttggaggagatgaaaagttacaagaagtctccctataaaacactattaatgaaccaaaaacaatctactaatcaaacttatagtctactagaggtactttgttaccgtttggttagggatgagtttcaacgtttgtggtggttaca

SEQ ID NO: 11135 - DNA, 3000 bp, Unknown
  misc_feature (1)..( 3000): cDNA_ID_3038697_gDNA_ID_2214479_Annot_ID_183258 3000 nt of promoter + ATG
ttgatcatcgccgtcgtttacctactgggaaatcgaaacaaagttctgctgtgtgcttatttggtgggaaagataaacctgatggtagtgatgaggtcagatgctttttcctcatgttaagttcttctgcctgtaaatgaatttactttgcaactggagagtgatttcttttgtgtttgtttctaagaactttgctgttctgtttgctgatgataagtgtgttcttcttattttttcaattttgttcttagtgattgttgtaatgaattttgttatcagatatcgccatggaaagcaatagagaaagctatggggaagaaatcggttgaagatatgttgcgagagcagatacagaagaaagacttttatgatactgacagtggcggcaacatgcctccacgtggaggaggcagtggtggcggtggtggaaatggtgaggagcgtcctgaagggtcaggaggagaagatggtggtcttgctgggatcgcagatgaaactttgcaagtggttttggcgaccttaggcttcatctttttggtaaatgacacaaatttcaggaaagatttgaacttcaaatatcgtatcttgctttgatggaatatatctttgtttttgcagtacacatacattatcactggggaggaattggtcaagcttgcaagggattacattaggtttcttatgggaagacctaagactgttcgattgacccgagccatggatagttggaacggattcttggagaagatgtcgaggcaaagagtgtatgatgagtattggctagaaaaggcgatcatcaacacaccaacctggtatgatagccctgagaagtacagacgtgttatcaaggcttatgttgattcaaattctgatgaagcttatgtggaatcaaattctgatgaggtatcttactaggttaggaacaggaagagatccataataacaattgagttttttttcttagtgtttgaaatttagaatcagtttctttgaattggatttatgttcgtacatttgtatggaattggtttatttatacacgatgaacattctcgagggaaaagcaaatgcaaaccaaaatctctattataacacaagtcaaaatcttttagatctttcaatagctttcaaaattcaactcttaagcagcaattgcaaatcaatgagaaacacaaaaggagaaatcaaagtttcttagatttagtggttgaagtgctttctttcttctctgcctctgtcgatttcttccggtctttcctttccctcttcttcaaagcagtcatgtgggccttaagaatggtggcatatgatgcttgaaatctctggtgatccttagcaccaaccttacaaacaagaaagcattgtaacaagttagcttcttacagatcatagaccagtatcactttacaagaacttgggtaggttttcaatcgttttatttgtttaccgagctacttcctcaactgctagaaggcaactacaatagtgcaaggaaggataaatagagacttaagagagaatgttatcttttattctagttcattatccaaagagagtagtaactcttaaacaatatctcgagtaatcgatgtgctgtttagtttactaatgaatagttcctacgtttggaaacatacatggttcgagatcataatcttgagataatgtgtagaacataccgaagtagaaacagttttctttccatcggttgctcgaataaggcatctgtattcaatggattctccaactgagctcagtttcctcttctgcaccttagacttgagagatgctgacacaagtaacaaaaatcatataagatatcttcaaaaagatatttcaagtataaacatataacaaaagtggaggatgagattttcaaagttacatcttttcaaagtaacccacacagaacccttctctttgcttttctcaaacatgctcgtgagttcattgaggaatggatccaactgtaatagaacctgcaaaaccaaaaaggatggcatcaaaaaaacgcatgatcagtcaaaacaatggcaaaaattagttttctttactccatcaatcattgaaccttacaatgtagcatcaatgctgaatcaaatcccaccaaacacaaatcagaggaaaaaaaaaaatctcacaaaaatcttcacatcacataatcctgaattagcactgagaatttaccattgttaaaccgcagatggatatcttttgcagatcctcaagcactgaaaatacttcttatcactcagataactgagagagaaaaccataaacacaatgcaagtgcagggaagagttagatcttaaagtttagaactttgtcgatataaatggaatacgcaacataaaatctaagcacaattgaaacaatttcttcaaatcattcggatttctactcaattctacgctaagacaccattgatatacaaccctagatcgtcaaagcttctgacaaatcacaacacggaaacaatataattcaattcgcaacaattaggaggcgtcaaatccgatcaagtcaacaaacccagctcaaaagccacgagctttaagaatcagaattcaaacttagaaaaaaactatgaaactgaccagagagagacaagaatctgatgatgatctgcgtccgaaaactcaccggccggaggagtctcttcggtaaaaaggaagtcgccacaaatcaaaagacgggtatactcttagtactaaaggaccatttaaatatgggcttatttagataataatgggccttattaggcccagtaatttataaaaccttactagggttttaacgatacgttctcgttctctttctctgaaactcagcttcttcttcagacaccattgatatcctctaaattgttccccgtcgtagaaactttaggtaatcgttgccgtcgagctgatatttgtgaaggggaaaccctaattcgataagggattgtaaagttgcacaagtttgcttatccccagaacctgctctgcaacacaaca

SEQ ID NO: 11136 - DNA, 3000 bp, Unknown; identical to SEQ ID NO: 11121
  misc_feature (1)..( 3000): cDNA_ID_1399134_gDNA_ID_2214479_Annot_ID_183257 3000 nt of promoter + ATG

SEQ ID NO: 11137 - DNA, 3000 bp, Unknown
  misc_feature (1)..( 3000): cDNA_ID_3038701_gDNA_ID_2214479_Annot_ID_183256 3000 nt of promoter + ATG
tacttctcgtggggaaatagaccgtttttccgtgaatatcctgatccgtatatattgaaaaaagtttgaattacttttccttcattttttaaactgtcaatatcttatttcattcaaatatgcatacattttttaggcctatttatcgatcggtcttagttatggaaattttacaactgttgtcatcatacaaatatacattactcggcagtggttccctcttaatattctcactttctgacacttagaaccatctggttacatttttaattattatatatcatccttacaagtgtctgacgaaatggtgaatcgagaatcactagaaggaaccacttagacaaataatcttttataaaatttaccatttgttcacactttttctttcattcgtaaagaattttctctgaagtttcagcttatgtaatttgttcccagggaaaaaattcaaacactatcctctgtaaaattggataaccattaaccagaaaaaaggttgaaatttagtaaatgcgtttattatggattggctgatagcctgatatacttcattctgtgacaaccgattcaaacaacacattggtacattaggatacaccgcataatcttttttattcgacacctttagttataaactcacacgtgaacgaccacacttatactatgaaaccgtgtcatacgaaccacattttaacatctttagcaactaagatttgctccaggagtgatcccaagcgtcctgcagaactccaagtaatagtttactctgctctgcacggctgcaggacgcctaccgttgcattcaccaccattgatcttcctagtggtggctccaaagccttggtccaagactggacgaacatttaggttccagaaccacatggcacactgaaaggcaacttgggggctacgagccaccatgtctggatcagtcaagagagggagtccgaggaactttccagctgcaccgtaattgtagttccatgtgatttggattggaccgcggccgtagtagtcttttcccggtgtacaagggtacgcagtgctcggtgagcagtatttccctctagctatttcttctttgtagcaaaaaccttgcataacgtaaaagaagatcgttatttataatagagaatgaatatgtatgaattttaatgataaaagaaatgatttgttaacttacccaagaaacattatggtgcttaattagtgtaataatattcttgataataataattcattaatttgcttaattaaataattagtatacatgcattcatgtagtagaactagaagggtttataaagaacttacttccagattcatgagaaaactgagccaacatagcggcaatctcacgcttagcgacggttcctttataggcgtcgaacgattgggcagccgcaatgaaagcctggcgagtgtagaaccctttcgctggacagccatttccgactttgctcatgataccatcaaaaaatgctggtgtgacaacattttcaattgtatcacgaggatcagcgtttagaccgcctgcaccaccgctaggagttggtgggataggtgtggttgaggagctgcaaggtccacttcggcacccggtaccacagtaggcatctgtggtgccacaatatccatatctactgcaacataagttggctgcacatccggttgtaccgcactgttgcgaaaacacggtttttgccatgatggttaaggtgaagagaaaaaggatgaaagcgtttttcaacattgctcttagggtagccattttgtgtatggagggtgttgtgtgaagaaatgaagaaggtgtgttgatgtatttatagtgtaaatttggtctattcaaattgaaatattgatcagtgttagacatctttcacgattattgattggctttttctgagtcaaagtcaatgccactttgtaccacttaacaaaagtcaatgacacagttttttctcttgtcgttatgagaaattccatgtcggtcatagatcagatcaaaaacgaatatgtaatcaaaattttaaagagccaagttacttggatgaaaatcattctcataaaaacttgattgagataatcaagtttagattagttcaaacgtttgagatttttctattgaatagttccaagtttttgttaattagctcaaacgatattgttagctaatatagcattttttttggtcaactaatatagcatttagaacgttcttttaaagtcttactttgatttttaacaaaaattgtatggaattgtgagaaaaatgactagtgaagccaaaatgtttctatttataaatcaaaatcaaccaaaattagaaaaatccaactcaattattgcaatttccaaatagtcatgcgtcaaaattaaaccagcatatcaataaaaagcggtttagtcttaccaaccctggtctagagactctagaaccatcggagctcaagtgaaaaacgacgccgttaagctgcatctttcaagatagataaaaacttttgtcgatcgcttcatctctcacagagtttcggctcctccgttgtgtttcaggacgacgcaaaggggaaaaaaaattgaattctttctctccaagcgaaactagggtttcgaaagtctctgtctcatcaaagcttcgaaaaggtagatttatggtttcttactctcctttctctatgatattccaatttcttgcgagcttgctcagtgttcttaccttatatttaccgaaccagtgcctttatattctatcacattcgaagttattggtttctggttacttatattgcttattgttctatgactacgatataattatcccaaagatttgttcttttctccgaatttggattagaaatggatatactcaaattctgaacatgcccagaagaatccttgttttggtcaatgttgggttctaattggttgtgttcgttgtttgctgttgatttgttttcttttcagaaagtgattgcattaagagaaacattgggataaaag

SEQ ID NO: 11138 - DNA, 3000 bp, Unknown
  misc_feature (1)..( 3000): cDNA_ID_3038646_gDNA_ID_2214479_Annot_ID_183284 3000 nt of promoter + ATG
aagataaaactttaatataatggaatacaacctggagaaagtgggtttttgactttttttttagtgaagtggagaggatgatggtaaattttaaatattaaaaactaaaaaatatggtgctactccactaattttttatgtaataatagtatcaaatctcatatgctccataggttaattatagtatagtataagaatagttaatgccttaatgggtcggctattaatcaaccattaatgtatactaatcattttccagttagtttatgttttactttaattcacacccatatatttccatcaccttctatttcatccaattatgttactttttcacaagttgtttggtccatatctctcaaaatatctatagacacaattactacagaaatcatctatatgtagtatgcgaaccaaaatttaatcattacttcatagtttggattacaaagattctcaaagaaattatcaaaaacaaaacaagaaaaaagaaaaaaaaaagattctcaacgatcaaacaacaagtagcaaataggacaacgtcgttcgcagatatatctacatgaactcatcttttagtcatggagcaatcgggacgacgtcgttcagcgatccatttatagttaagttataatgatctccctctttagacaaggagtgaatgggacaacgtcgttcgctgatccatttgcattatcgcaagacgcctgagccggtcgatgaacagagacaagattcacatcgtccattacaataccggtacatggtttctccttactacaatctaacaaaaccgccacttccgtattcgaagtcccgtgtatatcttcatatctcacatttgatactttaactcctgattcctataataatagaaattaatatacagattaaatgagtcaatatatcgagttatgggtgtaaagatatggttaattaataaatattcttacctgtttagggcaaggtttatgaagacagtagtgttggtctataatgattgggttcttgaccatcttcatgttaatatgttggaaaacaatgtttctagcgaaactgttgctatctttcccccatgttttgatcctaactccgttattcgttcccatgaaatccacgttactcacggtcacattatctactccttgttcttcctctgctcgtccaagacttccaatactgttggagagttcacacaaacaaaaaaaacaagagaacattttagaaagtgaaatatcaagaaagatggggagcaagaaatgtatgtgtgtgttacctgatgccgtggcctggaccgcatcgaatggtttgtatgaatacattagtggatcctggaccgatggagatgcaatcatcaccggttccgattcttgagttagtgatatggacggagtgagatgattcgacgtgaatcccatcggtattagggctattctcatcagcagaaaccttaacgccgtcaatgttcacgttattgctattatcgatgactatatggaatttctggctgttgatcgacgttaaaccactgattttgatgttatttgacccactaaacaccaaactctacaaataagattaacaaaaaaaaaaattaaaaacctcatgagagttaaatttgttgtttcttgtgggtcaagcataccttggcaccggtaggacaattatggccaccgttgttcttgcatttccacaaactagtgccttgagcgtcaagtattccaccgtagattgaaacatcagtaacatcctcgaaccagatccaatgttttgagcttgcgataattctaaaatcttccggagcaacgattgagcctgctatacgaatagatattggcgcttgcttacactcgttgccatgaaaaacaaggttcccgaccaagaaccgtccttttggtacgattatagttgtaggattagcggatgcacaagcaacgtcccatgcggctaagaaggctttggttgagtcttttgagccgtctggtttagctccgtaggataagacgttgagtgtgcttggaatcggatgggctaatgatgagattaaggtaaaatcaagaatgatgagagccaaaggaagaataaggcatgaagtgttataaaccattttttggatttttttcagagaaggttagtgttttaaggatgaaggatattgtagaagaaggtacatgagatgggaatttataggatttacgatagtaacgtaatgattagtttatatggaactttcttgattttattaatatctaccattgtgtcaacttgtgtacctagataaccgggtaatttgttatgtaataaaatttggttggtttaatgaaataatagtaattattcgcaagataagtttccttagatgactgcattagtgtacggtaatgtacgaaattagattagtcgttttcgacagagatagttatatggattgatttaattggaaaattttgattatggatcgatttggtggctctcgtttttggattaattaattatggaatgaagaaaacaagaagaagaagatttattacctcttaggattgtggtgtccttttatgtattttttttggtatcactatgatttaatattcactaacttaactactttagtgatttatataaaaaatcatagcgcatgcatgttcaagttctttaactttgccgatcgctagaacagtatccgtactttcgattttctaacattcacctatactcgtttggtaagttaacaaagaatcattagtcattcaaattgcatatcaagataataataacttattggtttttttaagtaagtgtaataagaaattattcgaatgattcgtcaactttttcggatagattccaaaataatggttgataacgagaattgatttacttatagcaaaaacaatctagaaatgtgaatacacattcaaaacaacacatataaggactaagtatattatattttaaaaaacaaaattgtgaaatacagaaaacatgcgcatcaaacaaagg

SEQ ID NO: 11139 - DNA, 3000 bp, Unknown; identical to SEQ ID NO: 11119
  misc_feature (1)..( 3000): cDNA_ID_2705350_gDNA_ID_2214479_Annot_ID_183255 3000 nt of promoter + ATG

SEQ ID NO: 11140 - DNA, 1388 bp, Unknown
  misc_feature (1)..( 1388): cDNA_ID_2706761_gDNA_ID_2214480_Annot_ID_133226 3000 nt of promoter + ATG
tgctgtggtgattgagccatcacaaaacgacagtacaatgacggaaggaaatttgcagcagcgtggaaacactgtaaacaagcgagactataactttagtttagatttgttttttttttgttttagccggacgtattttgtttttatctaattatctattcttttcattagagataaattagtataaaatctaaaaataacataacataaatgcttttatttaatatttggtagcatatgatatttcatttacaagattttattttgttttaaaaaaacttttgatttataagaaccgatggccatggtatgtcaaacgttgtaatgaaatgatagcttttctaatcgctgcggctttggctttcgtatcgattcgatacatcattgatgcactcatgcacaaaacaaatgtggcagtggacttcacgtagctgattatgtgcaaatattgctcagattctttaaagacatgtggtagtggacttcaattgatctgttcatatattttactttggcctatgcggagtcctacatcgtatcttgtgctttcgtccctttttacataaaacggcttgctgaggcgggcgatatccatcagccgtcaaaataacaatacaaggggcaactctttgttttgggatttgataaaataaaactatgttatgattttttgaaattaaaaaactatgtatcatcacctatctaaatatatatataaatatttacataataaattcagaaagtgaaagaagtcgccgaacgaaaacatttaatatatcatgaaactgtaattgctatgttttatataaagatggtttaggctacttacataattcttttgatttacttaattgcgacagtaaatacatttacatcaactaaaaatttatttgttatttttctttattttactcaaaattttttttgatatatttatagaaaaatacaaatagcagtgaaaataaaatttctacgccacatcggatccaaaccggagcagtgacaaagcctaaaacggatgcagacaaaaaaaactatcactctctgtaatacctcaaagttattttctaatgatatttataagcttagagttttccctaccaaaaaaaagaagcttagagttttttcttataagttatagtaattaatatcgactaatgtttttgttatttgatttaattcgttggaagctagaacggtctcttctttcttatttaccgttttacccttcgtattttgtgaatgtaacagagttccccgacaacgacgtcgtttcaggctctactataaaaaaacgacgctgtttttttcaagaagattatcattcgtctctcgtcgtcttggaaaaagattctttgaaagtcccgcccaaatttaagacgacgatg

SEQ ID NO: 11141 - DNA, 3000 bp, Unknown
  misc_feature (1)..( 3000): cDNA_ID_2717124_gDNA_ID_2214480_Annot_ID_133227 3000 nt of promoter + ATG
ccaactgtgtccactgttttgtcacctgaggtaagtcataactgttgaacgtctcaatttgtgcttaatatttcacattctgctttaagtataaacttgattgtatatgtgtgtgttttgcattgaaagattattgagaaggagtctgaaattggaggaaaacttggcgagcttgactcatatgagattgaaggtggggaaacaaagggagaaatattgcagaatctggccgagttccaattctcttgtgtaagtaaccaagaaagtttaacttgatttatggtatttcagcatagaaagaaacataacattttggttgtttacgtaaattctactaggtgatgttcaatgcggttctggagaatgcatgtagtgagatgggagcaagaatgtctgccatggacagctcaagcagaaacgcaggagaaatgctcgaccgtctcaccctcacatacaacaggactcgtcaagcttctattacaacagagcttattgagattatctctggagcttctgctcttgaagctgctaaataagcccatccgtgttagttctcttttcttcgctttgatatttacccccaccttgaaggagaagagtgtgttaaaattttactgaatcagtttcctttgctggcttcttgttgagacctaccaatgtttgctcaacgatttttaataaacatacctgtaatttccagcaggatttcgaataattgcattaacattttgttctgattcagactcgcttcctccagagtctgtagtgttgttttgtgcaaacaccatgtactccggtttatttgatatttttttacctgagccaatattttgtcacttcgccaggttttgaagtttgaaactttgaataatcccacaaacaaatctaaacaatatatccaatgcagtgtatgttgtcatgctagtggatttctagaattttggaattatgtataaacaatctgatgttagaaagtttaaactgatgtgaatccaatcatgtgaaacaaattttatggctcaatatctcctcttgatcgaggtccactagggtatccagagctgcggatatttgagatatctggtaataaatttaccggaggcttgccaccaaattattatgagaattggaaagcatcatcactcacgctaaaatcaagaagggggtttatatatgatatacactaagaatgcttacggtagcatttcttatacctatcaagattttatagatttaagatacaaaggtctacacatggagcaaaagaggattcttactttatacagcgctattgatttttccggaaacagacttgaaggacagattcctgaatccattggtctcttgaaggcactgattgcactcaacttatcaaacaacgctttcataggtaatattcccatgtctatggccaatcttattgagcttgaatcattagacatgtctagaaacggactatctgggactattcctcaaggactcaagaccctctcgtttttggggtacataaatgtgtcccataaccaactcaagggtgaaataccacaaggaacacaaatcactgggccaccaaaatcctcatttgaagggaatgcagggctttgtggtcttcctctcgaagaaagttgcttcggaacgaaagtgccaccaatacaacagtcaaagaaagaagacaaccaagaggatgcaaaagtgttgaactggaaagcagtggcaacagggtatggacctggagttttttttggattggcaatagcgcaaatcattgcttcatacaaaccggagtggctcgtcaagataattggtcctaataagcgtagaaaccattaagatttgttagtgtttgatttttgaatgtatgtcaaattgttacttgttttgcgtatgatatttgaatgtttgtcaagtattccttggtcttgtggtgaagcaggttctctatgcttcattcagctttcctctgtatcttggaagagaaaaatactagaggccgggaacgggaatcacgttatggattttttggtctctgacaataaaaagtagaaaatccaaactcttgttattgttatcccacaggaggaaatccgttcttgttattttcatcattggattctatttccgtgtaaaagtaactttttcccctaaaaacaagcttctctattttgtaaacaaaaaaataaagaaacagaggaaggagacgagagggagaaacagagcaacatatgagatctgtttcctaatgaataaaatgcatgagagagagggaccgagactgagactgaagtgtggcggtgagatcatacggagcgtaaaaaaaaaacaagaaaaagatagatgttcccttttctgtgttttcttggatcccaagtaaatttttgatttcgttcacactctaagttcaaatggattgaaaactacgtgtgttcgtcgctagattcagtttttttagactagacaattcttcttcttcttcttctttctttttggattcttaagttccgacaaaaaaaaaaactagtcaatctcgttttccacacactgaacctggtccctagaccctaggcacatatatattcctctaatcaaatatttcaacgttaacgaaattatgttcagaccaggagaatgtactactaatagacataaactctttgtgatctgttcataattgggtttgtttagaataaatatttcctcttattcgtcagagtagataacacattttccacgacgtccttgtcgtttaggatttgatttcggaccttttgactccaagaaaacatgtcccatgcgttggacaaaaaatagtgacatgcacatgcatttggtattcagactttatgattcatttcccactcaaagacttcacttagctctaacttcttctaagtcaacttgtagctccaaagcaaaaccacataccgtttatttataccaatcttctctctcactttccttaaaccataatcatttaattttcctaaaatagttctcatcatg

SEQ ID NO: 11142 - DNA, 3000 bp, Unknown
  misc_feature (1)..( 3000): cDNA_ID_1022712_gDNA_ID_2214480_Annot_ID_133229 3000 nt of promoter + ATG
ttcttcttcttcgtcttcttccttgggatattttgttggtggcgcaacgcaacttccttggagaggaagaccacagagacctacattcccttcaaatgatgattcagcttgcccactaaactgtggtccctgtggtatttcacctttgagttggttatgagctacacttatgtacgccagaaatgagaggctcccgagttctcttggaatattccctgatagttgatttcttgacaggtctagtgactcgagctccgtaacatttgccaaagacataggaatatggccagtgaaggcgttgttcgataagttgagcgctatcaattccttcaacagaccaatagactcaggaatctgtccttcaagtttgtttccagagaaatcaatggtgctgtagaaagtaaggactttcccctgctccatgaatagacctttgtattgcaaatccattgtatcttcatagatataataagcattcttgtagtctcccatataaatacgcccatcttcatttatcttgggtgatgatgctttccagttaacaaagaaatttggtggcaagcttccagtaaagctgttatctgacaattcaagtatccgcagctcgggaaacgcgagaggacctcgatcaggaggagagagatggccgaagaatctgtttgaacggagagtcaagacatgcaaattgggtagcgccttcagccagaaaggaaacgtgtcttcaattctgttgttgtcaacactcagaaacctcagagaggagcaattcaaaagtgattttggaagcttcccggttagtcgattatagccaacgtcaagcgtctgtgtcttagcaccgctatggaactcgtcaggtatacttccttccaagctgttcttcctgaggtttactacttttaagttactcagacattgaggaattggaccggtgaatttgttgtaggatagatcaaggacgatgagagagcttcggttgcagattgagagaggtatgttccctgtgaaactattgttccacgcagacaagtagatcgaaccgagtggtggagtaggaaacgctcctgtcatggagttataggcaaaatctagtaactgcactgatgagttaagtaaaacttctgaagaaccttcgaaaccagtcaaagaattgttaacaagatttgctatgctaagacgaggaagcttccaaaaccactcaggtactttccctttgattagattgttggaaatgtctatatgctccaagttttgaagggtcttaaagatgtttggaaactcgataatgtcgcactggatcaaaatcaagcttattaagctcaatggaaactctgaatctgaacttaaactggctggtaataacctattttgacgaatatcaaagaccaacaaagatttgagaggagcgaagacgcgtaagtcaattgggtgacttatgtttagggaagcaagttcaagatggttgaggtttatgagctttgagataggctctatgatttttccttcaaattggttaaacccaagggacaaacgaactagcttagatgaagaagaagagtttgggacatcaatagaaccagtgagatgattctttttcagatcaagataagacaagaaaggcaaagtgggtagtaaatcaaaaggtatggctcctgagaattgattgtaagaaaggtctaaaaaggaaagctttgttaggtttcttacaggtgggaaactaccagtgagctcattatgggaaaggtttaaatgggtaagcaagataaggttactaattgaggaaggaacttgaccagtaaagctactagaggcaagagacaaaacctctaatctggtgagattgctgaattcagaagggagtgaagaggaagtgaagttgttgtgagagagattaaggtaacgaagctgatgcaactcaaagagactactgtttggtttgagagttccagtgaagcaaccacttgggagctgaagcttcgtgaccgcaccagtcgtgttatcacactggactccgtttaagtagtcactgcggttgcagccgtcagattcaaactcattcttgaattggattagagcttggatctggtcaggaagacaagcaagagcgtcggtcgtcaagaagcttgaaacgaagacgatacagtagagtaagagtagcgagcaaaaatgcaaacgcatggtgtttgtgattgaaccaacaagttgaggaaattattgaacccaaaaaaagacatatcaaagatttgctatatatatgttattttaagccgcctttactaaatatgtggggtttaaatgtcacgtgaaatgtctacgagtcacatttgttcatgaagtaaattccacgtggacatctctgactatataactgggagttatagttgactgttaaaattggcttcaaaatttagcaacaagaggaaatcaacactcagcaatttactctcattggatcaaatgaacgcacattaatatgacgtaacgatgatgacaattctgtttaatagtatcttattgtttacagatacagaaaaataaattaagtgggcctttcaataattaataggttggtgaaatgttaccttctcttgatatttttttaattttcatttattatgagtatgttgcgttatgaaacaactcgcattaatttggttatagattggagaaagaagaagtcatggtcaaaactcaaaaatgtaaaaggaaacaagacgtgtatgacgacgtgattgataatctgaggagatacctttgggccttataagatgggccgaaaaagtaatagtattagcctctattcggcccgattaatttcaggggaaattttggtaataaagtggaaacgacgtcgtgacaaaactactgtgtagactgagaaataaagaagcccttgattttgcccattgcagtcatctctctcgaatctctctctataatccgatctgagaaatttcgccggagctaggttttgttgtttaccgatcaatcctttaatcaatg

SEQ ID NO: 11143 - DNA, 3000 bp, Unknown
  misc_feature (1)..( 3000): cDNA_ID_2705418_gDNA_ID_2214480_Annot_ID_133235 3000 nt of promoter + ATG
gttttacttggcttagtcttcgattctctacgcgtttcagcgtcaagttttctagatctctaaagctttcgtgctcgccgatataaatctctaatatcggtcccgtaagatcgaattagattcgcgtcgttttttaaggaaccaaaataatggcgcaacaatcgttgttctacagtttcatcgctcgcggcaccgtaatcctcgtcgagttcacagatttcaaaggcaatttcacatctgtcgctgctcagtaccttgagaatcttccttcctcgaacaacaagtttacctacaactgcgatggtcatacgttcaacgacctcgtcgaaaatggattcagtgagtcaaaatattgctcgtgatgtgtttgtgattgtgttttcgattagtcgatttattcattgtttggattagatttctttttacctaattgagcatttgagaatcgagttcttatgtttggtatatctctatgacttatctgagtcgagttcttatgtgtttaccgtttggtataatttcaggaatagttatgtattgggtttgataattaattgatgttagatctataatcagtgatatgtttggtggatctatttaagcatctatgcaattcttattatgaatctatgattcttggcttctttgcgtgtagcttttgttttcatgaatttggctggtttttcaaatgagagttgtttgggaaatttgtggatatatatcgctcgagtaaattgcattggtgtattgtgtttattatattgctctgttttaattaaacttagttgggttttgatgacgttggatatggtccatatcatatggactctttattatattttttaagtttcttatgagggatatgtttgtgcagcctattgtgttgttgcagttgattctgctgggagggagattcctatggctttcttggaacgcgtgaaggaggatttttataagagatatggtggtgaaaaggctgcaactgatcaagcaaatagcttgaataaagaatttgggtatgtgttttttgatctatatgattggtattgagaagtttgtattattcatgtcaatgacagactcctttttggctgctctaaaggtcgaatctgaaagagcacatgcagtattgcatggatcatcctgatgagattagcaaccttgctaaagctaaagctcaagtgtctgaagttaaaagtttaatgatggaaaacattgagaaggttcgattctgacccttttttctgttaatggtataattttatgttttaatctatttccagtagagttaagctcgtatgagttaagtgtcatgatcttttggttccttaacctttaaattgatgaggggaatgtccagttctgggttgtataggcatgtatgctgaccgtttttacattgtggaacacattcatttgcaggttcttgcccgtggtgtgatatgtgagatgctgggtagttcagaggttagttctcttaggcatatggttctaagttccatacacatagatatgcttgagttgccagttctctcttactaatgttgtcttgggtttccaacttttaattgaactcgaaactgtcacagtcacagccgcaagctttctatataaaaagaactcaaatgaaaaggaagaagtggtttcagaacatgaagataaaactcattgtccttgcaattatcattgccttgattctcatcatcatcctctcggtttgtgggggattcaactgcggtaaataagtctggaacatttcttcccggcgttatcgactgcgctctgtgcttcccaagatctctgagaatatcttcattcagttcgttgtgctgctttctttttgtggtttctaatttctaatttctgctatgtcctttctacttaggttgtacataaatattatacatatatgtatgtcctttcttctttgaaattggttttgtataggccatatatatgtatgaatgtttttgctattactggtactgacactgattcttgcgaaccaatactgtgacgagatttaaatatgtaattggcaacttacaaattgctctggtctgttgatgtcttaatgaaggctctagttgcgaatttgcagtgatggtgataacggtgtaacatagcctagattggagacgagtctgtttggtctgaccggttcagcagagtctttttttttttttcgtccttcagcagagtctccggttagttcgtttctttcgttgctgccacatcacctcgctcgaacctttctcttctgcttccctaattacggaaacgattcgtctgatttcgattcttctaaacgattagtcggctagccatgttgaagacgacgcgctcaagttctcgactactgaaatcgaaacgacctgcggagacacctccgacgccggtccgaaggcttctggactggaggtgatttggcgtctaaccgatggatagctgcgactgcgatgcattgttaaggaaacagacagagatgagtaatccaaatgcacctgtgacctgctttggtattgtttctgattcccctcctatgtgaaattcaatgcttgttaaattagggaaatttggtaaagctaaacccttggtttctagctttagagtctgatattgtattagagagagtgtttttatgtgtatctttgttatcattttcgatgatttgatctatctagttttctcacaatgttatacacaatcttttaaccattgataagcaaccttcattgagatagagagaggcaaagcacaaagaaaggagatttcagaactcaaaagatttcagttttaagttttccttataatagaaaaggatctattaaccgttgaaattctaaagcttttacatttccttccaaactcattcctctgttttcttattttcctcttttcctaaatcaggtttgtcaaaaaaaaataaaaaaaaatgggttcagtttctctctgaagaaaccaaacgacccaaaacaagataattccataattgtaatg

SEQ ID NO: 11144 - DNA, 3000 bp, Unknown
  misc_feature (1)..( 3000): cDNA_ID_2705422_gDNA_ID_2214480_Annot_ID_133236 3000 nt of promoter + ATG
aaattttctacaaataccccaaaaaagacaatttataaaattattatccaaccacatgtaataatctttgatgacttttaagttttaaattttaatagtagatttagataatataggaaccaattattcaaaggtcaaagttcaaactagcttatccaaattcattttcgctgataaaaatacgttgaaactatcaaataacaaaataccattacaccaacatcaccaactttttaaaaccccacaagttgattatttgaatttgcttttaggtcctcaagttcaagattgtttcaatttgcacaatctgcataaatctttctgaaatataacttttttgccctctaaaactcaagggtttgatttttcttcttcaactacgttaagatttctcctacacttttctttttcaccgtattctcttttagtcctcgattctctacgcgtttcagcgtcaagtcttctagatctctaaagccttcgtgctcgccaatataaatctctgagatcggtcccgtaaaatcggattcgcgtcgtttttgagtaaaaaaaatggcgcaacaatcgttgatctacagtttcgtcgctcgtggtaccgttatcctcgttgagttcacagatttcaaaggcaatttcacatcaatcgctgctcagtgccttcagaagcttccttcttctaacaacaagtttacctacaactgcgatggtcacacgttcaattacctcgtcgaaaatggattcagtgagtcaaaatattgctcgatctgtaagcgtagcttgtttgtgttttgatttatccattgtttgaattagattttttgcctaattgagaaatatgaatcgagttcttatgtttggtatagtttccagtaataattatgtattggcgttgataattaattgatgttagatctatggtaatcagtgatatttttggtggatctatcaatgaatatttgcaatttttgttctggatctattgattctttgcttatttgcgtgtagctttcgatatcatgaagtttttggcattagtgtattgtgttctttatgtaactctgttttactaaacctaattgggttttgggtgatgttgatggcggatatggtctctttatgatagtgttaactttcttatcagcgatatattgatgaatctattgctttatctcttaatatagagtttaaaatggaccggttttgttttcgtttgtgcagcctattgtgttgttgcagttgattctgctgggaggcagattcctatggctttcttggaacgagttaaggaggatttcaacaagagatatggtggtggaaaggctgcaactgctcaagcaaacagcttgaataaagaatttgggtatgtgttttttgatctctttgattggtattgaaaagggtctatgattcatgggcatagttattgatggacttctttttggcttctctaaaggtcgaaactgaaagagcatatgcagtattgcatggatcatcctgatgagattagcaagcttgctaaggttaaagctcaagtgtctgaagttaaaggtgttatgatggaaaacattgagaaggtttgattctgacccttttttctttttatcgatatagttttatgttgtaaaccttttcgaacagagttcagcttgtatgactttagtaccaggatcttatgattcgtaaagcataaactgtagagaggaatgttttattctcggttgtgaagacatattctgttgttaactcgtttatgcattcgtttgcaggttcttgaccgtggtgagaagattgagcttttggttgacaaaacagaaaaccttcgctcacaggtttgttttctaaatggttcaaagtcaatagacccacacagagacatgcaagagtttgcagctttctcttactgattgttgtttcttgggtttctaactttaaatttgaactcgactttatcacaggcgcaagattttagaacacaaggaactcaaatgagaagaaagatgtggtttcagaacatgaagataaagctcattgtccttgcaattatcattgccttgattctcatcatcatcctctcaatttgtgggggattcaactgcggtaaataagtctggaacatttcttcccggcgttatcgactgcgctctgtgcttcccaagatctctgagaatatcttcattcagttcgttgtgctacctttttgttttgtttttgtttttgtgatttctatattctcatactatatgtttcttcttagattgtacttcttgaaatttgttttgtataggctatatatattatacatatatgtatgcatgttcgacaatctgcaatgttgctattgctggtactgacactaattcttgcaaaccaatatttggacgatacttgttcttggcaatttactaatttctttggtctgttgatgagactctagttgcggattgcagtgaggtataagcatagtccacagccggttaatattaaatggagatgaatatgtaattaacacggtttcgtctgaccgattcaccagagtctccggttagttcattaagggtttgctcaaacgctttctcctctgcttccctaatttcggaaacattcgcctgattttctgagattttggaatttcttcgaattgattgccatgctgagctcaagatttcgactgctgaaatcgaggcgacttgcggagccacctccggctgatgtcgcggttatgtgtatttgcaggaaatgaaagtgatctccttattgcggcaaatcagccacttcctgtcgactaaaactgtggtgcagcatgtaagaacaaatgcaagttcggacaaacgtgttgtcttggtcagtggttttacttggcttagtcttcgattctctacgcgtttcagcgtcaagttttctagatctctaaagctttcgtgctcgccgatataaatctctaatatcggtcccgtaagatcgaattagattcgcgtcgttttttaaggaaccaaaataatg

SEQ ID NO: 11145 - DNA, 3000 bp, Unknown
  misc_feature (1)..( 3000): cDNA_ID_2113979_gDNA_ID_2214480_Annot_ID_133237 3000 nt of promoter + ATG
aaaccatagagacttgaattaatgagaatctctcaactctcaaccaaaccttaagaaatccacagccgagatatatctttataaactctgtcctcactaatggttctttaaccaacttacaagagctctatcttgccgcagtccgtccttttcaaagcatatcaatgtctacattgtgtctatataattataaaacgctcatgaacagttgctaatacttgttaaaactctcacaggagcgcgttgtgttgctacattgttgcacgagatgaaacgccgtggtaaagactgccgttttggagtagtgtcaatgtgcattggtatgcttctcactcgaataattcattgtgaatttggtgtctgaaatatgtgtctgagggatggttttactgatttggtaaactctggcagggacggggatgggtgcagcagctgtgtttgagagaggagatggagttgatgagcttcgcaacgcaaggaaagttgaagcgcaaggtcttttgtccaaggacgctcgctagagaggaccatgcaccaaaaccgtttttcacctcacctctctcttttctggtcttcttgtcactttcttcagatattattatagtttcgaataaagcacacaaccaatgtttgcctgagtcttgtgttgttcttgaccaggtcatgtgtttagtattttttttaagtgaagggggataatctttaaatcttttatatgtaagaatattgttcttctcgaatttcatcagttgttgcttctagaaattttagattttttgggtggcagccatttctatatttcgatggataagtcaaacgttcataaagtcaagggttctgccttttgtttgtgtttcatgattttaccttgaatttcattaactaaaacagtgttaatagtaacagttggggtggtggcgcagttggctagcgcgtaggtctcatagctactgagtgatcctgaggtcgagagttcgagcctctctcaccccataattttattttctcatagctatttatataacgttccttctagtatttttttttcttttcgttatagtatcttgtctttgataccggagacgttataacggcagtataagacgttataatcatgttccaatgcatcccctcagttttgtgttaaaaacgagccatcaatgttatcatatatggaaatcattattgaggctttgaccaattaattatgcgaattgaccgactttgatcactatacagagcaaaacaaatccactgaatcatttatttgtgtaggttcatcttttttgggcaccgtattcatttcttattccatgaatttgacggagtaattttgattttctttttcgagtaagaatctggtcaaatattcgatgaacctctacaaaaaaaattaacctctataaaagtgtagattaaccaagtgtttcatcacaaaccatttcaacgtaaacgaaacaacaactactactctcaactttacactctcttgataagtctcgatgatgaataacatgaagctcttgatcatcgctgtgatgatcatctcggcagctttgcttccagcgcttgtggtcggatctcgtccggtaaaatgtgacaattgcatggacggtggagaaaaagaagagatcatgaagatgagttcaggtgtagatgtgagccataggatacttcaagctaagagatttatagattacgaagcattgaagaaaaacttaccagccaaaccagatggtaaaccggataaaccggataacaaataccgacgtggttgcagtgccgctacaggatgttaccgctttacaaattaaacataaaccacctctctcttcttcttcttcttcctttcgttggtgtgttttattttatttttaattagtatttccaatcacatttcttattattatattttattgcaatttgtaagcctttgaggcattatctcctagagagttagaataaacttcgtttagaaattgtcatccttttctcaccaaatgattgacgagtgaaaattgatctcatcgtaaagtatttttgcggtcaagttcaaacaaattgatcccttctctcgcaccatattcttgttttattttatttaaacgatcgatatatttccaaaccattcctccaaaactatcacacattcacacctaccaatttcaactttaaatacaaaatatagtcttgttgtaaatataagatacactttagaagtgtacacgtgaaattcaggtatatatattacaatagtaagcaacctctaagtacaattaaatcaagaaaaaaatagatttgaattaataggagcggacatgggatgcatgtagaattgtagattatcatttattatggtgactagaccattgaactttcctataactttgaaaatattcttatttagtcatttaatttagattacaccaaaaccccaaatatgccaaattttctacaaataccccaaaaaagacaatttataaaattattatccaaccacatgtaataatctttgatgacttttaagttttaaattttaatagtagatttagataatataggaaccaattattcaaaggtcaaagttcaaactagcttatccaaattcattttcgctgataaaaatacgttgaaactatcaaataacaaaataccattacaccaacatcaccaactttttaaaaccccacaagttgattatttgaatttgcttttaggtcctcaagttcaagattgtttcaatttgcacaatctgcataaatctttctgaaatataacttttttgccctctaaaactcaagggtttgatttttcttcttcaactacgttaagatttctcctacacttttctttttcaccgtattctcttttagtcctcgattctctacgcgtttcagcgtcaagtcttctagatctctaaagccttcgtgctcgccaatataaatctctgagatcggtcccgtaaaatcggattcgcgtcgtttttgagtaaaaaaaatg

SEQ ID NO: 11146 - DNA, 3000 bp, Unknown
  misc_feature (1)..( 3000): cDNA_ID_1808741_gDNA_ID_2214480_Annot_ID_133239 3000 nt of promoter + ATG
tggtaactccggtaatgttaaaatcctcaacggagaataagttgaaatgccccattttgctattgatggaccttagaccgttgatcttcgatgatttaacaaaagcaaacccaatgttcatagctagtgtacgacaattagtgtttttgttacaatcattgagaggccaagaataagatccttgaccgtcaagtaatccaccgccagtaacagtgagattatcgacgtacttgaaaagtatccattcttcttggttgatggcgtaaggattacgaggagccaataaagttcctctgataaaaaaagttatagagcttttgcaaggaccagagaatgttacttgacggagatagaatattccggaaggaatatagaccgttgatcttccgtaactccattggcaagcttcgttccacgcctttgtaaacgcaaaagcgttatctctttggctatctgcgcgagcaccatagtttctgacgtcaaagatttttggttggccgggatattccttcgtggaagcggcgaggaagaagaagagagaaggcacacacaaaatcagaagaaccctagacgccattctctcttctttggtttggtaacccttttttggttgaaggaaaataaagcgtttaggcttcttatttatagagttacaagataagaatatatgtatttatttaacaaatatgggaaacgcaatctttactatcacccatatggaaaatacttaggaataatattatgaaaggatccttttaagatggaataagatgattttatgtacatatatactactaataaattatgaaataaatgtaggattcattctttttctacttctttttgcatatccgcttgaatctatataaatctgtataagttggaatgttttgactgtatattgtgtcacattacattatacattacagttccacgtggtattttttatgatttattaaatttgtatgtgttaaataaatttatacttcattcatatagataagaaatgtatactttacagtttacatgtgtatttgttattaaaaaaagataatataaaagaataagatatgggaatgtttaccctaaaatcatatataagagattcaattatctttttatctcatttaattttgagtcaggaaaaaatatatatacagagaagaaacaaaattattaaaaatgtaaaatttattggttaacattttgtctttacaaaaaacatagatatgttaatataacgaatatagtaaatgatagaataaagatatttagtatggttaagtaagaaaattaacattttcaataatttcgtctcttctttgcataggatttgtttgccaactcaaagtatattagataaaaagataagattgaaaactaaagttgataagatattatattgtttcacaaaaattagacattggatagatgtttaagattaaataatcttgttagaaataaaactgaagtctatgatgttgcatgtaagagctaatacagtaaaataaaattataaattaataacatggggaataaaatattttattgatttatataagtgttaatttttagatgtagtaaaaatattgaaaatgactttttcacaaaaattaaaacaaattcaaagaaaaacaaataacatttttatccaattacgttatatattatattcgtccaactttgaaccggaaaagtttattaatttacaatgattattaaattgacaagtattaatatatagatgtttcactctaataggttaaatggacaactatatgcgaaaatattagggcgatattacaataatcacaatgtaaagatagacaagcacaatgtaaagctgatcacgtacagttttgtttcttcctcttcaatgttaatctctccattcagttagagttaatttctagtctgatacataacaaaactacaaagtttctcgagtttttttgttatttgataactctctacacgatctaatttcaatattacatgtcggaaaacttccggaaagtaccacacaaatgtttgtaagattgagtaaaattgagtaaagagagctttaatctcccatatttgcaagtcgatataaatttggtatcacggcgtgtaagagatcttgacatgctaaccttacgcagatgtgcattgttgcagtgccatattgtcattattggtaatatatatgcctaagtaaagttcatattgataaaaattttattcaaacactattgcatctgcttgtcaatcgcataataacattattaattgaaaatgtagttttcactattatacaatatccgttcttatttcgtttaaaccggccgagcccatagtattgcaaactatcacaccatatgggctttaactttacgttggtaaaacgtaaaaagaaaatagcgatcaagtctcaagaagggtacttttagaattaatagcaactttaaggcgtaaatagaagtaatacaaatagttggggttattatgtaaatatgaagaagattaagatccagaagatggaaatgaaaaacacggcacgcatttcaaagcccaaaacgggcgggggcaaacgtcacgcctaatcttatcttcttctatcacactctcagcttatctatgactatgactctcatcatcaattatttcacactattaacaatcaccaaaccagtgtgaacattttaattcataattagagtaaggtcattaggctaaaaactgtttgatttggattttacaactataggataagaacttgtatcgctgtcacagatgatattttttggtcgtttaagcaaagaaatattacgaaaaagagatattttttattcttacttattttgggattatcatttacccggaacgggcaaagcggtgagtcatcttaccttataaatgatcacaaacccgaggactgtgagttttcgtgtagaacaaatccttctctgagaaaaaacaacagatccgaattttatctttaatcagccggaaaaaatg

SEQ ID NO: 11147 - DNA, 3000 bp, Unknown
  misc_feature (1)..( 3000): cDNA_ID_3038996_gDNA_ID_2214480_Annot_ID_183315 3000 nt of promoter + ATG
ggctgtggcgggtccagactgttttgagaagcgagctgctcggttattgtgagttcgagtatatatgcaggtggctcgtggtggcgacgggagagaatgctgagaaagtggtgccggagtttgagggtttagaagattttggtggtgatgttcttcacgctggagattataaatccggcgagaggtaccgcggaaaacgagttctcgtagttggatgtggaaactcaggcatggaagtctctcttgatctatgcaatcatgatgcgagcccatcaatggtcgttcgaagctccgtaagtaaaattcagtaaattatacccaccaagttacgaaaaacagagcaccctgattcttagtagctcctctgtttaaaacagagcatctgatagttatactctgtttttccttgttcgatcaggttcatgtattaccgagagaagttcttgggaagtcgacgttcgagttaagtgtaacaatgatgaaatggatgccggtttggctcgtggacaagactcttctcgttctcacaaggttacttctagggaacaccgataagtatgggctcaagaggcctgaaattggaccgttagagctgaagaacaccgcaggtaaaactcccgtgctagacatcggagccatttcaatgatcaaatcaggaaagatcaaaatcgtagcgggaatagctaagtttggtccgggaaaggtcgaactcgtggatggtcgagttctgcagattgattcagtgattcttgccactggttacagaagcaatgtcccttcatggcttaaggtagacaaaagtattatctttttcagatttttgtctcaaaagataacattttataggaccatagaataccggtattgatagttatgggaagtttgataaaaactaagacgttgattggtgattgatttattgttatgcaggaaaacgacttgggtgagattgggatagagaaaaacccatttccaaaagggtggaaagggaaggctggattgtatgcggtgggattcaccggaagaggactctcaggtgcatcgttcgatgcaatgagtgtagctcatgacattgccaatagctggaaagaagaaactaagcaacagatcaaaactgtcgctactcgccaccgtcgttgtatttcacacttttgattttcactgtttatacgaaaacatatatgagaagaggtaaaaaagagaggatcgatagtgttatgtgatgtgaaaatcaaagagataagcccactccatgagagtataactgtgaaatgtgtttgagcttattttcttgtaaggaggatgtggctccatgtatttaacgtattctttaacattccaacttatcttttgttagcaaatgtgtttgattagagctgatctagaaagtttaaaacatgattagtttaaacaaaatatatgaacatgtgtctgaaactgatttcgtcattgacagaaataagtgaatgagggaaaaataccgaaaacattcctccgtaccgtaccagcaatacatgaactgtgtatgtatcatttctcttattatacgatggaaatatagagacaacaaacatcaaggttctaaaatgcttaaacaaacattcattcatcatcatcaaaaggagccattgaaattttaccagacatcaggacgaagctctccggtagctggaggcatccaacgaccagaattgtacacgttttcaccgactttccatccaggaacatccttcatcacatccgcctcgtattctagatacttcttccactcagacacaaacctatttacaaatcaacacgtggtgatccaatgtgagagtttgtaccacacaagcaaacataacttcttttgtgaatcctacctttcatcttcttcagcttgaagaatcggtagaattgctctacgtgcagcgtacttctcttccttcaacgccctatcatcacagcaatcttcattaaaactttggagttgatacattgtgctcattttgacacttttgtcatcattatgcaattgagagtctaacaatagaagactattagagaatgtcacttacacacaccaagaaagataacactgtgttgtcttattcgttgcaaattactccaaatcgacactaatcaagctaaataactcacaatgtgaccatctaaaaaccaatatgcaactaaccactagtatatcatcttgcaatttgattgctttcttcatcacagctcaagagatcgttaattagtaaccaatttcgagactaaccacacaaatttataagcatcaatcccaaattgtcttaagattcaatcccaaattactcaaaatttcacaatagagaaaagcctaaccaaactcaaattccacatctcattatctaattacctgcggattttgttgccctgaccaacttggtacatgccccaagcaaaagcaccggaaacggtaaggaaaatagccatggcgctaggtcccgtgttggagatccggcgagcatatcggaccggcgcgaatccaccaggtggtggaccatcctgaagcaacggcatatccttcacactcgccattcctggcttcttccttatcatcgcctccgtcatcttcttcctcgattgatccccaaatcgatctttgattcgttaatcagtgtgtgttctagggattctgagaaagacaatcagaaatgaaatgaaatgaaaaatcttttttttggtgactttttttttaaaatgttgtaataatgaactgggctttaaaaggcccatattaaaatagtaccgggtcaaaactcgaaccggatccaaaaccggaggctaaaactcgaccaagcaatgatgagcttggagaaaacgtaaaaccctaaaccctactgcttatagaatcttcgacgatctgcttcatttctcctcatctacgagtgagagaatttgtcaatttagcttctttagttcggtctgatctgaattaattgcaatcttctcggttgtgtgagagaatcaatcaccatg

SEQ ID NO: 11148 - DNA, 3000 bp, Unknown
  misc_feature (1)..( 3000): cDNA_ID_3039000_gDNA_ID_2214480_Annot_ID_183314 3000 nt of promoter + ATG
gttttaatatgttttgaatttttattaaaccacgcagatacgatccatggttgaagcaagcacttctgattatgacaaggagaagttgcaagaaaggttggctaagctttcgggtggtgttgctgtactaaaggtaatgtacacctcttgtgaacatcagactaataggctattaatgcattattagtttattactaatgtcgagattactcatatgggtttttagattggaggagcaagtgagacagaagttagtgaaaagaaagatagagtaacggatgctctaaatgccactaaagcagccgtagaggagggtattgttccaggtataatctatcccaaatctaaaacaaaatttggttgaatcccttaagaaaattgcgtgagaagagaattatattactttgtgtgtattacaggtggtggtgttgctcttttgtatgcttcgaaagaacttgagaagctttccacagctaactttgatcagaaaattggtgttcaaatcattcaaaacgcactcaaggtgtttctctcatcacattgttcatcctcgctagcataaacagcttctagaatcttacacacaaaatctttctttgatgcagacacctgtttacacgattgcttccaatgctggagtcgagggtgcagttgtcgtaggcaagcttttggaacaagataatcctgaccttggttatgatgctgctaaaggttacactcttatatgcattagataattcactttctatagttcttgatccaccttgttatatatttccctatattccgaaatctgaactagcttcttttggcatttactttcaggagaatatgtggacatgataaaggctggtattatcgatcctttgaaagtgatcagaaccgcattagttgatgctgcaaggtacacaaagattgaaaattggttgtccaattttgtattttattgcaatgttttgctaatttattctattggttagtgtttcgtctttgttgacaacgacggaagcagttgtgactgagattccaacgaaagaggtagcatctccgggtatgggcggtggtggcatgggcggcatgggtggcatgggcggtatgggaggaatgggtttctgaggagaactataaaccctgagtagggttctttggaatctgttgtgagagatgctacggttggttcatccacaagacactaatgtattctttaatcatgattggtagagagagaccttcagattttccgtgattttcaattcacaaacgatttataaactattttgaagaagatccttttccgattcatgcaaatttcttccaaaaataattcagattagagagttcagtgaaacatcaagtaggttgtgtttgcgcatatggaggagattccttagttctcgccaactatcaccaaacccttatatcttattaacacgatatttagctgtttatttatatgtggttcaagtaacagactacttatttcaaataaaaaatggaaaaagcttttttcatagaacgaaacaaacgatatagtgtagtttaaagtatgttacccgaaaaagaaagcaaatctacttaacacggtccacaattcgcgtggtgaagaaggttataattgggtcccaaaacattcatttccccccaaaaaaagtcataattatgaaccaaactctttttgtcttcacgtctttgtccgttccataaccatagcttgccctacttattatagcagtaagccataatcaaggaaaccgtatttgtatgtaacttaatattgtggattgattacagcttggagggaattgattcaatttggccagttggtcaaacgcaatggtataagtccaccgaactagatggcaaaaacaaaaacaatttgagaatgttcttaaaagttccagttcaaatgtgttgtaaatagtcaaattccttttacgaacgatataaaagtagtcaaatagagatagggaataaagaaaaatacttatctagatgatgaattagcttaacgagaaaactattagtatctgttttggcaagaaaattttatgtctcggttgattacacacactttttagttaaactacaagtaatcaatcatagattttactttaagaaagttccacaaacacgacgtggctgtccattataacataacctcgtggtcatggaatgtttcgtcttattttatttttaatattacacaatgttcaaagttctcaattagcaagtttcatgtggtgtgatgaaaatcattaaccataaaaaccaacactcaagcggaaatccaactctcttaaattaaaataattcactcaaaattttattttcatttggagataaaaatataaattggtcaaaagcaaaataaagatagaggtcatcaaatcgtacggctagaaacagaagtgcacagagttattacgatgaaaacgttacacagaatcattttcatacaccaaaagctctttctttttgtattttaaatcgagtttcgaaccgctctgcttcttctttactctctgcgtgattatcgtgtgagaacattgaactcacacttcaactctcaagcttcttcttccttcgccttcttctcattcatttgcttctgtgtctaattttacatagcgaaattccagccatagccaaaaaaaaaagggtcagattttttaaacggatttttttctctctctctcaattactgataatgagtctaattgagagtttctcttttgacctgttgttcttgttcttgtctttagattctagggatgttcttaaagtcttggttgattacattatgatccttctagagtttgttctgtgtcatcaatctaaaccaaatcgctcatattcttacagaataaaagaattgatttagacactttttagaattttgtatacattggatcaagtagcattcaaaaaataattactgttctctacattttcagtacttacaggttctttaatttcagtttcttgtaggttttggcaatg

SEQ ID NO: 11149 - DNA, 3000 bp, Unknown
  misc_feature (1)..( 3000): cDNA_ID_2717109_gDNA_ID_2214480_Annot_ID_183310 3000 nt of promoter + ATG
gattaagtatttgattaagtatttgattaagaaagcagagcgtaatttactttatcgtttcttcattacataaactattgattatatctgtaatctcattgatacttttgtatacaatgattcatattaatgaaatatttttagatgaaaaaagaaaaaaaagatacatatatatatgtgtatatatatacatattttaaatacaaatgttatatttttcgaaattgtttatcggtttgcatatatagtcactcctaaattacattctttaattgtcgcagtaaaatattagttcatataaaagatacttactgggaagattcatgcgacctacatcttccggattcatgcaaatgttaagaaaggaacaacttggttttgttaaatgtttcatatatcatttttaaatttgccgcctttaatttagttctaaccattgaggaaaatctaacaactataggtaaaatgttatttacttatgccaaaatgtttacgaaaaaagttatcggggtcccctaaagacccttttcgttctaataatttaagcgtttcatgtcaagcacatgaacctctcctaacgtgtttatattatactattatatctagtgtttatcactttccaaagttagaatcgaaagaaacaaaaccttaatgtaaattcattgtaagtttttgttttaagagtttttttttataacttttacacgttttgtgatctcctagctcaatgagcaatatagtttcacaattgcaaatcagagatcaatgaaatttttagttcttctatttttgtttttataaaactgtgcagtttagtgattccattagcaatagaaaaagttaagtaagttccacatcagacggtgattatctgctgatctagtctctttcattgaatagttttttttcctcacgatcgtcccgttggacccatattccccagtcacatcatgttgtccttaatacggtaatgtatcaacaattatgaagacttttgggaatttaaagcaaatatttctagtcaattcataatgttagttttacatcgttgctttaactcaaagcaatgctgtaaatacgttccttctcgattgaacctgactaaccggtgttttattaagaaaattagtttagaagacgaccatattgaattaaacgatcaataattttcgagcgagttgtttcttggattttttttcttttcttttaatatttatcaataaacgtatgactttgacttgtagtcttgtaccattgaatttgacttaagctattataatatactatattcatctcatattgtaattaatcaaagagacagaaatttctaagtaatttttgtgaagaaataagccaggtgattttcaaaagaatgaatagtaattaatgtttaggaagctgaatcgtagcaatatgtgcacgacctaatgttttaacaaatttgtcaagagtttttgatttagacttaagtaccaatagatctacagtttcaattggatgaattaattgtaagtttgtaaccatgacgttcttttctcacaacactcgcatgccacatgtataagttggtgatgaacaatgtccaatggggaatggggattagccaagtttgtccagcattataagctgaaggattggcttacaattcttaaaatttggtgttggttggtcctgaatgtagactcttgtttcaaaacaaaaaatctactgcagaaattttgaaaatgtgcatgaaacttaaaaagaaaataaacaaacccacatattattggctttagcttaaatggaaaaaaaattgaataattggaccgagaaaatttaacaaaacttaataaaaatcaaacttatataattgaaaacaaagttaaaagactttatattttcaaagtctcgtaccaatcacccctaactttgagaaaaatgaaaattatgatctatctatcaatccggtctaaataatgagaacctaagctgtctcaatcaataaatcttcaaaagctattcctctgggaaaagatttagctgagaaataaaaattctatcactttcccttggcctaaaaaagtttgccactttctttcccacaagttccttttttcaattagaaaattgatgttcttggcactgaagaaaatggccaaaagaaaaacccacaaggcacacacacaagcttctcacaatataagaaagagagagaaagcacacacagtagagagagaaggcatgccttgtcggccattagaacttcaagccaaagcaaaaaccttacttatcctttctccataaaatcaaaatccttattggaatatacactaattgattctcctcatcactatctctctctcttcactttttctttccttttctagtttctctcttttaattcttgggattgtggagctttaaagttcctttttttgaaccttttgagtttctgattctgcttgattccagatcataaccatgatctttgttgattccagaactttagctttttgatttcattctatcaaatcactgaaattttcatttgaggaatcagaagagtaagtttttgcgatactctcatttgtcctcagctgcacaaagtaagaaatcttaaagctttgacattttttgaaaactttagttcgtttcgtaaaggttccatttttttgtttcgtgcagctataacttccgataagattgatcagttttgacctttgtgcttggtggtttcttctatggattcacattggtaagcttcttcgttattcattctctagtttccattcatttgaaatgaactgaaatttgaatcctgaaaccaaattaatcagaaccaatgctagatctaaggcttcgttgcttaaagctctgagttttgcattatattgtctctgttaaattgaaaagatttgattttttttaaaactttggtgtgaaaagaaatgtgaatctctctataattgcaggtgttgagggattatatagtgtttctctttgttgagaggatcaatg

SEQ ID NO: 11150 - DNA, 3000 bp, Unknown; identical to SEQ ID NO: 11146
  misc_feature (1)..( 3000): cDNA_ID_1808741_gDNA_ID_2214480_Annot_ID_183308 3000 nt of promoter + ATG

SEQ ID NO: 11151 - DNA, 3000 bp, Unknown; identical to SEQ ID NO: 11145
  misc_feature (1)..( 3000): cDNA_ID_2113979_gDNA_ID_2214480_Annot_ID_183306 3000 nt of promoter + ATG

SEQ ID NO: 11152 - DNA, 3000 bp, Unknown; identical to SEQ ID NO: 11144
  misc_feature (1)..( 3000): cDNA_ID_3039010_gDNA_ID_2214480_Annot_ID_183305 3000 nt of promoter + ATG

SEQ ID NO: 11153 - DNA, 3000 bp, Unknown; identical to SEQ ID NO: 11143
  misc_feature (1)..( 3000): cDNA_ID_2705418_gDNA_ID_2214480_Annot_ID_183304 3000 nt of promoter + ATG

SEQ ID NO: 11154 - DNA, 3000 bp, Unknown; identical to SEQ ID NO: 11142
  misc_feature (1)..( 3000): cDNA_ID_1022712_gDNA_ID_2214480_Annot_ID_183298 3000 nt of promoter + ATG

SEQ ID NO: 11155 - DNA, 3000 bp, Unknown; identical to SEQ ID NO: 11141
  misc_feature (1)..( 3000): cDNA_ID_2717124_gDNA_ID_2214480_Annot_ID_183296 3000 nt of promoter + ATG

SEQ ID NO: 11156 - DNA, 3000 bp, Unknown; identical to SEQ ID NO: 11149
  misc_feature (1)..( 3000): cDNA_ID_2717109_gDNA_ID_2214480_Annot_ID_133241 3000 nt of promoter + ATG

SEQ ID NO: 11157 - DNA, 3000 bp, Unknown
  misc_feature (1)..( 3000): cDNA_ID_3038996_gDNA_ID_2214480_Annot_ID_133245 3000 nt of promoter + ATG
cttctcgttctcacaaggttacttctagggaacaccgataagtatgggctcaagaggcctgaaattggaccgttagagctgaagaacaccgcaggtaaaactcccgtgctagacatcggagccatttcaatgatcaaatcaggaaagatcaaaatcgtagcgggaatagctaagtttggtccgggaaaggtcgaactcgtggatggtcgagttctgcagattgattcagtgattcttgccactggttacagaagcaatgtcccttcatggcttaaggtagacaaaagtattatctttttcagatttttgtctcaaaagataacattttataggaccatagaataccggtattgatagttatgggaagtttgataaaaactaagacgttgattggtgattgatttattgttatgcaggaaaacgacttgggtgagattgggatagagaaaaacccatttccaaaagggtggaaagggaaggctggattgtatgcggtgggattcaccggaagaggactctcaggtgcatcgttcgatgcaatgagtgtagctcatgacattgccaatagctggaaagaagaaactaagcaacagatcaaaactgtcgctactcgccaccgtcgttgtatttcacacttttgattttcactgtttatacgaaaacatatatgagaagaggtaaaaaagagaggatcgatagtgttatgtgatgtgaaaatcaaagagataagcccactccatgagagtataactgtgaaatgtgtttgagcttattttcttgtaaggaggatgtggctccatgtatttaacgtattctttaacattccaacttatcttttgttagcaaatgtgtttgattagagctgatctagaaagtttaaaacatgattagtttaaacaaaatatatgaacatgtgtctgaaactgatttcgtcattgacagaaataagtgaatgagggaaaaataccgaaaacattcctccgtaccgtaccagcaatacatgaactgtgtatgtatcatttctcttattatacgatggaaatatagagacaacaaacatcaaggttctaaaatgcttaaacaaacattcattcatcatcatcaaaaggagccattgaaattttaccagacatcaggacgaagctctccggtagctggaggcatccaacgaccagaattgtacacgttttcaccgactttccatccaggaacatccttcatcacatccgcctcgtattctagatacttcttccactcagacacaaacctatttacaaatcaacacgtggtgatccaatgtgagagtttgtaccacacaagcaaacataacttcttttgtgaatcctacctttcatcttcttcagcttgaagaatcggtagaattgctctacgtgcagcgtacttctcttccttcaacgccctatcatcacagcaatcttcattaaaactttggagttgatacattgtgctcattttgacacttttgtcatcattatgcaattgagagtctaacaatagaagactattagagaatgtcacttacacacaccaagaaagataacactgtgttgtcttattcgttgcaaattactccaaatcgacactaatcaagctaaataactcacaatgtgaccatctaaaaaccaatatgcaactaaccactagtatatcatcttgcaatttgattgctttcttcatcacagctcaagagatcgttaattagtaaccaatttcgagactaaccacacaaatttataagcatcaatcccaaattgtcttaagattcaatcccaaattactcaaaatttcacaatagagaaaagcctaaccaaactcaaattccacatctcattatctaattacctgcggattttgttgccctgaccaacttggtacatgccccaagcaaaagcaccggaaacggtaaggaaaatagccatggcgctaggtcccgtgttggagatccggcgagcatatcggaccggcgcgaatccaccaggtggtggaccatcctgaagcaacggcatatccttcacactcgccattcctggcttcttccttatcatcgcctccgtcatcttcttcctcgattgatccccaaatcgatctttgattcgttaatcagtgtgtgttctagggattctgagaaagacaatcagaaatgaaatgaaatgaaaaatcttttttttggtgactttttttttaaaatgttgtaataatgaactgggctttaaaaggcccatattaaaatagtaccgggtcaaaactcgaaccggatccaaaaccggaggctaaaactcgaccaagcaatgatgagcttggagaaaacgtaaaaccctaaaccctactgcttatagaatcttcgacgatctgcttcatttctcctcatctacgagtgagagaatttgtcaatttagcttctttagttcggtctgatctgaattaattgcaatcttctcggttgtgtgagagaatcaatcaccatgtatcggcttgtctccaacgttgcttccaaagctaggtagatctattcgactttttggttttctttgtgtatatgattccaatgctgctttattttctgtgaatttgtttctgattggatcctcgaaatcggaaagttgcgagaaactgttgggaattgaatcggattttgatcggattgaattgaatatttctctgccattggagagtttagcatcttctattttctttgtatttctggaagttgcttcatttattgatgggatttatttttctttgtttcaacaggattgccagaaagtgtacaagccaggttcgtgttcttcattttgtatctaatttgtggtttagccgtttgtgggtatgtattgatgtgaatttgtgtattgttagattggaagcaggctcaattctactaggaattatgcagcaaaagacataaggttcggtgttgaagctcgggctttaatgcttaggggtgttgaggatcttgctgatgcagttaaagtcactatg

SEQ ID NO: 11158 - DNA, 3000 bp, Unknown
  misc_feature (1)..( 3000): cDNA_ID_2707826_gDNA_ID_2214481_Annot_ID_133250 3000 nt of promoter + ATG
agattgtttttgcacattttcgtcgtaaccgcacttagctaaaatattcatactaatgagctgcgtccctactcaaagcgtaacgtcactttgtcgatacgaattaagaacgtagaatgtcatgatctcgtacatcaatacatcatgttcattggagtattcgctatgctcgagcaatagtcttttaatgctgagaagatcatgattttctactcgaatgctaacccagccaaaccggtttatctcgtctcattatccatatgctgaaatataaatttatatacaataagaataagtttcatatgtatattctcaaacattacagtataatgtgatctagatcctaatttcaatatgaagatatatctagtttagatagcatcaaaccattaacagttggattacagaatcaattttaacgatacaacaccttttgcacatgtatttatttccttgaaaacgtttaacttgtcttctcaatgacactctagttttctagaaaaaaattcattgctctttttcctctagaaaatttgtctctccagggcatgtatttaattttcttgctcttttttctcacaagtatgaatccctactatcataaacatatataatctctgttagttcctgaagaagtaagattaagaacattgagcttataaggtcatctcgtacatatggtgaaagcatccataaccataaatattatagcatgctctaaaaatacgaatatcctttgaaagaacaaattgaatgaatgagcaatcgacacaggagcaaagtgaatcaactttttagaaaatgtccaagctaactagaaaatgctaatccgtaattttgataatatcacaaccagttcttttggcccctagtcaaaatctgtaaacagagagaaaagtttgaagcttcgtacttgctttgcaagttacatgccaagagggtaaaacacatagagaagaatccacctacttgaattttaatgatctataatactgataaccaactagaactagagtggcaaacacaaaccgaaaagtgatgatctccttgaataaccctgcctccggatgcttcgaaaacaatccgcaactagatgtcctgattttgtaatcccgatgatcatgtcctgagtccaaacgaagtggtaccaaatcctcgagataaggagatataacagaaatatctgaggagagacagcaaatctcatttgtctcggtattatatttaaacaaccgcttgtgattgtcacaaaagacaagattccctagcttagaaaccgtcaacaccgtgaaccaactagactcccatgggtggttaataatgatactggctaaagttatggagtaagtcttgctccatatttctttgtctacatccatcaggctcagtatctctagctcccattctggcgcaccgtttgttttagttatggctagacggtcatcaaggttcaccatctgggcactcatggtgcaacacgtagatggaacggaaacattgtggaactctagtgtgtgaagatccaaggctaggattccgaaacgctaaacattttttaaccagtagattgacccattcacacacactgacttccttcccacgtcaatatcgttaggaggtggattcagttcactccattccccagtttcaacatcaagaacctcgcatttttccacaggactaaaacacatcctcaccactttatagctaccattaaatttgtctctaccaaatcccatctcccaattccccggaaaggaagtgaggtatagttcgtctgcaatttcacgaaaaaatcagacaaaaacaatccaaattttaactgactctttaataaaccattaaacagatattacctctgaactgaaaacgaatacgatcagagggcacgtgatgattagggctacaaggaaatctccggagttgtctggtcgatgggttcaaaacgttgatccaacctggtgctgggatacacaccaaaccctcacatgtcagagagggtcgtgtggcgtcaatatcgcagtgtaaatagaccatctggatctcttcctcaccttcgaatcccaactcagtccggtctccaacagccagaattttctccttcttctcaacgttcaaacgcctctccgcgaaactcttcgattccaggattgatctccattgttttgagacggttttgaatctgaggattgattttaaaggcaatccaaggaaaatttcttcaagtagatcgggaactacgtaaatcatcatcgggattagggtctttttcttcttttctctacagaactaaaaactcatcgggattagggtcttttttatacacaattttttttttttctagttttaacggaaacccccacaaatatttcattattactatttagcccagtcaatttccaaaagattaatttaggtcacctctctctctctctttccctatctcttggcctcgtgctcgtgcagctgaagatccctgctctgattcgtcaaatccagtaagctaaatttcctcttaattttctggtctttaattactttatactccatatgaataatttcttcaatcgaatttttcatctttgggtcttaatttttttctcaactgattcagctaacattagtgattagctatttgctggatttcttcgattgcttgtcgtctctatgtttcaattgtattatgattacgacacattcttgttctgatcattgtcgatgaaaagggtaaactttgaacaatcttctattacataaaattgaaactttttccaacatttctgagattttccaaatcaaattctcggagttgaattgaactctcaagtagcttacataatattcaaacttttgattatctaatcaaatctgtaattcttccttatctatgtggcagtggaagatgaggatgatccaaccacaaagaacagcaacaacacagatgattttgctatagagcctcgtgaagggattatatttgaatccgaggatgcagctaag

SEQ ID NO: 11159 - DNA, 3000 bp, Unknown
  misc_feature (1)..( 3000): cDNA_ID_2705440_gDNA_ID_2214481_Annot_ID_133254 3000 nt of promoter + ATG
acggatctcgtttttaaggacattaacaagaacaacagagctttcccaacttttcaaagaacctacacaatgtttagttaacttgatacaattaattatgatacataaataaaagaagatatcagatgctagtgcatgtgaagcacataccttcattttttaaaggagcagtttctgacccagagagcccaatgatatcagcaacacttacttttccctgaaacaagatgatggttacaatgcaaaggttaggattttctatacatccttactcttgtccgtggtattataatttataaagcatggaggcagccaaaaacgattcttgtttttcactttttaatgaaaatatataaagatcaagcaaactgggcacttctagacatactagttctaacatagcggacttacttacaaggttcataaagaaaaaagtatgatcgctttctgattcacattttagccaagaaaagctaatgtatccactcttaaaaccagcattagaatatcatcctaccacgtcattgatctttccagcaatcacttcttcatgttaaatcttgaataaaaggtttgacaagcaaagtttctttgcctaggctctcaaaaagccaagtgtacacatcagtttttaacttttatgtctacttccttacagcttggaggtgatgaactatattcaaaaattgcatttgtagtaccttgaaaacttgtaaaccgagcgcatctagattctcccctgaatacctgtgatgagctactgtctacaggagaaagaaacgaaaagagaattagcatagcagggtattatagagtctactccattctcaaaatgaaagaaactcttcattcctaaaatgatgatgatgataaaaatcgacaatgagaaaaaaaccttagaaggtatgatctcaacagctggtgttggaagctgcaaatccttctctgataatgcagacacaccgcctcggtcttgaggcagcaaacccggcaagcattgtgcaagcaaagatggtgcacgcattcttgagctttgagttctcaataacgctcaaaatggtcacaatctaaaattagcaaaaagatcaaaactttagtaatactattgtcactttgaacatctttaactcgaaaacttaaaccccaaaacttagacatcatgattttcacctaacgtcgatgcaatcacatgattcacatgaatagatacataaatgcgaaagcaactttgaacatagtgacaaccatagagaacttagcagtcaaataaaggtcaaaattaaaactttctgattcaaaactaagcccaattgcgagatctaggcgaatcctaaaatccacatccctactgtgaaaatgaccagcaaggatcaaaatcaaaaacaagaaaccatcaacagaacatgagttcttacaagacataatgaatcaaaagtttgactttaatttcaataataaacgaccatgtaccgtatcaatggagtatcaagagaaacagacaacaaagaaactgaaatttacttacagagtaaaataaattaaaaagagaaaacgagaagtggaggagtggaggagttctcgacacgaaatttcgattcagacggcaaaaaatgagattcttctataacacggcgaaaatctagggatcaaacaaagcaaccaggggttgaaatttcggagcaaagcgatctctcacacgttttaaagtaagaagaaataaaagaaatgtttttaaaaagaaagaaaaattctaaaaaggaaagagcaaagtttggccaacaaaaaatcgaagcttcggttcagacccgctggtctgcttttgtacacctgttccttaactatttataattctagtcctttttattctttgcagttcatggaactcaccactttctttcgttcctctggtcgtcgtctgatttctcgcatttatatttctcatttcctggaaaaaatggagtttattaattaatttctccttatagaccaattatatgggcctttaaaaggcctctattgtatggcaatgggtcaacaaactctacctataaacggatttgttaaatttaggcctttattacataccaatgatattttaccaatgaaatatttgtataattaaatttcatattatcataggataaaaaataaattatcacattaacgcatgttgaacaaaaattttacatggattatctttctttctatttttgcggagtaggttgtttaagtatgtttttgtcctttcaagaatttgtcagtttataacttataagtaaaattttaggtacagtatatatataagttgtaaaagttgataggtattcttgtaatcaaggtttactatcaaattttaaactaaaaatggttaatcattcatcaacacatgctaattatgtttagtatgggtagatgtgcctgtagatagagtgtcctaggagagtgtggtcacgcgcttacgctaaacaaataatatatcctctgtctttgctacacgtgtataaacagcagcaaagatgaaacgtgattaaataaaataagaggttgagaaagcgagtagaagatatttagataaacgcgggagtgcaattatggtttgtttgttggaattaagagacaaccttatccagagtaagctcgccacgtgtattaaaaacattattattgtctgttagtcacagtcgagtaactccagataatcttctctgtctcatttctcgtcgtctttttaaaaacgttttactttccacggcgaattttggtctgattccaaattcttccctagtttgaaaaatcttctgtattctgaaaagagattttatgcgtatcgctgaaataggaagaaaacagattcctttccatttcccaaattttgtcattgagtcttggcatttcaaccaatcgcaatttattgaaattccggcgagtcattagatttttttggattccgtttcaaggtacggtgctttttcgcagattgagaagagcttaataagaaag

SEQ ID NO: 11160 - DNA, 3000 bp, Unknown
  misc_feature (1)..( 3000): cDNA_ID_2717154_gDNA_ID_2214481_Annot_ID_133255 3000 nt of promoter + ATG
cacaaactaaaataaatttataactataatatcaaacatgtgagtaaaaaataaagaaaaactagaaaatcaccccgtgataaataaaataaaaaggatcagataaaagaagaaaaatatgtatgtggtaaatgaacaaatgataatgatgggaatgggaccaaagttgaacatgaatgtcgtgaagaccagagagtgggtgtgaattgtgaaatgtggtgctgattagttgagccgaataagcaaaaaggaaatggggacacgtgagttgttgggtctctcttcttgtctctatttttagtgagcccctctcttttcttctaatgagcccctttaatttcttatcataactatccacgtggcgtctcccctgccttttgtcttcttctctttgttcacatgtgattcgcttctgtttccacaacatttataatcccttactcttctcacatgctttggtaattgtttccatcaccacaattattgacttaaactactttttaaaagtgagataatatttcacttgcttctgatggttgttcacgaaacaaaacttatctgatggttatactgaggaggggaaaaagaactttatttcgtttgtatgtatctcgtgatccttctctttacgagttacatgcactagagattagtggacgtaatttgcgatcaacttcgactgtataattactttatgtgtttatgaagttactaacttttcttttttgttgaattctgaaaattacaattcgaatgaaagaacattttgtgcctatataatcaccatatggttgattgattactcaatgagcattagtagcatttattatacactgatcgcagcgccatataaaccaccacaatcatttggagcctttcgttctataggtacaaaacaataagatgggaaactaaactagtgtcctctcttatcctgcttttattacatttgactatgtaacccacatcatcaatagaagaataccataatggtttggcatcgatacccatgtcatgtgaccatcaccaaatctgaatgtcatctttacttaacatgacacgttcatgtgcataggtgttttaacatgacacttttgtctccatttgacgccggcgcaccatgtatatctatcaaagtcatgttaatttgtcaatgaagccaattagctcatcaaaagctggaccacgatcattttcgttcataatttcatttttctctccactagaatattcaagaagcaatcttcttttggcttctacaatatttcttctttttgatttcttatgttgtgtattttagctgtttacagcaaggatctttcgaacaaaagctttatatgaggattggttatcaattttaaataattagcaaaaaggaagccgtttatgtaatcagaactataaattattttatttagctttgtcatttgctacttttgctaagtaaacagatcaaccaacccattatattacgatactcgtaataagtcacaatatgtcaatttcttacaataatttaactgaatttatacatataggtctagagtgaaattagaaaataatttgcgatcaatacattacaataacaaaatttatgtaatgtattttacttacatacataaatcaaggatggatgctcatgatttcgtctctaagatttgcttcatctcactgacatttgtcgatcaagctataggaagttaaagaatcacacttttaatttgcttgccaatatctacaaagatcaaataaaataaataaaaacaaaatgttgttgcggaatctaaagtaacttgtcgtattaaaaatttgtttttaagtcgtagggaaatgtaaaactgacgtggcgcatctcgaggccaacgacttattggcaggccgaaggtgaattgtttataattagatttgtaaataaatcactgatactagttcgtctttaacctacataatatttctttattaaattaagtagtacatttttaattatgttttagttgctgttgagtacaataatcttgtcagtaaaataattgcagcaacctaacgagtttggagcaacgacttcttgttgcggccgcgagaagttagatgtgaaaactgaaaatgtgtgcatacacataactactatgtatgactaacatatttaaacaataaaaatgtatgactaccatatgtaataataaaagaaatatttttgattaaaaaacatatttttaatataatatacatacgagtattattgtacgaatttttttatacttttagactacattttcttttgttttatggataattttttattatggtatgtaagtcagaagaccgtttaaaattttaaatagacgaattggtagtcttagttttttaaaatcatattaagttcaagtgacgtatgatggtacgtaatttcgaaaatttcgtttcatgctgagaaaaataactagcgatgagttgtatcaatttgtttatttgtcaacagagttagatttttttgtcttttctcgacgcaatacaagaagttactcacttactctccaactcctccatacggtagcaaagtctagttctaaactacattttgatgaagaagtaagaattttcaaggttaatttataaaaatatgcagattacaaatcaaatgctaattttgtatgttacgcttacggctaaaaaagcggtgggaataataattcgcgaaaaggtgctctctgacgactgattcgttgatctagattctagccgcacatggtgggccatactctccggcccagtatacacacatccatgacatgtcatcatatattatatcataacatacatacacataaattgattagtgaccacatgattagaaagagacaaaaaataattgccgcccgataataataacttctttataaagcaactcttcttcttctttctctcttcactttctctctttttaacctttttctaattaccactttcttctccatatacaaaaaaaacagagaactcaca

SEQ ID NO: 11161 - DNA, 3000 bp, Unknown
  misc_feature (1)..( 3000): cDNA_ID_2705433_gDNA_ID_2214481_Annot_ID_133261 3000 nt of promoter + ATG
taatgtaggcaccatgcaaaaggttgctctgctgtttcttataaacccaacaagcacccgtgtctgacttaatgccatctcaagaacccaacaactactctaaaaccatcattatcgcatccttatcaccacaagaaaaacaaatcaaaaccaaagaatccaaataatattatgtcgccaagagtattgaatcatgaaactatagagaaataagtttcatgggtcttcctctggcatttgatctaggctccaagcggcagtcaggtcaccattaaaagtggcgcctgctgttgactcgataaaaatggagcctttatctcgtaaaacaaaaacattcgaaaacgcacagatctataacaagtttcaaacgaaacgatacatgattgatgcggagaaagagagagaatcgagattatatagtagtgactgtggggaggagaagcaaaaccctagcattttgaactgtgagaataacgggcttttaaactgtctttattaagcccaatcactcattacttgggcccatcatagtcatctatatatattcagaaacgatggcttgttgaaccaatctcacaagtcacaagtcaaaatgacgtagttttgacttcgagcgatgtatttgcatatttggtaaggttttgcaattgtttataagaaaatcagaaatttttgagagatccaactgaaaaaaattaacatctatattcattcatacccataatggttatcacaaatattattatttattatcaaaattcatatatatgttaataaaagttgggttcataacataaaaaacactttcactaagtttatatttgtatctacgtattttttttgtttttgttaaccaaatttcatacacccacactctgtgtagaccaaaaacaagtcctcaaatttcatatataggcctgcctaaaggccaaaaaagttttgttgcccatttacaaacaaaaattccaaaaatgttaaaattttgagccatcaatttttctatttctaaacgtatataattaacaataaaagcgatattcaaataccatccacaagaaacttttaacaagttgtcttaataagtaatttactatacttggaagcttggcttaacatataaatacactaatagttaaaccatattcaacagccagaatattcaaaggaaaaagaaaaagaaaaaaaaaatacattactagaagaaaaaaatgacgtttgaaaagaaaattgtgattgtgtcaatggccatatttttaatgatagtagcaacaaccgctaccgaagttgatggtcgaattcatgtccgacggagcttagctgattttggtggaggttgttgcaacgtttttattcacacttgttgttttcctaaacattgacttaatcacttttaaatatatattacctcgtaataagtttcttctcttctttttcttttctcttaggagaattgattaactgtataaatattcagataagtggtggaccattgaacataatatacgtatccaaacatgttattcaggattgttgcatgtaataaaactatatagttgagagaaagataaaccgtccccacatacatttttttgtcttaaatttttcctttatataaccgataatagttatctatcgaatttagattctcacctagagcaaacaaaaatacgtttgtttttgaacgatcgaatgttttggccaaaatattcgatctagttacgaaaaaatccaatggttgtgtaaattttatgaccatcaatcagtagtgattaaatatatcaatggaaatatttgtatttttatgtgaaaatgttattttatatttaaataagacaactttttcttagataatcaagttttctcagccaaaattcaaactaattaattacaaaatatatatacgatggttatgtgaattttgtgagtatcaattcatagtgatcatgaaatcaagggttaatacaaaaatattggttttgattcctgattacatatatacactgtaagcctatccaaaccttttcattcaacaaagtctccaacttgaatctcaatgtgggatactgaaatattcacacaaaactctccaaagaaaacacgcacgtgtcacgtgtgtgtgcgtgtatatatgaaataaaatatttacatgtatgtgtaagaaaagcaacatcagtgaatactttaggtttagattaattacttcatgaaattatctttgtgccccacacaagaagtaaaacatccaacactacgaatgaagcaagaatagaagccaagttttgtccttaagactctaatcgcaaatcgtctcttggtcgtaccttgacgcacttccgaaacccatcgttcggccgactcgttcattcctttcattgacttccgaagcttctctttgaaactgaatctctctgatcccatcaagtcgtagcttgccaacacaatccgtcttccgtcccgataacatttctgagtgtagcgttctctctggtcatggtgcggcagcgttacataggcgtacatgtacgtttgttccggcatcatgaatataaagcaacgtaagaagagtgatgtagtgtgtatagcctctcttacatatatatgtatatatatatgtacgagagggagagttgggtgagattttggttgaacaattatgaaattgcgtttgatagtggttggtgactgtgttgcaccaaatatggaatctcatgttatttggtcatacgcaacacatgtgaccataatgtgactgacctatgtgcaagccgccatgtactttgtcaattggttaaagaaatcttcaatcctatttaatacatagaagaaacatttggacaatctatttttagataatgggaagagtaatgaatgagcttgccacgtcatcgccgagtcatttctaagctttttgttttttctttcgttctttctctgtttatacgaatgaacgcttgtgttccttaatcctccttggatcatcctcctaattactcagtgatc

SEQ ID NO: 11162 - DNA, 3000 bp, Unknown
  misc_feature (1)..( 3000): cDNA_ID_2705429_gDNA_ID_2214481_Annot_ID_133262 3000 nt of promoter + ATG
caaaggtcttactattagttcatcccattgttgcgtttttgcgtctacgtttattatcttattatacctggtagtattccttgagcttgatgcattcttagttttccttttttggaggaatgactgtcttagtttttaaaatttcagtttatactcgggagtggtgaaaatatctctgatttcacttactcggagaacgtttctcatgcacatatttgcgccgttaaagcattagattcacagatggagtttgtggctggaaaggtaacctctttgagtcaaagtgtatttgccaaatcactcctgaaagcgcatgaactttatatgtgatgaatttttactgtgccgactttatgtaggaattttttatcacaaacctcaagccggtcagattttgggactttgtaagccatatagttgaaggtctgggatacccaaggtaaataagcatccgaacagtttttgatacaatgaaacttgctgtgaactccttttatctttctgtttcctgattatcaatgtagcatgggaaaaaggctcctcagaacttctgaacctaccttgaatgttcccttcttaaagcaaaagatcttaattttctgttgatagatgtcctggagacatgtctagaagaaccgtttcgagaacagccatattcaattagtttttttagatataaactatctatacatggtgattcgctgatatttagtattttatacatggtcgtatatgtttccttctcctatgtcttaaatattgatcattttgaaaagttttagatccttagagctaactttctggtttacctgttttgatatttttttttcctctttaattgcagaccatccattaaacttcctgttcggctggttttgtatgttttctcacttcttaagtggacacatgaaaaggagggccttgggagtaattatgacacagcacatcagtatgctctgttagcttcatcaacgagaacttttaactgcaatgcagctaagaagcatcttggttacacacctgttgtgacacttgaagtgagtttgttggatagtattttggctttttgcatattcagctgcttagtaccttccttggatttattagctcttgttggatttgtaggatggtattgcatcaacgcttcaatggttctctcgggatcttgagaagtctgatgacacaatcattcaatctactgcagatcagcttcttggttgtgggaaaggttagaaccatctcgctattaacaattataatgcctttttgaagtgttcttggctaagtattcagttgtattgcttgaagtccgcatctcatctagctatggatatgatgatgcatgttcacaaggcttaacctggaaagaatctatctctattttcaacttagatttgtttgcttctagatgtctagaacatgctgaagtatctgcttggttaatttacatcttcttccagtccatgtaatttcatgcgagttccaactttatttcatgcacatataaacaaactcaaagcgaatctggtcaatgcaagcttttaatattaatctctttaaactgacttagcttttcatctctatgttctcatgcagttgcagacatcttgctgtggagaaatgagaagaaaaccttcgtttcttttcttgtcctaaacttgttttattactggttcttcttttctggaaacacatttacttcatctgcagcccaacttctgtttatatttgctgttgctctctatggagtctcttttgtgccgtcaaagatgtaagtattggttccagaactttaccattatagaaggcagtgaaaataagttgtgataccaaaattgtcctatcaaaggatgatgcacccatgtatatatatttcacctttgaaatctatatgcaactaagtgacagattgatttattttgacagtttcgggtttcaagtcaacaaaatacccccatggagatttgagatctccgaatccgctgtgagagatcttagtagtgatatcgtagttgtctggaatcaaggagttcgcagttttaaatccttaagcagtggaggagactggatcaagttcttcaaggtacaattctactctttatgctcaccaaacatgaaaaatatctcattgctctcgtttcctaaaacaaaacataaaaacagattgcaggatcactgtatctcctcaaactgattgtatcccgttcattggcagcatttcttttcacaggtactcgaacaaagcttttgttttcacacttcataaacatgattaacaacttcataaacatgattaacaacttctttatccataacattttctctacgctttgcttggacagttatgtcgttctcattcaccggtttcttcatctacgagcaatacgagcttgagctctaccacctagcccggatattcgtcgaatgcttaacatttattaaaaggatggtgatacctgtttctgatgcttcatctaaaccaatgttcatgtgaagcttccaaagtcctccactaaacgaacaccaacaatcccagagactaattgcagttattagatgtcttatgtacaaacattatgctatcaggatgtaatcttcactgagaggggatggatatatgattatttacgaatttgccataactactatcaaaatgcaccgttttgatccggtttccaaaaaaaaaagaaaaaaaaggaaagtatccttatatatcctttaaaagccgccgcttcgatattccctggcctctctttctctcacaatctaatcttcttcgtcttcaaactcaatctagggttctcttctcctctctgtaggtaggattttgaacacccaaatctctcatcgaatttttcttgctcaacgtatcatcgcacaattcgtctctcgttttccgtcacgtggataatcgaaatctcataatcccaaaggtaaaacaatcaattctgggattggaattttggatccataggatcgtcaattgaaacaatcccgatg

SEQ ID NO: 11163 - DNA, 3000 bp, Unknown
  misc_feature (1)..( 3000): cDNA_ID_2717144_gDNA_ID_2214481_Annot_ID_133263 3000 nt of promoter + ATG
ggttttgtggttggtaccagatttagccttttttgagtttattcagattttcactataccgatcttcgtttgtgtgctggaaaattgtttctgtggattcctttgaatgtgtgctagtgttactgattcgatcataaggctcaattactatctgctattgactggtttggtgaaactggcggttgaattatctattataagcttctatgggttttttttttttgtcaactgtgtttagtagtctttgtttggctatcttatagtactattttgtgtcagattatgatttgttgattgaatttcatgaaacagattggaggtcagctttgtgtgtggcctggtttgagacaactttgcctcaggaaaagcttattatacggagtaatgtggttattatccatgccactgaaaacattgcgtggagctagaaaaactcttaagattactcacttttgtagcatttccaacatgccatcctcattaaaaatcgaactggttagtatgcttttcatcttgaatctactggttgaaacaactctgtaacaatctgctgaagatattattaacgatctattttactgagatgtttcaggtgccctgcagtaaggacaactatgcttatctgttgcacgatgaagacaccggaacagttggagtcgttgatccttctgaggctgcacctgttatagaagcattgagcaggaagaattggaatttaacttacattttgaatactcatcatcatgatgatcacattggggggaatgctgaattgaaagaaaggtatggcgcaaaggtaagaggatactattttctgtttaaaactgtatgaccttgtttcttgtgttgtttctgctctttgcgcaagttagccctctttttattttgtttccttggagtgtctcttgcctctgatagctgtgaaacattgagctctacaatacaatggtttggttttgagatgtcgtaaagtattagtcttaccagaaaaaatggttttttggacctttttgttttgcacctttgtcgagttgttcttttcgtttttgcttcttttatatatactcaagtgtttttatgtgacttatgttgccgacaggtgattggatcagctgtagataaagatcggattcctggaattgacatacttctgaaggatagtgataagtggatgtttgctggccatgaggttcggatacttgacactcctggccatacacaaggtttgtagctgccataacctctactgtaaaatactaagaacacatctatacagtcaaatattgccaacgttagaaacctttggtggatcacatattagtatcttatttgtcattctaatttgttatcctcaatacattactgtgtaactgctctccttttttatcgttctagtgtagtacaactagtaattaatgtatacttggtgccatgttttatcacttaactgtacttattctcaagcaggccatattagcttctactttcccgggtcagcgacaatattcacaggagacctgatatatagcttatcctgtggtaccctttcagaaggtacccctgagcaggtaacatcaatttcaaaaagcaatatttcaaccttctcgacccttgcactgttatgattattttcttgtggcaaaaattgtgccaagtgatttgtggttttctaaatcatgtttctttttcaaccttcatatctttttactgttatggttactttcttgtggcaaactgtgctgagtcaaatggtatagactttatggagagatcacttgggacttgggagtactctaataaccgtacattgtagtttctttcacagaagcaaacttattgtgctctgtcctttttaacgagaaaaccttttttgccttatgactcagatgctttcatcactccaaaagatcgtgtctctaccagacgatacaaatatatactgcggccgtgaaaacacagcagtaagttccacgcacataaatactcttaattcacattgttcaactctcttttatatctcctccatgatacagggcaatctcaagtttgctctatccgtagaaccaaagaatgaaactcttcagtcctatgcaactcgagtcgcccatcttcgcagccaggggctcccatcggtaaaacctcttatctcttccctatctcctctttctctctaaacctctctctagatttcatttacttacggatttgttgtctgtagattccaacgactgtcaaggttgagaaagcgtgtaacccattcctcagaatatcgagcaaagatatccgaaaatctttaagcattccagactcagcaaccgaagctgaagcattgcgtcgtatacagagagccagagatcgtttctgaaaacttgggtatattttcttatttgtatagaaaaatttgcaagtcaatcatcagctgcaaagatcaatattttatatgttttgggctttcttcagttatcatttgaagttgtgtattcaacacaaaaaaatctaaatatttagtttaaactcaattattaaattatgagattttcaagtgtaatgaatgcttcaacatacatacacaagtgtatagatagatacggtttagtttctctctacaagtgcttaccaaatttctaacaatggaaatcatatgtttggtggattgatggaattggctcaccaaacgtgaaaacgcaaccgtgcgtctacgatttaatattagctttactagatttgtttgtaaccaaggaataattatacagataatttacataaattaagtcaaatccatagatttatggcaaaaaagtgtgaatattaaattataattacacagccgaagaataaaggaaaacgctaaaaggttgcgcgagtggagagtctgcccgccaagcaacccctagtattcagctttttgtgcactgatccaactcgactcggcctttttctctgagttgactcgaccgagaaaaggcgatagagctggggtttaattcggcgataacaatg

SEQ ID NO: 11164 - DNA, 3000 bp, Unknown
  misc_feature (1)..( 3000): cDNA_ID_1408073_gDNA_ID_2214481_Annot_ID_183359 3000 nt of promoter + ATG
agtatagggtctgagagattcatgttttcctcttctttttcaggctgtaaacttacggacagcagccattcctcgtcctcaggtaccatctgaattagaaaaaaactatctacaaaccattgtttctcgttacgttttatacctcaataattttgtattcgtgttttctagtatctttcaagtagtcaaagagatgccttagctgaaatacaagatgttcttcgaacagtatgtcatgcacacaagttgcccttagctcttgcctggattccttgtagaaaggatcaatctataagggtttctggacaaaaatctggtgaaaattgtatactttgcatagaggagacagcttgttatgtgaacgatatggagatggaaggctttgtgcacgcatgtttggagcattgtctaagagaaaaagaaggaattgttggtaaagctttcatatccaaccagccgttcttttcttctgatgtgaaggcatatgacatcagtgaataccctattgttcagcatgctcgaaagtacggtctgaatgctgctgtcgctataaaactgaggagcacttacactggtgaagatgattacatacttgaactgttcttgcctgtaagtatgaaaggaagcttggaacaacaacttctattagacagcctttcgggtacaatgcagagaatttgtcgaactttgagaactgtttcagaagtggggtcaactaaaaaagaagggactaaacctggatttcggagtagtgatatgtctaatttcccgcagacaacgtcttcagaaaattttcagacaatatcattggattccgagtttaactctactagaagcatgttttcgggtatgtcctctgataaagaaaacagtatcacagtatctcaaggcactttggagcaggtatgtgatttatgcaatttggttattctgtaaattttgtgaaacagttcgttaaactgaacactgatatttttccttacaacttttcataggatgtgagcaaagcaagaacaccagagaagaagaaaagcactacagagaaaaatgtgagcttaagcgctctccaacaacacttctctgggagtctaaaggatgctgcaaaaagccttggtggtgagacttccgcatatttccaagcatgggtttatttttgttagcacacaaactatctgaccctcgacttggattttcttctgcagtttgtccaactacattgaaacggatatgcaggcaacatgggatcatgaggtggccatctcgtaagattaacaaagtgaacaggtcactaaggaaaatacagacggtactggactcggtccaaggtgtagaaggaggactaaagttcgactcagcaactggcgaattcattgcagttagaccttttattcaagaaattgatacccaaaagggtctgtcgtctcttgataatgatgcacatgcaagaagaagtcaggaggatatgcctgacgatacttcattcaagctccaggaagctaaatctgtcgacaatgccattaagttagaggaggatacaaccatgaatcaagcaagaccaggtaagaacttctctatccataaaccatagatggagcgattagaatcttaatccattttcagtttttgcaggatcattcatggaggttaatgctagtggtcagccatgggcttggatggccaaagagtctggcttgaatggcagtgaaggaataaagagcgtttgcaacttaagctctgtggaaatttcagatggaatggatccaacaatccgatgcagtggcagtattgttgaacctaaccaatccatgtcatgcagcatatcagattcatcaaatggctcaggcgcagttctgcgtggaagctcatctacttccatggaagattggaaccaaatgagaacccacaacagtaatagcagcgagagtggatcaacaacgctgatcgtaaaggccagttatagagaagacactgtacgtttcaagttcgagccatcagttgggtgtcctcagctctacaaagaagttggaaaacgttttaaactgcaggacgggtcgtttcagctgaagtacttggatgatgaagaagaatgggtgatgctggttacagattctgatctccaagaatgtttggagatattacatggtatgggaaaacactcggtgaagtttctcgttcgtgatttgtctgcccctctaggtagttctggtggcagtaatggttatcttggaacaggcttatgacgtcgtaagacatagacacacacagttatgtattcccagtgaaagaatgttgtttatttctctagatattagtatgcttataaataggcatgaaggagaaagacaattttggtatagtggagttcagcagaaaatgtatatgttttttcgttttatatgaatcagagaataaaagttggatgttatatctacgttgctaatgttgtacctgctcacccatctttcatataagaaaagagaacacttttagttatccctgtgatgcagaatcgtattctttgttatctctccattcctgtggaaaccaacaaagtcaactaaatttcggtttaattggttggtttttaagtcaacgaggacttgattttagttgggcttgggcctataattgtgttcatcattgggttttttcccccttatcagtttaacgtccatatccatatctttttctttttttaacggcaaagttcatatccatatcttatgatgtgcctaaaagagggagaagatgcgaagacagaattttcatatttgaaagggttcgatatcgatattgggaaacgaatcaaggtcaaaaaactcagtctaatagttgaaatttaaaaattttattaattcaatccgattggtttcgttttgttatggttcggttctatatcatcaaaccaatcggtttggtcctaaagataattataaatattcaccaacaccagtgttaaacacatatcaacaaacctaaagttagataaacaaagagaaa

SEQ ID NO: 11165 - DNA, 3000 bp, Unknown
  misc_feature (1)..( 3000): cDNA_ID_1010640_gDNA_ID_2214481_Annot_ID_183351 3000 nt of promoter + ATG
aatttcgatctcttgagacaccaaaatcgctaaagaaaacttagtttacttaatttcctttgtgtttctttcttatacagctcacagacaacttagaccttttcagaaaaatccgggagaacatcaaaagccttctcaaagagtaagtaacataatcatcatttctgtaaaatgtcatcatgtataaaatcaagttatatcataattttatttttgatattacagtttgaatgagaatgtgtcggagacatggaagaatatgccatcatcattgccggagaagttgaacgatgaactatttcttggcctagataaagcaatcccatctacatcaaatctaccatgaatgattctatcttagctgaaaagcattagcttagaacacatgttttagacttatgtaatctgttgatttattaatcaaagacttttttttttctttttttctgggtttaacatattgaacaaaaaaatatatcaaactttctcttgttcagacaaaaaagaatcattttttttacaatgagaactatttcacaatggagtctaaagaactgaactttgctccaattgagtgaagatgattaaaattagagattgtctagatgaaatggtgaagttcacactcgattactgtgtagaattcgatatagggcttaccggggagttctgctccggccttctgtgcggcgaatcagttcttcacgacggtgaacgaatcgaatcgtcttcctacgctttgctacaccggttttcaggtgttcctgattatcccttgtacaaggttctagctttaggtctgctgaaatcaattgattctggttctttctgtggaacctttgagaaaatttcgttggggaaggaagtaatccggttgaaggagaaagaagatgagtggagcaagctgataaatcaaaagggttctgagttagtcaatgtgagtgagtcatagtcgattatacttcaaaaggcaacattggtactggggtaatcagagtcatcgatgcttagcttttggtttgcttttgattgttaaaagttttgttcactttgcaatattctaacaggccttgaaggatgtattttccgagcttcaagttcaagagcccttattctccctcatgaaaggttaaaacttcctctttttagcttggcaatgtcaatatcaagtggtaagagttcttgatcagatttttgggttgcttaatttaaatggatatattagatggcatcaaaacagttgaagcaaggtgttttgaagaagagtatgataggtaggagaagtgaaaagttattgagctggattacttctgtgtctcttgtgttcacaaatgttgtttggtttcctcagaattcggagaggaggttcaatggttatgataaataaatgtctaatgtttgaagttctggtgagatatatttgccgacatcatgcttttgtgttcctgcaaacgatttcttgtgattgattctcttaaatgttgatatataggaacttcaccaatatgcatccttttacgagctgttgaaagccgagagttcagagaaagtgtttcctggcactaaaacagtggaagaaggtaagcttttttctttgtctgatccttagccattaacttctgtttcaaagatttcaaatttttttaggtatgcaaatgtttaggaagttatatgatacggatcaagagaatttcaatggtgttgtggcaatccatcttagtaaatcagttgctcagccttgtgttgctttggctcacatactgtctgtgagttcaagtttttctcagccttctccttgtgatttatgattcttattattcaatgtttcttacaaaaacatcatttaaatggcagggcttgagttacactggcgtgcaaaaccttctcggtctatctcacacaactggatccatttttcatgctctgcctcctcctagatcgatgctactctcttcattcatgcttccatataagccaaaggtaccacaaaaactaagatatagttcgagagacatcgtagtgaatcttttggggaatggttaagctgtgttgtgtgagatcaaatttagaatctttcttttttcctattgttgagataaaaggttgtagattgagccatggagctagagcattagccaagcatgttgatcgaagtagcgatggattttggggtgttcttcagggaactggtaagtaacaaatttttgcaggacactgatgcatttccataattgagtcttcctcttccttttctcagattcagataaaaatgagcgtgcaatggacataatcaatcggttcattggcaattgttgttggatgaacatacatatcgttccaccacatggtgaagtgttcgagataagagtagctcaaggctatggagcacgttggtctcgagatggaaccaaagtatgtatattttgagacttgaagtatgtatctttcagacgtgtctgatcatcaattgttttgttgctgtttatttttattggcagttcattggatttcttgagccttacatggaggatggtcactccatggcctggaagcattaagaccgcacctgtaaacatctctgtgtctttaggactttgtgaactttctcttgtagttgaatcgttttttctttcaacaagtgtaaatttgtaacgcttcttttcttgtgacaaaaaaaatcaaattttttttttttctaagaaggattttgtggttgatcttgttatgattagggtatgaaaagaaaatatgaggaccaaagtgttaagacaaactgtaaattgggcaaaactgtgaagggacattaaagcgatatatgattgggccttaaagcccattgtttgataaatcgtccagagggtaaatatggaatttcaggtttacgaattagggcttcttgatacaaagtttttaagagatctctttatatcctcgcgacggcgaattcgctcgactctctctgtggacggcggctagtttcaaccaacagattcgagaatg

SEQ ID NO: 11166 - DNA, 3000 bp, Unknown
  misc_feature (1)..( 3000): cDNA_ID_2990399_gDNA_ID_2214481_Annot_ID_183347 3000 nt of promoter + ATG
tatatttgaaaaatgggtatgaagttaggtcctatacaaataatacaagggggggttcgttgtcaataagataggcacaactcttactgaactgaaataaactttagtattgaacaaactgatttttgttttggtttatttatctttcagtagaggtaatgattatataaaagattctcaacaaactaaaatatacacatcatatttaatatcatcgagatattatcaactaatgtataaaagtttcaatttatgatagttgatattaggatttctcataaataaacaatgttgataataatctaattaatgcttaaacaatgtttacttacggatcttaacattataactttaataaaatagtagagtaaactataaaagcaacaattaattgaattaactttaaaaatatagcaagattttagaaccacaacaatagtttgatactaaataagtaaacttctagagaggtaagcagatatacccaaatagtatagaggtaaacaaaactttggatatccaagaacctcgcgtcggaaacaagtggcatctggacgtgctgaacttggaattcgaattcccaagatcatgatgcgtatggcttggttttaacggaagtggggccaaattttcaacataagaagatataacacagatgttagaggagagacaacgaatctcatctgttcctgaataatatttgaatagcctcttgtgattatcgtagaagagaagattcccttgcttagaaacccacacaggagtgaaccaccttttctgccatggccaggaaaaaccaactccatgggctaaacttatggagtaactcttgctccacgagtaacccttgctccatccttttccttctatatccatgctccagatctctagtatccattcaggcccaacgttggtggtcatggccatggctagacggtcctcaaggttcactaactgggtttcctgcgtgacccacgtagccggaaggtggtggacaccatgatagctttcttcgtgaagatccatagctaatattatgtaacccgcactaatttgtaaccagtagattgatccattcacacacaccgatttacttcccggaagcatattatgaggaggtgacctcagtttgctccatacaccagtttcaatatcaagaataccaaattcataacaatcatgaaaacacatcctcactattttatacctgcccgtaacgttgtctctaccgaatcccaatagccaattttcctgcggtcctgcaagttgtaaatatttttaatttctttcactgcaagaaacaaacaactataatgttagattttaccttttactggacctgggccgggagggaatcgccggagttgtccagcggatgggttcaaaacgttaaaccaaccaggttcggtgatgcagagtaaaccgtcgcaagtcatcgagggttgcgcggcgtcgcagtgtagataaacgatctcttcgtccccttcgaaacgagactcagggaagatactcggccgcataaagtagttgcagttgtaagcagctaggattttccggtggtgcttttgaagattcccgcgcctctccacgaacaacttggattccaggattgatctccattgtcttgatacggttttgaatttcaggattgatttcaaaggcaatcgaaggaaaatatcttccaatagctcgggaactatgtagatcgagttagtgttttctcttttttcctccatcttttatgttttgtctgtcgtgctagatttctgacttctgataaaccctttaaatatcgacggctttcagttgcgtgtctgaaaaccggttttggtttggtaattttattcaattactaatttaattgagaataagcacatgtcggtcaccaatgatacttgttaatgcgttcgatttttttaatctaaagttctgaattaagaaaaacttaattacctttaggaaaatacacactattatgtcctttttgttagataaaacatgtctctcatgtaaagaaaaatgcaagaaaggtcgaaggaatgctttgaagtttttttaaaaacatatgaattgtcaaaaagatgtattaaatgttaaccaactacataagccaatcatatatttgaaagtgaggttctatacaataaatacaaatggttcgttgtcaataagatagagatatgcacaattcttaccgaactattttggtattgaactctatatattttcttcaactttcaattgagataaagaaaaaagataatgattataaaagaatctcaacaaactaaatatacacatcccagaatctagatattatcaactaatgttaaaagtttcaatttatgataactgatataattaatgcttttttttttcttacttgataagataaattttatatattctataaaaacccaaatgatcaaggcaagcgtttaatctaaattgaccttaaccaaatgagcaaatattgaccaaaggaaatcttttctatttttttgcgtttatcctaaaggaaatgtttgtttcatggcttcaaaagggaatataatttgagcaaaacaagtaaaaaagtaacaaattaccgttacagcaaaaacaactttaataaataataacagagcatatggtaacaactttattacccaattcaaataaagaaaataataaaccgtggtcaaatatttgtatgaattatatgagatagcacggaacaatttattgatgggatttagtagttgagctaaataaataaaaagcaaaaacaaataaaataaaacaaaatactaaagaaaaaaaaagagtaaaagctgtctctttagctctgacgttgtttcctgtcgaagtcgcagactcgtcatcacagctcaggcgagtaattctgagtttcttctatctacgcgcaatatctctcaaaggaggcctcttcaaaggtaccacaatcatatcctctcgtttctatctgaagaatcagagagaagagatatatagaggatg

SEQ ID NO: 11167 - DNA, 3000 bp, Unknown; identical to SEQ ID NO: 11163
  misc_feature (1)..( 3000): cDNA_ID_3039078_gDNA_ID_2214481_Annot_ID_183346 3000 nt of promoter + ATG

SEQ ID NO: 11168 - DNA, 3000 bp, Unknown
  misc_feature (1)..( 3000): cDNA_ID_3039086_gDNA_ID_2214481_Annot_ID_183344 3000 nt of promoter + ATG
tgtaatatatctattaaattaacacacaccaaaatcatattcataggattgggttcatgcctagtccaaatgggtggaggagaaaagcatgattcatgcactcgtacccattttttcttttaaaactattataaatggtatgtttatttttttgtactaaaaaaaggatgcttttaaaaatcctttaaaaattctaaacttagaggatgttattggtttatgattttaaaagagtttttgtgacttaaaagtgtcatgtaaaatatgttgttattcaatcataatttttaaaagtttgtaaaagttttgtgttattcaattaaaacaaaaaaatctctcaaaattcaattatcacagattaaacatcattcattattctcagaattcatattgtttttaaaaatttcataacaaaaaaactacacattttacgaactttatatttgtatatctacgtatatttttttgttagccaattttcatagaccaacattctttatcaaattgccacataattaggcacaggcttccgtctacgaagggctttgatgttcttacgaaattattcaaatcacattcattttatacagcctttttaaacatatttattttagtatttacatcaaaacatattgaacattcccgtctacttcatccttttaaaatcacattcatgttatacagccttctttatctaaacgacggaggaaaacaaaaaaacgaagatgcgcttttggttgcatctgtaggactggttggttcgaacacttgttaccaaagaacaaagcgtctctcttggtcaggcaagttttagctctcaaataaccaccaacgcaaaatgatcgcagtcaagactctttgactcttatcttttgtattaaagataaatgaacatgtgataagaataataacagattagatgttgcatgtaatactactagactagatctacagaaggatcaaagaaagtagtaccaaagtagacatcaataatgaaattgcaagcaaaacagaataaatgttgtctcctcgattgcaagcaaaacagaataattattgcaaattctcccctcgatcatcttgtgttagatatctgtgccgctgaagacacttctctcgaaaggattcgataaaaatcacagatacacatctcccaaactaacaacacagcacaaccaagcaatgcaaaagcttttcaatgatagaatccagctcccatatatcagcttctttaaagatatcaccggtaacaagtttgttacagttggacattcttttctagaatttccaggaaaaccaacatcctagtatcacacaaaagaaaactcaagttcatatataccatgaaaaaggtagatctgctgtttcttataaaaccaacatacacccgtgtctgaattaataccatctcaaaaacccaactactctaaaaccatcattatcgcatcaaattcactacaagaaaaaacaaaacaaaaccaaagaatccagctcccatatatatctaaatatgctataaaacatcaattgtaacagttttgttacagttgtatcaaatgagtgagtccattgttttccaatatttccaggcatatacaagaacaagaaaaccaacattatttcagggactaaaaatcattccagggctaaaagaagtgctctttcaaactcaagttcagataaatcatttgtatgtcttaaaagacaaaactgtagctgcttttaatttagaggaagacatgagaagacatcagatcaagactgcctccaatcgtgataagaagctaataaataatgtaggcaccatgcaaaaggttgctctgctgtttcttataaacccaacaagcacccgtgtctgacttaatgccatctcaagaacccaacaactactctaaaaccatcattatcgcatccttatcaccacaagaaaaacaaatcaaaaccaaagaatccaaataatattatgtcgccaagagtattgaatcatgaaactatagagaaataagtttcatgggtcttcctctggcatttgatctaggctccaagcggcagtcaggtcaccattaaaagtggcgcctgctgttgactcgataaaaatggagcctttatctcgtaaaacaaaaacattcgaaaacgcacagatctataacaagtttcaaacgaaacgatacatgattgatgcggagaaagagagagaatcgagattatatagtagtgactgtggggaggagaagcaaaaccctagcattttgaactgtgagaataacgggcttttaaactgtctttattaagcccaatcactcattacttgggcccatcatagtcatctatatatattcagaaacgatggcttgttgaaccaatctcacaagtcacaagtcaaaatgacgtagttttgacttcgagcgatgtatttgcatatttggtaaggttttgcaattgtttataagaaaatcagaaatttttgagagatccaactgaaaaaaattaacatctatattcattcatacccataatggttatcacaaatattattatttattatcaaaattcatatatatgttaataaaagttgggttcataacataaaaaacactttcactaagtttatatttgtatctacgtattttttttgtttttgttaaccaaatttcatacacccacactctgtgtagaccaaaaacaagtcctcaaatttcatatataggcctgcctaaaggccaaaaaagttttgttgcccatttacaaacaaaaattccaaaaatgttaaaattttgagccatcaatttttctatttctaaacgtatataattaacaataaaagcgatattcaaataccatccacaagaaacttttaacaagttgtcttaataagtaatttactatacttggaagcttggcttaacatataaatacactaatagttaaaccatattcaacagccagaatattcaaaggaaaaagaaaaagaaaaaaaaaatacattactagaagaaaaaa

SEQ ID NO: 11169 - DNA, 3000 bp, Unknown
  misc_feature (1)..( 3000): cDNA_ID_2707826_gDNA_ID_2214481_Annot_ID_183332 3000 nt of promoter + ATG
catactaatgagctgcgtccctactcaaagcgtaacgtcactttgtcgatacgaattaagaacgtagaatgtcatgatctcgtacatcaatacatcatgttcattggagtattcgctatgctcgagcaatagtcttttaatgctgagaagatcatgattttctactcgaatgctaacccagccaaaccggtttatctcgtctcattatccatatgctgaaatataaatttatatacaataagaataagtttcatatgtatattctcaaacattacagtataatgtgatctagatcctaatttcaatatgaagatatatctagtttagatagcatcaaaccattaacagttggattacagaatcaattttaacgatacaacaccttttgcacatgtatttatttccttgaaaacgtttaacttgtcttctcaatgacactctagttttctagaaaaaaattcattgctctttttcctctagaaaatttgtctctccagggcatgtatttaattttcttgctcttttttctcacaagtatgaatccctactatcataaacatatataatctctgttagttcctgaagaagtaagattaagaacattgagcttataaggtcatctcgtacatatggtgaaagcatccataaccataaatattatagcatgctctaaaaatacgaatatcctttgaaagaacaaattgaatgaatgagcaatcgacacaggagcaaagtgaatcaactttttagaaaatgtccaagctaactagaaaatgctaatccgtaattttgataatatcacaaccagttcttttggcccctagtcaaaatctgtaaacagagagaaaagtttgaagcttcgtacttgctttgcaagttacatgccaagagggtaaaacacatagagaagaatccacctacttgaattttaatgatctataatactgataaccaactagaactagagtggcaaacacaaaccgaaaagtgatgatctccttgaataaccctgcctccggatgcttcgaaaacaatccgcaactagatgtcctgattttgtaatcccgatgatcatgtcctgagtccaaacgaagtggtaccaaatcctcgagataaggagatataacagaaatatctgaggagagacagcaaatctcatttgtctcggtattatatttaaacaaccgcttgtgattgtcacaaaagacaagattccctagcttagaaaccgtcaacaccgtgaaccaactagactcccatgggtggttaataatgatactggctaaagttatggagtaagtcttgctccatatttctttgtctacatccatcaggctcagtatctctagctcccattctggcgcaccgtttgttttagttatggctagacggtcatcaaggttcaccatctgggcactcatggtgcaacacgtagatggaacggaaacattgtggaactctagtgtgtgaagatccaaggctaggattccgaaacgctaaacattttttaaccagtagattgacccattcacacacactgacttccttcccacgtcaatatcgttaggaggtggattcagttcactccattccccagtttcaacatcaagaacctcgcatttttccacaggactaaaacacatcctcaccactttatagctaccattaaatttgtctctaccaaatcccatctcccaattccccggaaaggaagtgaggtatagttcgtctgcaatttcacgaaaaaatcagacaaaaacaatccaaattttaactgactctttaataaaccattaaacagatattacctctgaactgaaaacgaatacgatcagagggcacgtgatgattagggctacaaggaaatctccggagttgtctggtcgatgggttcaaaacgttgatccaacctggtgctgggatacacaccaaaccctcacatgtcagagagggtcgtgtggcgtcaatatcgcagtgtaaatagaccatctggatctcttcctcaccttcgaatcccaactcagtccggtctccaacagccagaattttctccttcttctcaacgttcaaacgcctctccgcgaaactcttcgattccaggattgatctccattgttttgagacggttttgaatctgaggattgattttaaaggcaatccaaggaaaatttcttcaagtagatcgggaactacgtaaatcatcatcgggattagggtctttttcttcttttctctacagaactaaaaactcatcgggattagggtcttttttatacacaattttttttttttctagttttaacggaaacccccacaaatatttcattattactatttagcccagtcaatttccaaaagattaatttaggtcacctctctctctctctttccctatctcttggcctcgtgctcgtgcagctgaagatccctgctctgattcgtcaaatccagtaagctaaatttcctcttaattttctggtctttaattactttatactccatatgaataatttcttcaatcgaatttttcatctttgggtcttaatttttttctcaactgattcagctaacattagtgattagctatttgctggatttcttcgattgcttgtcgtctctatgtttcaattgtattatgattacgacacattcttgttctgatcattgtcgatgaaaagggtaaactttgaacaatcttctattacataaaattgaaactttttccaacatttctgagattttccaaatcaaattctcggagttgaattgaactctcaagtagcttacataatattcaaacttttgattatctaatcaaatctgtaattcttccttatctatgtggcagtggaagatgaggatgatccaaccacaaagaacagcaacaacacagatgattttgctatagagcctcgtgaagggattatatttgaatccgaggatgcagctaagatgttctatgatgattactctagacgattagggtttgtaatgcgtgta

SEQ ID NO: 11170 - DNA, 3000 bp, Unknown
  misc_feature (1)..( 3000): cDNA_ID_2705471_gDNA_ID_2214481_Annot_ID_133264 3000 nt of promoter + ATG
gtgattatcgtagaagagaagattcccttgcttagaaacccacacaggagtgaaccaccttttctgccatggccaggaaaaaccaactccatgggctaaacttatggagtaactcttgctccacgagtaacccttgctccatccttttccttctatatccatgctccagatctctagtatccattcaggcccaacgttggtggtcatggccatggctagacggtcctcaaggttcactaactgggtttcctgcgtgacccacgtagccggaaggtggtggacaccatgatagctttcttcgtgaagatccatagctaatattatgtaacccgcactaatttgtaaccagtagattgatccattcacacacaccgatttacttcccggaagcatattatgaggaggtgacctcagtttgctccatacaccagtttcaatatcaagaataccaaattcataacaatcatgaaaacacatcctcactattttatacctgcccgtaacgttgtctctaccgaatcccaatagccaattttcctgcggtcctgcaagttgtaaatatttttaatttctttcactgcaagaaacaaacaactataatgttagattttaccttttactggacctgggccgggagggaatcgccggagttgtccagcggatgggttcaaaacgttaaaccaaccaggttcggtgatgcagagtaaaccgtcgcaagtcatcgagggttgcgcggcgtcgcagtgtagataaacgatctcttcgtccccttcgaaacgagactcagggaagatactcggccgcataaagtagttgcagttgtaagcagctaggattttccggtggtgcttttgaagattcccgcgcctctccacgaacaacttggattccaggattgatctccattgtcttgatacggttttgaatttcaggattgatttcaaaggcaatcgaaggaaaatatcttccaatagctcgggaactatgtagatcgagttagtgttttctcttttttcctccatcttttatgttttgtctgtcgtgctagatttctgacttctgataaaccctttaaatatcgacggctttcagttgcgtgtctgaaaaccggttttggtttggtaattttattcaattactaatttaattgagaataagcacatgtcggtcaccaatgatacttgttaatgcgttcgatttttttaatctaaagttctgaattaagaaaaacttaattacctttaggaaaatacacactattatgtcctttttgttagataaaacatgtctctcatgtaaagaaaaatgcaagaaaggtcgaaggaatgctttgaagtttttttaaaaacatatgaattgtcaaaaagatgtattaaatgttaaccaactacataagccaatcatatatttgaaagtgaggttctatacaataaatacaaatggttcgttgtcaataagatagagatatgcacaattcttaccgaactattttggtattgaactctatatattttcttcaactttcaattgagataaagaaaaaagataatgattataaaagaatctcaacaaactaaatatacacatcccagaatctagatattatcaactaatgttaaaagtttcaatttatgataactgatataattaatgcttttttttttcttacttgataagataaattttatatattctataaaaacccaaatgatcaaggcaagcgtttaatctaaattgaccttaaccaaatgagcaaatattgaccaaaggaaatcttttctatttttttgcgtttatcctaaaggaaatgtttgtttcatggcttcaaaagggaatataatttgagcaaaacaagtaaaaaagtaacaaattaccgttacagcaaaaacaactttaataaataataacagagcatatggtaacaactttattacccaattcaaataaagaaaataataaaccgtggtcaaatatttgtatgaattatatgagatagcacggaacaatttattgatgggatttagtagttgagctaaataaataaaaagcaaaaacaaataaaataaaacaaaatactaaagaaaaaaaaagagtaaaagctgtctctttagctctgacgttgtttcctgtcgaagtcgcagactcgtcatcacagctcaggcgagtaattctgagtttcttctatctacgcgcaatatctctcaaaggaggcctcttcaaaggtaccacaatcatatcctctcgtttctatctgaagaatcagagagaagagatatatagaggatgcctgtgatctccaaagcttcatctaccaccaccaattcatcgattccttcgtgttctagggtttaatctctcttcctcttttttactcttctctttgattcagtctttgcttttgataattccgatctggttttgtggttggtaccagatttagccttttttgagtttattcagattttcactataccgatcttcgtttgtgtgctggaaaattgtttctgtggattcctttgaatgtgtgctagtgttactgattcgatcataaggctcaattactatctgctattgactggtttggtgaaactggcggttgaattatctattataagcttctatgggttttttttttttgtcaactgtgtttagtagtctttgtttggctatcttatagtactattttgtgtcagattatgatttgttgattgaatttcatgaaacagattggaggtcagctttgtgtgtggcctggtttgagacaactttgcctcaggaaaagcttattatacggagtaatgtggttattatccatgccactgaaaacattgcgtggagctagaaaaactcttaagattactcacttttgtagcatttccaacatgccatcctcattaaaaatcgaactggttagtatgcttttcatcttgaatctactggttgaaacaactctgtaacaatctgctgaagatattattaacgatctattttactgagatg

SEQ ID NO: 11171 - DNA, 3000 bp, Unknown; identical to SEQ ID NO: 11165
  misc_feature (1)..( 3000): cDNA_ID_1010640_gDNA_ID_2214481_Annot_ID_133267 3000 nt of promoter + ATG

SEQ ID NO: 11172 - DNA, 3000 bp, Unknown; identical to SEQ ID NO: 11164
  misc_feature (1)..( 3000): cDNA_ID_1408073_gDNA_ID_2214481_Annot_ID_133272 3000 nt of promoter + ATG

SEQ ID NO: 11173 - DNA, 1146 bp, Unknown
  misc_feature (1)..( 1146): cDNA_ID_2703868_gDNA_ID_2214482_Annot_ID_133278 3000 nt of promoter + ATG
tgaaaattttgactcaaatgagttgatgggtcaaatgggttgatgagtcaattggtttgatgagtaaaatgagttgggttgtaatggttaatggtttcaatggtttacccaattaacccatcaaattttgtaaaattgaattaaaccaactaaaatctctaaaccaatgccaatttaagtttaaccaacacatctaaaccaatttaataaaattaatatttttccaaatttcttaaatatacaagcgatgcaattgagaaaaaataaactcgtaatttttccaccaaaaaacataaacccgtgatttttccgccaaaaacgtaaacccgtgattttcccgccaaaaacgtaaatccataattttcccgccaaaaacgtaaacccgtaattttcccgccaaaaatgtaaccccgtgattttcccgccaaaaacgtaaacccgtaatttttccgccaaaaacgcaaacccgtgattttcccgccaaaaacgtaaacccgtgattttcccgccaaaaacgtaaacccgagattttcccgccaaaaacgtaaacccgtgattttcccgccaaaaacgtaaacccgagattttcccgccaaaaacgtaaatccgttattttttcgcccaaaacgtaaacccatcattttccggccaaaaacgtaaaaacctataattttcccgccaaaaacgtaaatccgtgattttcggtaccaaaaacgtaaacctgtaaaaagtggaatccgtaaatatcttaagtttgatgataatgaattaataatgataattatttattatttttttataataataattaattaaattattacttaaatgggttaacccatttaacgactcaacccatcaaattaaatgagttatgggttgactcaacccatttagcaaaatgagttgggtcaacccataactcatttaattctaaactcatttgattatgagttgagttgagttgggttacccattttgacacccctaactgcagtatatgattacgatgccacgtaatattgacgtcgttaattatctattcttctctcacaaatcaatcatcaattttcagttttcattaccatttcctcttcaccggggaaaattctgttagtttctttctccggtagttgaaagaaaatg

SEQ ID NO: 11174 - DNA, 3000 bp, Unknown
  misc_feature (1)..( 3000): cDNA_ID_2701875_gDNA_ID_2214482_Annot_ID_133280 3000 nt of promoter + ATG
atatgtgtgtattaatggcccagtgaaacagagccaatcacgaaactttgcttgtggaccactcttctatctttttaagggtgagaaacaggaattttatttactataggcccgccactagatgtaacctcctctttttgccagatcaaccaataaacatcttagtagtaagctcttcgctgtttgatatagtcctcagggatcgtatgcaatgaaatatcaaagttaaacaaaagttagattttagggagaaaaagcttatttaccacacatgttaaacaatttgaacccatttaagggtacatatgggaaatgttgtcaaacactactatagtggtgagatgcaaattataatactagaatatctcatgagaaatttgatgttctaaatataacataaaatggaatctaggcatgctctcttctaactaggcagtgtactagtctctcagaaatgatagcagaacactattatcagtaaagtgaatgacacaaaaacagcaaagatatcagtgtgtaacagaagatacacaatgatcattaagactttagattggaacaaatgaaacgtacatatcatgttataaaaatttcaaccagaatatgtcatggtgagtaaatagctacagattcctgaaattccttttcatgagtgctcgtaagggttttgttctattttcatgtgctcattgtgtttacttcctgtcacaactttcgatcgaaaacattaacaaaaattaggaaaggctcatacccataccaactatttgcttcaaacaattcgatgggtgtgattactttcatggatttatctatcatatatgttgtatactgttacatccttttcagaaatagaacaagccacaagaagataaagaagcataacagattaaagctgtagcttggttggccattacagaaggagtttcttcaactcctttattcttaatgtgtaaacagagaacagctcaacaattttgtcttcaggttcccaagagaagacgggagattcggctaggcttattaacgtaagaagagattcagacgacgttgggacaatcacaatgatcaaattccattctccgtcatctgaatcatcatacttcgcattcctctgttttgcgtacaatttacgttactcaattaattaattggaccggtttaagtcgattgttttattggcctttgttggttttggcccaacagaagaatgttttatgggtttagtttaaagcccatttggttaagtatgttagtttagttgaggcaagctgcaagtaaagtagttggtaaactctaaagctaggtttttaacctttgcttctaatcttagactacaaaccctaaaccattggccgcgtaaaaaaccattcctcgacttccgccgtcaatttctcctggataattgttctggtacgcgaataatacatagtatagtgccctaacataacatcgaccaaatcacattcaggttttatatatttggtttgcaaactgcaatggctacacaaagcaacaaagaggctttcttaggtggatttaagaaactcttgaatgaacaatggcaagccgatgtacgtctcaaggcaggagacagtgatgagactacatctattttcgcccacaagcttgtcttggtttctctacttcctcttctcttttatttatcatcatccaattatagggaaaagttacttattgtgtagcaatgtttttgagagtgtctcttacttgggatgtttttcattgttgacatgaatggaatattgaataggtggcaagatcagaggtgtttaagaagatattggaatcagacgagttcaaggcttcatctaaacagatggagacagtcaccctctcggagatgaaacacgaagaattggaggcttttgtggagttcatctatagggttgatggctccatttgttctgctagtctcaagaaacatgctcgttcactctttcatgcagccgacaaatatgagattccgcatctaagagacctatgcagaaacgagcttatatcatctttgaattcgtcgaatgctcttagcatccttgagctcgcccaaatcccttttgacaaagccctcaatgatcccgccttcactactatcataaccaatataagtacgattgctagtggtgatgagttcaagctgtttgtcgccaatcacccaaatcttgccgtggatataatgaaggcttctataactagactaagtactagcagaaaaatctgtggttactgtaatcgctactactaaaagaaccatagcgttgcttttgttgtttcctttctcattttttctttgttaaattgtttcatctctttttgataaatggttttatcattttcaagtgatttgacataattgtcacaatatcgacttcgcggatatcaccatttgcatagtatccatagtttgccaatttgtgtctaaattgtgccgcctctcagaaagattaatgagcattgggataagaaaagaaaaaaagcaaataatcaatcttgacactaagttttgatttgtttgatctcttagttcttcttatgtccaaaaggaaataaacagagagattgttaaaaagtttaaagctcaatttgagcaagcttttttttttttttttttcgtcgcaagcttttttagtgcattcctatcattctttcctgactataagtaaggttcctattttataaaatcttagctagagtcttttagattcttgtttagtgtgccatacacagaagtgcaagagacagtaagaagaggtaaacaaaccataacacaaaacttaaaattctgtattcgtctgataaagtctcctattaatgagtgcaaattaaattccgagttctaatgtattaatgtctccttgaccaaatccaaaagtcttgggaaaagaaagcaaaatagtaattttgaccgcctaggttctatatataataacccacaatcgttaactaaatcatatccacgatatatactttaaaaacatg

SEQ ID NO: 11175 - DNA, 3000 bp, Unknown
  misc_feature (1)..( 3000): cDNA_ID_1830584_gDNA_ID_2214482_Annot_ID_133282 3000 nt of promoter + ATG
tactaagatgtttattggttgatctggcaaaaagaggaggttacatctagtggcgggcctatagtaaataaaattcctgtttctcacccttaaaaagatagaagagtggtccacaagcaaagtttcgtgattggctctgtttcactgggccattaatacacacatatccacagtctttgtgtatacaaaagatgattatggttgtaaatagacatatggaaggacaaaacacgtcataatagaaagcttaggaacctatgaatggtggaaacagcaaggtcttgtcgcatcgagtaatctgtaggaaacattatctttaacagttaacagtacaatgcaccactttggcactgcctttgttatagtcaagagaaatgtacgaagtgagaaagaatctttttctattagtggttatacgtttaacccttaatgtctctcaatgtccttctcatagatatctaatagctaaaacctaagttacctcatgctcatgtttcaattctttgcaagttgcaatgtgaggccaacaaagcaagcctgtcaaatcgttttcagtcgtatccttaaccctcgtgcaaatcttttgtcatcatttaatcttcttttgtactctttgctccattatcacggctcttgaccatatgctaacaaattaaccgtcaggctttttgggtgtacctggacttgcttcttgggactgttcacagtctcggcgaaccgcgactgcataagattcccgcagaaccagaatatatcatgaaaagattcagtattattgttgaatatccggaattatgaactttagagtttgtgttatggttaacaattaacaaactttatttatgtaacgtaatctcacacattgttttgctacatttgggttagaaataagtttgacaatcctttgtaacacaatgataccattgagttattgcatctaaaaaaacacgtggtttcattatttggattttggacccaatgtcattttattgggcagtcttttacggtaaagtcaaatctcagaaatggttggaaatatttattttccattccttctttggttatgtttgttacgtgttgttctcagcatctcacgctccataatatctgagctcatcacataacaaaaccatttttgtcattttttcaaacaattttgggatttcgaaatggacccaatgtaaaagaaaaaatttccattaattctgtgtcctagaaaaatagttttgacatattttaaaattatttgaaattattaatatacctcgttttaatactatttactaaactataacaacttaatctgagttatgccaaaagtaaaaaataaacatcctattaagtgtcatgttaaaaagaatatatataataactatatcatgatatgtttgtgatatgaaagaagtaaatgtaaaaatgtttctagtttagtgatgagtttacgaaattacagaaaggtaagatattgcttcaatattaaagtggatgcattaagttccatgcatgtttccctttctctaattgtaatgacaagggacatcaaggcttaaatcttggggcaagatatcgcaagctttttggaccactatattttttttctccatcttccaattttattggatgcatcaaacgcgtctttggaccacagtcgcttttgattttcactgcaagcttcatttgttcatgcttgaaacagaatggaatgtctcagaaattttactattgatccaagatacttgatttgtcataaatttctaggtcggcaactactgcaagtgaaaaaggtcatcctcatacatacagttgttctatgacgagaatatccggatattttgtcttgattcataggactcaattttgaagatcatagtatcaaaaagaacttgaaacccgaatgaaatagtattcaactttccgttcttattagtttcactataaaaaaataacgaaaactttatttgtatttcgtacaaatccaattcaatagtgcatttattttttccatgtgctccttagatatactgcacgtgtagtattaaaatggttggatgtatttctggtgatgaggcttaagtagctcatagaattaggagacctaattaagtaactcggaaaatgtagactctaactcgcagtaatgtgaaatcttactgtattacactttattctgaaaatctagtagaaaacaccatgagttttttaatatgacgaaagacgaaactatatatacttgtaaacgtagagaactaaaatttatatacaatttagacattttttgttggaaatatttatgatatttttttatacaacttttatacgcctcttcctatgagtatttttagtattgtcggtcaatttcatacgaatacgcttaccatcattaacagaaaaaaacaaaacaaaaaaacgcttatttcatcaagcatagtacggcataaagtaatacaaaagaatatgataaattcaaaacggcttattaagtttttgttgttgttgttgagaggatggcataggtttattgagtgattcttatcattggatacctgttgctgaccagaattttcggccaaatatacataggacttttgttgtattttcttccatatttaaactataataaacaatgaaccaattaaaaaattgtatatgccatccaaggatttatactgatgatgatgatggtggtggttacatgaccaatgtgatgatgatgacattaatgaaaaggaaacaaaaaatctagcggtggctttatatatatcacatacttgaggagagtaaggcaatagctaaactaagcaaatctctaagacttgttctcattttgtttgttcaaaatcccattaaaaaaaaacacaatgcaaccttaaattatttccgtttagtctctctcttcacagtcctgacctctctcaactctcacaacattaccaaatacatcccataaaaaaacaattctttaaaaaaaaaatattttgatataaacagaaaaaacaatta

SEQ ID NO: 11176 - DNA, 3000 bp, Unknown
  misc_feature (1)..( 3000): cDNA_ID_4254819_gDNA_ID_2214482_Annot_ID_133285 3000 nt of promoter + ATG
cggcagcgcaaacgtcgtcgtttgattgattggtccatgccaccctaaatccctgccttttttgcaaaagctacacagaagaaactgcaattcccaataagcccgcaatcaacggcccaaatcgagtaatcagtcaaccatcccatacaaccgttctcacatgaaccttgtctttaacaccggtcaatctaaacaaccaaccaatcataattcaccacgtcatcacgtcgttataatctgtctctgtgtctctctcttcttctcactctccgagtggggtgatagtgtgactctgtaacgagaaagcacaatcatatcgattccttcttcaaaagctcttttgcttttttcatctccttttccctttctcttttcttttgtaattttattaattatgataagtgaaaagggctcctctttaaaacccttcgaattcgtccatctcttggttctttgtggtggcgatggcattggcagaggagcagcatcagaattatcatgtggctgaggcgattccgggtacgcctgggatccatgatgtcaggattcaacccggttctgagaattccgggttctgtgttgatccggttggtgtttctaatgtacctggaattaggagagttgggttgagagctgaaatcgatacttctcctccattcggatcggttcaggaggcggtgactcgattcggtggtcgtggttattgggttcctttcaagcttgatgacactttcgtaagttttgttctttctcagttttttcttcaatgtcagatcagtgtaatatacaaacacattaatatgcattgcatactaacatttgatgctttgatggtgaccattttccattgttctttacagtcgaatctcatgacttctgtggaagtatgtaaaattgagttcatgacctttgtgcaattcagtagcattacaatattgagattgaatataactcgagtctagaatttcataatcgaggttttagcaacatatatgtaagttgttgaaagcatcaagatcgtttaagctgttgttctgtctctgagatcatcatcaccattaagtgttgatcgtcgagtgtaaaatgcacacactgattttgtaacaatgaatctcggagtatctgtgtcactgtgtgaggttggattaggagttgagatatgattttcattttcttttggtttttgtcaacgttcagaatggtgaatttgacattaagagaatggaggagcatgcagcggagcttgagaaggatctgattgtgaaagagcttgaaactttggatgttttagaagctcttggatcaaccaaaaggatcgttgaagatttgaagcggcagcttcagcaagaagcactgagatgctctgaccaactcagttcagatatcaaagagatgaacgatgagcattgccatcacaatcccatgtcatctcctgatttgatcttgatggaattgaagcaagctaagatgaatcttggtaaaaccatggacaaccttgtagtgatccagtcctctgttgaatctctgaataagaaaatgaaagaagagaaagacttccttgagaagacacgggctaagctaacgtatgggtttggtggaccggtatctctagctgaggagttgagtcggattaaggtaaaaccacaggttcaagatgaaccgttaagggagcaggttaagatggttgctgaagccgatgaaacgggtttaaacctgcagaacaagaacagtctgagaactgcagagatgagattggttgctgctaggaaaatggaagaagctgcgaaagcagcggaagcacttgcgattgctgaaattacaatgttatcatccaatggtgaaagccaggacgatgattcggaattttgctttccagagcctccaagatctcctgtgacaccaagaggactcaggattgataatgacttctccacggataagagttcaagacgagggattttgaagaagcttgaggaagctactgaaggagttaaacaaagtaagcaggctttagaagctgcgttaaaccgagtagagatcgctaatgtgaagcaacttgcagctgaaaatgctttccgcgggtggacaaaagactcattgaaaggcgataactttacacctttgaatcatacccgacgctcctttttcagccatttgaacaagcatcacgagccacttgacattctcccaaagccagtgttaaagtctaatatctcaatgcgtgatgttctaaggcgtaagcaagttccaaaggaagatgttgttgctccccaaagacagagccttgaagggcaaataccgaggcgaaatgtgaatttgagccaaatgttgaaggaactaaagcaggatgtgaagttttcggcacggggagagaaagaggaggtacatgaagagaaacagtacgtcacgcagaggagaaagtttgggttcatacacattacacttccactgcagaagcagagcaagaaaaaatccagcctttaaaaacaaacacctcccactatttctatttttagtccttattaatgtgtttgtaattggttttcattttggtttgatatggtgttgattgcttttccggtcttttatatttgttgattttccaaaaaataaatatacaatcttagtctttaaataaaacataatgctttgaatctaatgagtaaacaacaaatttgatagtgattgtaaaacaacaatgaaaactgcagaaatgtgattactggataaaagctgtatcttagcaatgaaaccgaaccaaattgaaccaagatgattagaataaaccaaacaatgacgtggcagagatagtagctgactaggcaacgttgaatccacgtcagcagatctcttatcatcaaagttttttctatcttcttcgttcgaagacgttaaccccatctcgttgaaagagagaagatgctaagatctcaaaacagagtataacaacaccttgacctcgttgaagaagcctttgagattgtctcggggatctgaaaa

SEQ ID NO: 11177 - DNA, 926 bp, Unknown
  misc_feature (1)..( 926): cDNA_ID_3593818_gDNA_ID_2214482_Annot_ID_183402 3000 nt of promoter + ATG
tattgatataaaaatctactaagcattttatatgtaacgataacgacaaaatagtaaaatacatattagtctaaattttgtgtgtgtatatatattgatattgattgaatcggttttaaaattggttaagctagtttttggatgtagaatggttttggaaagtagttttagaagcaaatgtgtttggatcgtattatgtttcctaaagttcgtatatattaaaaaagttataaaggcttatttactattttttgtgaaatgtctaaaataacaaaaagtttaatgtatttccttttatttattgaatccaaatcttcaaacgttttttttccaatgttctacacatatgataagatgccgttggtaacgaacttttcgctccaaattttcaaaaagttttctaactatattttcacataaacccgcgataaaacattactaaaattaactttgaaatttaagtaaacattctaatttggatctatcaatattttttataaatagctaaaatgaaaataatattaagctttatacacaatattttatgcgattattttgttttagtaaaagatatttaatgaaaaacaaaaatattgttgaacaaggaattgtaatttatatgtttctatgtatatgtgaataagatcaaatgtaaaaagagaagtatatgatttgtgtgatcaaaagacagcttgaaagtttggatagacgaaaacaagggttaaaaagataaaagatctcacaaacgacgctgttttggagcctgttccgtgtttttttgtggccatcatcatcaccttcggacacaacgtgatatctgaatctctccctctctctctctctctctttcgctgtccgattccgacagatagacagagggcgcgaaacagagagaaaataagaagaagaaggacgatccagatatg

SEQ ID NO: 11178 - DNA, 3000 bp, Unknown
  misc_feature (1)..( 3000): cDNA_ID_1581498_gDNA_ID_2214482_Annot_ID_183401 3000 nt of promoter + ATG
atattgctctctttaataaaacctatatatgatggtactttatgtgttgtgtgacttactgtatgagtttacctaatttttttttttttgaatttaatgttaaattagattcaaaaagagaactgaacgtttttacaacaagtgcaacaattttttaaagaagctttgaaaattttaaatagaaactcttaatcacttttctcaatgtatcctccttgatgcaaaccaaagttggagtccattgttgtatctctgatcgccactgattttgagagccgaaagttgattgcgaatgtgtatatcaatccatttgataagacgactagatgggttgggtcgtgtaccatgtttacgctcattgcgttctctccaaatggtatgtatcgatgcttgcaacacatatctagcaagtaagcgctgcaactctgtcccgccactgtaaacctaattttacctaattaataaactttaataaacttttgcctaatttacctaattttgctctctttaataaactttttccgacgagaaaaaagataatagtaaacctttcccaaaaataacaaacatatacagtagtagttttcttacaaaaatccttgtttgttttctgccaaaatcaaaatacatttcttaatttgtagggacttacgaagtaacctatatatgggtaatcatttcataatcggttatcacttcattgattctgaaagtttcaccgcttttgttgatgtcgatagactgattgggtttcgcttccatgtttttattctttttttccatgggaccaaactttaggacttactttgtataattctaaacatttttcatttttctaatgaaatatttaccttcttagcaaaaaacctatatatgggtaatatggctgttttagttgatcacgtttaggcacttaagcatacaatagatatatagaagagtaactaaggaataggatgtataaaggattaaaggggacacaagaaaatgacgtatcaaagaaatgcatgagagcgttaaaacgtcgaagcggcctttgcatgtgcttgtaacatggtagggctatctactgacccacttactaatattttttaatgtattagtggcctgtctagtcaatccaggtaatttaaataactaagcatatacataattcgtatttaaaccctaacaattttggaaaattttgtcttaaaacttgattacatgaaaatcgcaaatttctgaaattcagagctaatcaaccactaaactgatatgttgccataaaaatttaagtgatcataatatatcattcaataaatataaaatgtactgacgacttacaaaaaaaataaaagctagttccacatgaagtatatctatatatgcctacacgaaatatacaataagaaatgagcacgatgtatgaaagaactagttgttgtcatatgcatagtatcaattcatcattggcatgctaacaagatcaattaaaatattctaaagaaccatgactattaagctcattttcaacaaaggaacaaaaaaacaaaatctgtagtagttgtttatcgaatatctatatactataaagtcgaaagcatcatatgaattaacacaccaattgttgatttggtgaatatctttatatagtcaacacccgctagttcgtaagattaaatctttgatatggttccaatttccaaaattttaaggtgatccgaacaaaaatagaagtgatacgaaagtctaaattctagactgtgcgttattcccgcttattattttagaaagtaaaatccggaaactatactaacaaggattgcagctgataaaaattacttccaaattccaatgtgctcatatttcaaaacaatgtgtacgcccttattttaaattctaatgtgctcataattaagctcatgtttgaatatgttcacttaaaccgttattttgtcatctgtaattcgactcctccacccacaaaatatttggataggctcccgacatggaggccatcactacgtaaatgcaacagtgacaaaataaagtataagaaaaacttgattatcatcctatgtaaatatttatatatctaagaggaaccgtgataagattcttaaactgatctaagtttttcaaagtaaattgcccgttgaacatgatgatgcattgattacaagtcttttgttgtataacttttaacacacaaaaatagtattttatcaacaacaaaaaaaaaaccttcaacaaaaatgtgaggtatgatcttatgagttatgaccaacgtaaaatgaagtaaaagacaaattaataaatacttaagtgtattgaagcatgtgcaagtatgggccacttgattaggaatcgaagttggtctaaccgcaacatttgcatgtggccacaaccttcaaagtcccttgatcttattatatcattaatgatccattcacatttttttcttttctaactgtttaattttgttgtccacaaacatattttacaatacatatataaatctggccgcaacaaaaaataaaataaatatatcttactctgctcaaggttaacggtggcatacattgttgactttgcttctagttatccacacaagtcacccatttggccatttctaaatttgatgttccatttcgttggagaaaaaaacccctatgtgtgtattaatgtatgaaagaataccaaaagataataaggatattcattgggatttaacgagaaataaaaggcacaattctctcgcaaattggtcaaaaatacgaataaataaatcaactaaatacccaaaaaggtgaaagaattagagacaccccaatgtacttcatatagtaaacatttaaatatgattatcgcttggcacaattattcactcgagtacccctatatatacccattccttccatttgtagattccatattattcacgattctcatcaaatcatctccgatactcacaaccgaaataactaacccctcctcaacaaaaaacaacaaaacatg

SEQ ID NO: 11179 - DNA, 3000 bp, Unknown
  misc_feature (1)..( 3000): cDNA_ID_4254625_gDNA_ID_2214482_Annot_ID_183399 3000 nt of promoter + ATG
ggagcaggagacgtacacgccgtctcaatcaaaggctcaaaaacacagtcgtggcaagcgatgtctagaaactggggacaaaactggcagagcaattcatacatgaacgaccaaagcctttccttccaggtaacgaccagcgatggtcgcacactcgttagcaacgacgtggctccttctaattggcagttcggacaaacctaccaaggtggtcagttctgatccaaaccatcatccacatctctctgttttgggtgctgacgtggctgcatattgctgaggtggctcgtaagcacccgcttaattagcttagccttttttttctcttatttacgaattattgcttcaatggttgtattttcattgtgcctacaaaaaagcaaggtttttttacatgtttattggatttttttcttctctttataagccaatatcgacgcccaaaagaatgaaattacacatgaattgatttaataatttcgaattttatttaatcaactacaaaggtttttttttttttccttacacaaagtgtttatatacacgattataaactatccggacaaaccggttcaccaaacgaaaatcaaatgtgtaaaccacattatcatctctaatagcaaccccgccaaaaataagccattgtatcttgtagtaaacttgtatgattgtatccatcacatcacaatttgatgtttatgaaatctttgagtgctttctcatctaatcaggcccataagtaggccattatcatcactattagtaatgggccaaaaccccgtgaatttggtcacgcacgactcaaatgagacgacaatggttgacctctggactctcgagtctccctggattactacactcgagctcgacgatccttagaccaacttcgtcttcttcctcgagagcttctctgatctccttcgccgttaataatttccacacgatcgcttcttcttcgtctactctctcttctcgcttgacaactgtatcatcgtccatggcttctggtgacgaaggagctgttttcaatttgtctgattctagccttcttaagatccttaaaggagacatcaccaagtggtctgttgattcttcctccgatgctattgtaaagtctctctctttctcaatcaattcaaaattctagggctggttttcccacaattgatatatttctaaaattagatggaaacttgagcgttggtgatgaaaatggtttgataggatcttgaattgtataattaggtctctcgaattttgctgcatgattagtttgacttaggaagtctgtttcgtcaggtcaatccagcaaatgagcgtatgttaggtggtggtggtgctgatggaggtatgttttaggatcctttgtcctgttcaatccaatgccattgtgtgattgtgctggtgtaatctgaaatctgattatgtatgtgacagcaatacatagagctgctgggccacaactcagagctgcatgctatgaggttcctgaagttcgtcctggagtccgttgtccaactggagaagcaagaattactccgtgagattaccctttttttaactcgtgtataaatgtagattgaggtagtttgaaattggtattgttgagtgatggaaaccagttggattgaaaaattggaacaggggttttaacttgcctgcatcgcgtgtgattcacactgttggacctatctatgactcagatgtcaaccctcaagaatctctcaccaattcgtacaagtaagcgtaaacactgtttctctcgtttactatacttgacatgtttgtttcctctggtaccaacaattcatcttttttcttgctacagaaatagtctgagagttgcaaaggaaaacaatatcaaatacattgcatttcctgccatatcttgtgggatttacgggtaaagttgtcacaaccagagacctaagttgttcatattgttttcctatttagtttttttgctcttagagtgagtatgatttgctactagaccaatccatctaattttttacctttagtgattgacaactcttggaaagtttgtgcaaggtgaaagtgaaaccttatgttcgaaatcaattgtttttgttagatatccttttgatgaagctgctgcgataggtatttcaaccatcaaacaattctctactgactttaaagaggtaaagataagtttctcttgtctagattgttgcacttcccgctaagtgactgacacttttttgatctcgtattcttattcttatcaaggtgcattttgttttgttcgcggacgacatattcagcgtatgggtaaacaaagcaaaggaggtgctacaaaaagcctaaagtccaatcaatggccgaagatacacaaaaatattccccaatccttcgcacaaacaaatcatttgctatttgtgttgcgttatgaatgccttgtgattattcgttacatttagatttggtaataaagaaaattcttgcatctaaaagaaaaggtttatcacttgactcccttattatgtcttcccatatgactagttatctccaagaccctgccaagtgaaaccgaaaaacctaaataggattctctcgaaaggtaagaagtgtgtaaaataagctgcttgcatttcttcttggtcttcctgagttcggagctgaggccatcactatgtttggaaagagcaaatgtaaacgcgagaaacacaaacagaagaaaacgttttatcatagaaacagaaaaaacaaaaggttaatcacttgaccactgaagattgcccgtgctcagcaaccatctctgagtgaggaacgaaaagtcactgccagtgtttattttaaaacaagagaaaataaagcctaagcccactatgtaaaagcccatcgtaatttaaggcccaataagtaacaataaagatcatctcctctatcgatgagaagcgagtaaaccctagcagcggacacacacttaagtccatcgacatctggagagtgagaagagaggaatagccaaagatg

SEQ ID NO: 11180 - DNA, 3000 bp, Unknown
  misc_feature (1)..( 3000): cDNA_ID_3039145_gDNA_ID_2214482_Annot_ID_183397 3000 nt of promoter + ATG
tcgagactatttggatattgtaattttcactaagttatctgagtaagaagaaccatatcgtttcatttcctatctatttattaaggttcaacttttgagctattgactggtaatggaaaatgtttgagaaagaagaaaacttggagacttcaaacccattccggttaattttcatcgttgatctgacatggtaaatactgaataaagcacatgcacactgtgacacctctactttaaaaagtaccaaatagataaactgactagaagattattttcttgtgatgcaagtaagaaacaaactcaaccaatcgaccttactaaagtatactcttctataaaataaagaaatttcttctcccccgtatgtaaattgaaatcaccagatggaagtcttggtatagagatatatcgatctgataatcttatcacggaagaagactttggtctcgattgcatatctctcacgtacgactctcgtttgtatgaatagaaagaacaaagacacacacaatttaacgagttcccaaggtcaaaccgatccttggtacatctcggctaggctttgccatagcaaattcactatccagttttttttttcttttttttatacatatgtacacaagagagatagagagaggattaggtcaaaagaagcttcgagaaacttggaatcaacgacctagatatctccttgttgtcttctgttgttggcgatggaagtccttgtgtaataaaaggatgtttcaagagctcagtcgcggtgggcctgcgtgaacgcatgtcatcgcatcgccttaagaaatcttgagcctgcggagagataacgtcacgcaaatgccatacgtaaaattcgtcaaagtactcctggataggtatagctccaaacatctcattaaccacacaccctagagaatatatatcaagggctggatcgatatgtcccggatcgatcagtccgtttggtacaaaagagtccgggggcatgtactcaacagtaccaagggacgtaggatcatgatcggtgtcaggctctttggatgaaccgaaatcagcaagcttgagatcccacggctctccaggagttgtggaagggaagaggagaacgttggatggcttgaggtcgcagtaaacgtaaccatgggagtgaagagcctcgagtccttctaggatcatacgagccgtgcgactgaccaaagactcaggtatcggctcttctttccgacggaaaccatatataaacctatggagattacctttggaggcgtactccatatagatgtagcaatattcgtagggttggatttgtaagtgaagcttgtttgaggcttggacgatgcgaggatgatcacggaaacgatgcatgatcctgagctccttctcgagaatctttttgagatgcatcggcgatgacttctttgcgtaaagtcgggagttggagtccttctcgagagagacgtaaccgaagttccctcggccaagagaagagagcttcgtcaacgaagactcgtccacaatccaatcatcatctctgcaaatttgttccatcatcatagtgaagcttttacgtattcgattgtctttaggttttcatcagtctctctatacctatatatatatattttctgtaggtcggtgcgtggttcgttttttcagttggagctaggacagattttccttttccaattaagaatctgaaatatcgtatacacgctttagttaaactatatcctcaacttatttaatatttatattatttaatgctaaaaatgaaaatttattataaattacaaattctaaatgttaaaagatttacactattatttattcaaaatgtgtatacaagaaatataaccaaccaataaatatagacaaattaaaagtaacataatttgttagcacaataatatatgaatattaaaaagcacatattgatcttaaatattcctaaatataaaaagaaactgaaataaataaacaaaactttctattaattttaatattttttcattttatgattagtgatttttcgtattattttaaattttacttttagaaagaaaagtaattgtaatcctagattcattggaatcgagtagatttttttagtaaatacatcatcaattattgttgatatatgatatattttctattcgaatatattttgagtcaataatattagttgttaaaacaattatgcaaaagtgaagtaaaaagatatatgtgtttatatatatatggggtaggaaaataaaaactttcaacaattaaattcgatatatatgttatttttttcacttgatattacttttttcccataagactaaaggaagactgataaattgatttcttaaaattttatttaaatgaaaccaaataaccaataatccaatattcaccaaattaagtttcctttttcgtattattttaattatgatagcttaatgatatcaattgttaatttttatttaaatttcctatcaaacggataaaagattacgaagtaggattatgttaaaagacaaattgaagattataatggatttttaaaggttataagattactttgttaatatttaagatttggggacaatttggaatatttagtatttgttttaagaaaataaaagattttggccaatttttcctaatgtcaatttagtatttttgtaccggctaaataatctttcgtgtagacaaaaatcaactctgaataaaataataataaacccaccagccgttaaaaaagggtgaaaaacatagtggagccctatccttctctctctctctcgtagccctcctctgttccatcttcttgctccgccgatctccctctgctctttcttcttcttcttcttcttcaattctgtttttatttatttctttataaaccttctctcttaaaacccaaattcaaaaaaatcaaacgaagaaaaatctccgagttagaatcgtccataatcttgagactaagtgagaaatagtatccaaggtgatcaaaca

SEQ ID NO: 11181 - DNA, 3000 bp, Unknown
  misc_feature (1)..( 3000): cDNA_ID_4262165_gDNA_ID_2214482_Annot_ID_183394 3000 nt of promoter + ATG
aaatatgggaaagaaaacacaaaaacattctgtcagttggtgacaaaaggaacattctgtcggttatacagtctttaaccattcaccaaagcaagttgtttataaattaacatcgaaaactatgcatattttggcttactggcccgttaacaaagcataaaaaaagtatttatcgttctctgttttttactgcctaaaatctttccagatttggaattacattggcttataaatgtacgttaatgagtaaacactaaatcacagcatcccatatcgccaactaagaaactcaattatctcccaagtaaattttacttaccatcaccaatctatcatcacttgttacccattttaccaagaaaaaacgaaaagtttctttcccataatatatatgccgccgattgccaagaaaaacaagattttcattcctagattgtgtttgcgggtaaacaataaaaagaagaagaaaatggtcaattggttaagaaactctaataagtaaaaacaaaatggtttcgtgtaagatcaattcgaattcatttttattttggcaaaattgcaaaaattaataagagttgatagtagacgacaaacattttcttgtacactaattactgtaacagtcacattattataatgaaagagggattcagcaatcctaaaatatgatttgtaatttcataatcattaattaaatcgcccaattttgaactttttaatcttaaaacttcggaaaatgattggtctatatttgtgcccaatatatatatatatatatatatataagtataaataataagttctattcttaagaatcattagtatatcctaaaacctgcttttggcaatcaagaaaataacttgcaaaaaacccatggcgaacctaatcttcactaaaacagactccagaaaaagagtgttccaagcaaaatcttgatgatataagagactccagaaaacaatcgtctctctagtgagcttcacatatcaacagtgtataagtttttgactagcaaaaaacaaatatcgttcacatttgactgatacatcatacaccaaactgaaaagacagcattccccaaatcacgtatagaatcttaaatcatataaaatacattttgttctttgctttgaaatatcaaatgttagtgtgatttgtcgtcatgcaacgcatgcatataatattaatttattatttgatttggtaataagtctctttatacatgcattgaatccaccgaccaagtctactatatgctttgaaagtttgaattatataataatagaaaagattgttgtgaagagcaagctgaatcgatttggagaattggattccgatctggttttataattgttcgactacaataatgtcaaatgggatagcaagaaaataatgtataaaggttgaaattgcgcaacacctaacaaaagggagagaaagaaaacaccccaaaaacaaaaaggtagaggaagaaacacataaaagaggagtgaaagagaaagaagcataaaaagaaaggaatagaaatagagcaccaatcaatgacttcaaattcaattatttcgaaacaaatttttaaatttatagattactaaaaatcaacaaacttttatagaataaatttgtaaatctatgattcattagctaaacaactaatttttacacactaaaacaattcagagatgtgtacaaataaagacatgtgttaaataataataattatttgtaaaaaaatgagatataaaaaagtagatgcaaccaaattttttaaaaaaaacctttaaaatgccataaaaccattctaaaagtttataactgtatatatagatttgttattaattattttatatgttgctattcatttattaaatatcatctagttgttcaccataatccataatagggacaaaatcttaaatacatttcatatcaatttttttctttcttacaatctgccaagttaaagaaattcacaaattataaaagagaaataataaggtagtattaaaaatttaatactagtgactatcaatagatagtaacaaatactaatataagtatatattaattacgcgttatatataccttttaacaaaatatattattgttgttgactgatacagagagaaataaaaaaaaaaacagtttcgatttttgttattgcaacaaaaagtttcggaaaatagagagaaaagagagtgagtgaggttggtgatgaccagattttgaggcttatcaatagtacaaagcttgcaaaatcaatggcgcaaattctgttggtaagtataagaaaaaaaagaaaagctttttcctttagatgtcatgtaactgtcgggagagcactcacgtgtttctgtctcttcacctgtaaatattctcgccacgtttgctctctttctttttttccccgagaaaacgcaaagacaaagacgtttttttaatttggctatagcatgtggaggctatgggttcttatcttgtatcgtcgttctttgtcttcaatatctttaattcaatgataagcagatcatctctttcttcactcctacacatcgattcacgtcatccacccagaaaaattcatacttcaattaaaaattctgtaagtggaaaaaacacagttggcaaaatgggcaaaagctaataattgatttatctccatttatggctaaaagcctaacactaggctctacacttttcaagtcttttcattttctgggtaattgttgttcaattttagagatttagggtttttgattgttcttctttttctgggttttatctaaattcgtggatatgagaatggcatgtgcgtgaatgtggcctactttgttttcttccttctaatttgggaacagagtttggttgtcctatttattgttactttgtaggtttcactcttttcgacattacttttcaattgcttcagattcataaatctatcttcttctttctttggttgttcagctttagcgtgttaggctgaacatttaagaacc

SEQ ID NO: 11182 - DNA, 3000 bp, Unknown
  misc_feature (1)..( 3000): cDNA_ID_3039153_gDNA_ID_2214482_Annot_ID_183392 3000 nt of promoter + ATG
ttttcgtcctcgatttaaatttagagaggataacacatacaaatattgatttcttttttaacattagcgtctgaattttctaatttcaattttggaaattaatttactaacttaaaaattttaaaaatattttactatattagaaaaagtcgttaacataatgaccgtttatatagctcgtgtatacagtaaactaaccgttatttctctaactaaaaaaccagtgattagatcaatgttaactttgaggattaaattgctcacttaaaagttaaaaaatattttactatattaaaaaagtcgttaacataataaccgtttgtatggtacatgtataaagtaaatggataatattaagggatgaccaaatttgacagcataataaagaaactaactatgtgtcagtttttttggtaaatgactctttttgtggtggggtaggggtgaggaaaagaccaattaatcttgtaaacttatagtttttacaatgatacatttctttatggtggtagagactccataaggttcagtgagaaaaagaaaagagactcagaggtggaattcataatcatcgtgatattattacagagtaagtagtctagaaagagagtcatctggcaaaagattaaaaaaacaaatcatgtaatttttaaaaataacatgaatcaaataaaaataacaaaagaaataatttggtatttatacaaaatcttatgtatttttaacaatagcatgtcaaaataaacaatagcatggcatattaaaaaatcacatgtaaaccaaaactatagtatgttaaacggaaagataccagtatatcataaaaaattacataaaatttagaaaaaaacccatgaaaatttaagaagtgacatgaatcaaacaaaaataacgaaaacaatttggtatttggttatggtcatcgtgatattattacagagtaaatggtggtagagaatatctataaagggaaaagaagttgacgacatagatccagggagaaagaaaatcctgcaaaaagaaaatagagaaaaagaaaactagggagaagatgagagagaaaatgataaaaaggatattcaagtaattctatatacatttccgacaagatactgttgtccatagttagttactcaattattttcggtttcatagtcatctagtgcatatacccaaagtaaattaccgttatttctctaattaaaaaaaaacggtcattaagttaatgttaacttagacaaaaagttgctaacttaaaagttcaaaaaaaaattaatatattcaaaagtcgttaatttagtgatcgttccctcgatggtacaagtagaaagcaaactaaccgttatttctctaactagaaaaagggtaatcaaatcaatgttagcttaccaaattaatttgctaacttaaaagttcaaaattattttattatttcaaaaagtcgttaatttagtgaccgttttctcgatagcgtgagtataaactaaaccgttgtttctctaactaaaatttgaaaataatatcattataaaataaaataatattatttttgaaaagaaaatcacttttaaacacaaatttggacctcataacattttctaaaatacatttgacttggaagaaaaaaaaagaaaagtaatataaacgtatccaaacactaaatctcattagccaatgtttgtaagagtatctgtacatcgtagatatctattttgtcatttcctctcttttagtcttttatttcattttacttttttaacttttttttctttttcctttgattttcttgtcttctctctttgaactcatgaggaagacgacgacgttgttaggaaaaatgaacaattttattggggttatgtgaaacgatttttaatacaaaagaaagaaagatgctgatttattaaattttggggtcattattatttaatttctatgacttatgaaacttccataaaaatttcattgacttttttttttcacatttttttaccggtagtcgtttcattatcatttacattatcttgtttatttattctccttctcatgtttagacgctaagctgccattttctccgccagagtaaagttctttatcctctttagctcttcactcttaaactaattaagatttggtgaaaacgattctgcttatgctcctttcgctttctctgttccattttggtctttaactctttcatttcttgtgagtttttttgatgagtttgcgtttgataatccaaaggcaaaagctttttctttacgcgttaaatttcaactttttcttacaaatgcatattgattacaatcctagaaccctaaacttgttaacaagtgttgatcttttgttcatcatcgaaagttttgatttttatgggtttctatgttgcagggtgagttaaagccacttgggttctgacggatttgttcaaaggaagcttctttgacgacgacacttggactaaaagcataggtacttttccgatactcctcacaactctaaaaatattttctccatttacgaggttgacgaggctttttttatttgcttgagttttagaaagctttagtttttagttgttgtcgcaatcattgccgtgtaagctgggggaaaagcgagtggatcagaattctttttgtcaattctttttttgggtattttccaaagtcttgttttttttttattctttggtttgggtttggctttgaggaagctaaagactgtatagggatacctaacatttgcatttactattcatttatcactctgttttgattttcttgtcttgcttgtattgttttgaagcaagattttgttcttgctctgttctgttctgtggtgattcaatttgtatggcttcatttctttggttggaagttgttttccttatttgatgtcatgtttttcttttaatgaagccatgattttttctctttgttctatggtttgtacttgtagatcttgcactcgttggggtgattctctttgttttttgttcaa

SEQ ID NO: 11183 - DNA, 3000 bp, Unknown
  misc_feature (1)..( 3000): cDNA_ID_1021968_gDNA_ID_2214482_Annot_ID_183391 3000 nt of promoter + ATG
atgaacatgcagcagataacattcttacattttgtaacaagaaaatacagtaaaggatatttgtgcatataacggggcagtgtcaagaactgatttgaagactaaattctatttgaaatattgttatttgagagcattttaagtaatggaggtgctatcagatgagcgacagaaaaaaggaaataagaacttgtatttgcttagttgacctatatttcttttgtttagatgtaaatttatatttcacatgactttacacttttacagagaaggaatacaacaaaaactgactttagacttcagatagcatgcatgcttgcgcaagaactaaaaaactaagcaagactgctcttataggtaaggtacttaacaaaagcatgtattctgtttggagactacttggaagagaatattctcatatagctctagttttcctcaatatcgtctcaaatttttagagctcctttacaaaattggtgatcaaatggaaaaaccataagaggatatattcaactatttattattttgtctgtagtatttatctaaataatttatatcaatattaagcattggataatcttaaacatttatttagatatagtttgaacttgtaaacttacacgatttttaaagttcgtaattgaaaaaggagtatacgtccaattgaaaaaacgaaccgaccttctgaaaaaaaaaaaatatatatatatatatatatatatatatatatatatatatcgtgtgatgcaactaccacataaaattactcagattacaaaagaaaaaaagaagacaaaaaacctaaagaagatcgaatacgtaagatggagaaacttggcagagatgatgaattgattgtggacgagtcttcgttgaaatccttctctcttctttgccaaggtaacttcagttacgtctgtctcatgaaggactccaaatctcgacgttgcgcaaagaagtcatcgccgatgcagcacaaacagattctcgagaaggaactccggatcatgcatcgtttccgtgaccatcatcgcatcgtccaagcctcaaacaagtttcacatacaaatcaaaccctctgaatgctacatctatatggagtacgcgtccgaaggtaatctccataagtttatatctggtttggaaggaaaatccgtaccagagtctttggtccaacgcacggctcgtatgatcctagaaggacttgaggctcttcactcccatggttacgttcactgcaatctcaggccatccaacgttctcctcttcccgtccaagactcctggagagccgtgggatctcaagcttgctgatttcggctcatccaaggaacctgattccgattatggttggatgtactttggtacggcgcctaagtacatgccaatagagtcttttgggcctaagggagtgatcatcgatccgagccttgatatatatgctctagggtgtgtggtttatgagatgcttggagctatacctatccaggactactttgacgaatattacgaatggaatctgcgtcgtcatatctctccggaggctagagatttcttaagccggtgcagtaacatgcatccacacaggcccaccgcggcatatctcttgaaccatcctttcattactcaaatacttccatcgccaacaacagaagacaacaaggagatatctaggtcgttgattccaagtttctcgaagcttcttttggcctaatcctctctctatctctcttgtttgcataaaaaaaaagaaaaaaagaaactggatagtgaatttgctatggcaaagcctagccgagatgtaccaaggatcggtttgaccttgggaactcgttaaattgtgtgtgtctttgttttcaataatcgtgaaatcttcattaagtgtaaaagttatacatgattaagcttaaatactagtaaactaaaccaaaactactaaccaaacttaaccacaactaaaccaagtatatacactctaatactccccctcaagatgaaaggaactttcatcttggacttgaaaacccaatgaatatgtgtcctccacaactttttttcaatgagagaagcatcaatggacatgaatatccatggcttgaaactgaaaataaacgttacgagcttccggtggtcttgttagtgatccaaagataaatgtgcttaagcgaccagaatcatcgacatgcgcttgcccaacaaagctaacatcgccacaactaaaccaagtatatacactctaatatttgttctttcgattcatacaaacgagagtcgtgcgtgagagatatgcaatcgagaccaaagtcttcttccgtgataagattatcagatcgatatttctctacaacaagacttccatctggtgatttcattttattacataccgcggagaagaaagatcttatcttatttaagtgttatactttagttaggtttattactcgagtttgtttgttacttgcataacaaaaaattactcttaagtcagtattttttctttgaaaggttttacctttttaccagtgtgaatgtgctgagttcaacactccttcatgtttaatctgagtatattttatattagtcctgcatattttatcggagaatatcttcatatattattattagagtgtacataaaattcaaggtttactctatattactctatccaataatttacatttgtctgttagattttgttggaaaaaaataactgtgatttacataagttttttttttttttttttttaattgatgaaagaagaaaaagaagaagaaagtcttctctagaaacaaaatccaatttttggtcagaatgaaaaagtcactggcaatgtttattaaaaaaaaaaaaaaaaaaaataaagcccaagcccactacatgttaaagcccaagaagtaacaataaagatcagctctcctctatcagagattagacgaatgagatcggcaacaagagcgtaaaccctagcagcagacacaacacgagttcatcgagaagcaag

SEQ ID NO: 11184 - DNA, 3000 bp, Unknown; identical to SEQ ID NO: 11175
  misc_feature (1)..( 3000): cDNA_ID_3039168_gDNA_ID_2214482_Annot_ID_183385 3000 nt of promoter + ATG

SEQ ID NO: 11185 - DNA, 3000 bp, Unknown; identical to SEQ ID NO: 11183
  misc_feature (1)..( 3000): cDNA_ID_1021968_gDNA_ID_2214482_Annot_ID_133287 3000 nt of promoter + ATG

SEQ ID NO: 11186 - DNA, 3000 bp, Unknown; identical to SEQ ID NO: 11181
  misc_feature (1)..( 3000): cDNA_ID_4262146_gDNA_ID_2214482_Annot_ID_133290 3000 nt of promoter + ATG

SEQ ID NO: 11187 - DNA, 3000 bp, Unknown
  misc_feature (1)..( 3000): cDNA_ID_2701883_gDNA_ID_2214482_Annot_ID_133291 3000 nt of promoter + ATG
gtcatgtcaaagttagcctcctcccaaaccgacaagtctctgatgaggcactgtccacttataagctggagcatccaccggagaagaaccatgactcgtgtgtgaaaagatatctggagaaacacaagtggttacacactgctttgctgcttcttgttcttcttgggacttgtatggttattggagatggacttctcactccagctatctccggtatgtatgcttctgtgtttgtagacagatattccagtgtccaattgctagttaaaagagttttctaatcttttctttttcttgtatgtagttttctctgctgtgtcaggtcttgagctgaatatgtctaaagaacatcaccaatgtaagtacacaaagactgggtagtgttagtttttgctacttgagttctgatgaatgatggcttcctttgttgttcaaacgtgcagatgcagtaattcctattacctgcttcatactagtctgccttttctcgcttcagcattttgggacacatcgtgttgggtttgttttcgcgcctattgtcctcacttggctgctctgtataagtggtattggcttgtacaatataatacagtggaatcctcatatatacaaagctctttctcctacatacatgttcatgttcttgagaaagacgagagtaagcggatggatgtctctaggcgggatcttgttgtgcataactggtgagatatataagaaatcgatattgttaatgtcgccataaataatgtcagtaatctaactcgttgagtctttgttttaggtgctgaggccatgtttgctgatcttggtcacttcaattacgcagcaattcaggttagtttctactttagcttggatgatttacttattgttatatcgccacaggtttcaataaatctttgttttgtttgctgtagattgcgtttaccttcctggtttatccggctcttatattggcatacatggggcaagctgcttacttatcccggcatcaccattctgctcatgcaattgggttttacgtctctgtaccaagtcagtaatttgccttacttcaagaactcaatttttttttggtgttgatcattgaaaacgtaatctgatcttttgtttatataactccatggttttgaacagaatgtttgcactggcctgtgcttgctgtagcaattcttgcttctgttgtgggaagccaagcgatcatcagtgggactttctcaatcataaaccagagccagtctctcggatgcttccctcgagtcaaagtcattcacacgtccgataagatgcatggtcagatttacataccggagattaactggatgctcatgattctctgcatcgctgttactatcgggtttagagatgtcaaacacctgggaaatgcatcaggtatgagattcttttatcaactcaagaattttggattcttcgactttgagattatattcctttgtggttggttgcaggtttggctgtaatggcggttatgctagtgacaacatgtcttacctcattagtcattgttctttgctggcacaagcctccaattctagcgctagcgttccttctctttttcggttcaatagaacttctctacttctcggcctcactcaccaaatttcgtgaaggcgcttggcttccgatcctcttatctctaatattcatgatcatcatgttcgtttggcactacaccaccattaagaaatacgagtttgatctccagaataaagtctcgcttgaatggcttcttgcattgggtccaagcctcggaatttctcgagttccaggtatcggtttagtcttcacggatttaacctctggaatccccgccaatttctcccggttcgtcaccaacctccctgccttccaccgtgttcttgtctttgtctgcgtgaaatctgtccctgtcccgttcgttccacctgctgagagatacctcgtgggtcgtgttggtcccgttgaccaccgctcttacagatgcatcgttcggtatggataccgtgacgtccatcaagacgtggactcattcgaaacagagctcgtaagcaagctggcggatttcatccgttacgattggcacaaaagaacacaacaagaagacgacaacgctcgttctgtccagtccaacgaatcctcaagcgagtcaagactagccgtgatcggaacagtagcttacgagatcgaagacaatctccaaccagagagtgtctccatcggattctccacagtcgaaagcatggaagacgtcatacaaatggccgaaccagccccaaccgccaccataagacgggtgaggtttgcggttgaggaaaacagttacgaggacgaaggatcaacatcgtcagcagaagcagatgcggaactgagaagcgagctgagggatttgctggcagcgcaagaagcaggaactgcgtttatattgggacattcacatgtgaaagcgaaacaaggatcatcggtgatgaagagattagcagttaatttcggttataatttcttgagaaggaactgtagaggacctgacgtggctcttaaggttccacctgtttctcttttagaagtcggcatggtttatgttgtttgacttatgaaaaaactaaatatatgaaaacctaattcctctgttgtaaattcgtcatgtttagcttcatagatctctgtttctgtgtttgtgagtctggggtttgacttttaacaaatcttaagaccaagatggtcagaggatcatatatgccaaatgaattagtttattatacacatgaaacgacatcgtatggagaggggtccaaaacggtgcgttggaagttggagaatgggcatggataatggcgggaataacctaggagatatggcgggaaaggcccaactatacacacttgacattgcccttaattcgtgtttgagcaaagactcaatctttcatctctagattcttggcgattctcgctacatagtactttggtaaagagtgaaatcaaaggttggttttgagat

SEQ ID NO: 11188 - DNA, 3000 bp, Unknown; identical to SEQ ID NO: 11180
  misc_feature (1)..( 3000): cDNA_ID_2701887_gDNA_ID_2214482_Annot_ID_133293 3000 nt of promoter + ATG

SEQ ID NO: 11189 - DNA, 3000 bp, Unknown; identical to SEQ ID NO: 11179
  misc_feature (1)..( 3000): cDNA_ID_4254625_gDNA_ID_2214482_Annot_ID_133295 3000 nt of promoter + ATG

SEQ ID NO: 11190 - DNA, 3000 bp, Unknown
  misc_feature (1)..( 3000): cDNA_ID_2701895_gDNA_ID_2214482_Annot_ID_133296 3000 nt of promoter + ATG
aaattgcccgttgaacatgatgatgcattgattacaagtcttttgttgtataacttttaacacacaaaaatagtattttatcaacaacaaaaaaaaaaccttcaacaaaaatgtgaggtatgatcttatgagttatgaccaacgtaaaatgaagtaaaagacaaattaataaatacttaagtgtattgaagcatgtgcaagtatgggccacttgattaggaatcgaagttggtctaaccgcaacatttgcatgtggccacaaccttcaaagtcccttgatcttattatatcattaatgatccattcacatttttttcttttctaactgtttaattttgttgtccacaaacatattttacaatacatatataaatctggccgcaacaaaaaataaaataaatatatcttactctgctcaaggttaacggtggcatacattgttgactttgcttctagttatccacacaagtcacccatttggccatttctaaatttgatgttccatttcgttggagaaaaaaacccctatgtgtgtattaatgtatgaaagaataccaaaagataataaggatattcattgggatttaacgagaaataaaaggcacaattctctcgcaaattggtcaaaaatacgaataaataaatcaactaaatacccaaaaaggtgaaagaattagagacaccccaatgtacttcatatagtaaacatttaaatatgattatcgcttggcacaattattcactcgagtacccctatatatacccattccttccatttgtagattccatattattcacgattctcatcaaatcatctccgatactcacaaccgaaataactaacccctcctcaacaaaaaacaacaaaacatgtacactccatcatacttaaaatattcaataatctcaattatatccgtattattcctccaaggaactcatggagacgacggaggttggcaaggtggtcacgccacgttttacggcggcgaagatgcttccggcaccatgggtacgtatgaccaatcccaatatctaaaaatgcataagttagctaaattgtctctttatccacgtgtaagttagctaacaagtggcatgcacaaatcaggcggagcttgtggctatggaaatttgtatggccaaggttacgggacgaacacggcggctttaagtacggctctattcaacaacggactcacgtgtggcgcgtgctatgagatgaagtgtaacgatgacccgaggtggtgtctcgggtcaaccatcaccgtcacagctacaaacttttgcccacctaaccctggcctctccaacgataatggaggttggtgcaatcctcctcttcagcatttcgacctcgccgagccagcttttcttcagatcgctcagtatcgtgccggcattgttcctgtctctttccgaaggtccgtttacttttctttaaacttgggacgctaagtgataagattgcgaaaagacaattaactgacagtttttaacatgtagtcccaatccatatatagtagtgtttactattaacaaattttcaaaacattaaaattgtaggtttatttgggaaaagaaaaacacacttttttttaacaaaaccaacctttaccttataaatttactagtccgaaactaatagacaagtcttttgtagctagtagctaccatagttaaaacttaatacccaacaaagaatttgttcctaattaatctctatttaatgagcttatcttaactaaatagtatatgttttttgggtcttaaatgggatatagcatttttctgataatgtttaacactaaaaccacactattaagcaatagcctatgcaagatcttgtatgtataagtccatgtttcttaaataatggcttaattttgtcggtgtttttacgtgattattgcagagtaccatgtatgaagaaaggaggaataaggtttacgatcaacggacactcatacttcaacctcgttctgatctccaacgtaggaggagcaggagacgtacacgccgtctcaatcaaaggctcaaaaacacagtcgtggcaagcgatgtctagaaactggggacaaaactggcagagcaattcatacatgaacgaccaaagcctttccttccaggtaacgaccagcgatggtcgcacactcgttagcaacgacgtggctccttctaattggcagttcggacaaacctaccaaggtggtcagttctgatccaaaccatcatccacatctctctgttttgggtgctgacgtggctgcatattgctgaggtggctcgtaagcacccgcttaattagcttagccttttttttctcttatttacgaattattgcttcaatggttgtattttcattgtgcctacaaaaaagcaaggtttttttacatgtttattggatttttttcttctctttataagccaatatcgacgcccaaaagaatgaaattacacatgaattgatttaataatttcgaattttatttaatcaactacaaaggtttttttttttttccttacacaaagtgtttatatacacgattataaactatccggacaaaccggttcaccaaacgaaaatcaaatgtgtaaaccacattatcatctctaatagcaaccccgccaaaaataagccattgtatcttgtagtaaacttgtatgattgtatccatcacatcacaatttgatgtttatgaaatctttgagtgctttctcatctaatcaggcccataagtaggccattatcatcactattagtaatgggccaaaaccccgtgaatttggtcacgcacgactcaaatgagacgacaatggttgacctctggactctcgagtctccctggattactacactcgagctcgacgatccttagaccaacttcgtcttcttcctcgagagcttctctgatctccttcgccgttaataatttccacacgatcgcttcttcttcgtctactctctcttctcgcttgacaactgtatcatcgtccatg

SEQ ID NO: 11191 - DNA, 3000 bp, Unknown; identical to SEQ ID NO: 11178
  misc_feature (1)..( 3000): cDNA_ID_1581498_gDNA_ID_2214482_Annot_ID_133297 3000 nt of promoter + ATG

SEQ ID NO: 11192 - DNA, 926 bp, Unknown; identical to SEQ ID NO: 11177
  misc_feature (1)..( 926): cDNA_ID_3593818_gDNA_ID_2214482_Annot_ID_133298 3000 nt of promoter + ATG

SEQ ID NO: 11193 - DNA, 3000 bp, Unknown; identical to SEQ ID NO: 11174
  misc_feature (1)..( 3000): cDNA_ID_3039172_gDNA_ID_2214482_Annot_ID_183383 3000 nt of promoter + ATG

SEQ ID NO: 11194 - DNA, 1542 bp, Unknown
  misc_feature (1)..( 1542): cDNA_ID_3435695_gDNA_ID_2214483_Annot_ID_133299 3000 nt of promoter + ATG
aagcttatgtcaaaaatatttaattaaaatatatgtaatttatatgttgattgagttatgagtatcaagtaaaaaccctaatccgttattaaaatatcaatgattataacgtatttataaacgaaaaaaaaaagaacatctagaattttcgatatttgatcctcaagttaaacttggaaaaatttggatgtatgaaatattttgtcgtccacttatacaataaagtatgaaacatggatgcatgaaggctagacatccaatgtctaaaaatactatatataatgcttttggtagggtcttttctttatcatgtctcacttctgtttctatccctcattttaaatagccaatataatttcactctttactataaaattattatataaacatcattttgattgaactacctaaaaggaagaaacgtataggaatttttggagcctcaagattgtaataatgtctcatagtttgacttgcaaaagctaaattaaacgcctaaatcattaccattaaataaatgaacttttgtacgcaattgattcagacacaaggaccgaccaattcgaaaacaatgaatggatatgattcatccttatgaaagcttgacaacaaactcggttttggctggttaacctagactcggtttatttaaaccagacaataatttctttcgtcgtcgttttatttgaataggtgcgtcaaaaataaaagctgaaattcttggttgcaaaagcccaacaggcctgtggagatagctttttagattgattaaatgggccgaattgggctgacacatgacgagaatgtggctatagaaattgttagtgagagggtccgggtccaaaaatgttgcagaagtgatatagtatttatttaattaaaaacatattattcgacgtatttttaacgctcactggatttataagtagagattttttgtgtctcacaaaaacaaaaaaatcatcgtgaaacgttcgaaggccattttctttggacgaccatcggcgttaaggagagagcttagatctcgtgccgtcgtgcgacgttgttttccggtacgtttattcctgttgattccttctctgtctctctcgattcactgctacttctgtttggattcctttcgcgcgatctctggatccgtgcgttattcattggctcgtcgttttcagatctgttgcgtttcttctgttttctgttatgagtggatgcgttttcttgtgattcgcttgtttgtaatgctggatctgtatctgcgtcgtgggaattcaaagtgatagtagttgatattttttccagatcaggcatgttctcgtataatcaggtctaatggttgatgattctgcggaattatagatctaagatcttgattgatttagatttgaggatatgaatgagattcgtaggtccacaaaggtcttgttatctctgctgctagatagatgattatccaattgcgtttcgtagttatttttatggattcaaggaattgcgtgtaattgagagttttactctgttttgtgaacaggcttgatcaaaatg

SEQ ID NO: 11195 - DNA, 3000 bp, Unknown
  misc_feature (1)..( 3000): cDNA_ID_2701949_gDNA_ID_2214483_Annot_ID_133300 3000 nt of
atagggcaatagataagactctctaaaaaggaagatggctaatgaatattaaatcatcttgtatttatatcccttattgaccgatccgtatttaggtcatgaggtcgtgtttacatcgccttcagcaaatgaatcttttttctagattctctttatttttatgttttattaacacgttcatttttattcacaactttgatcgtaaaatgcatgataatagataacaaactcgtaatatatcgaggagagtaagcagtatctataaatatttagttgtgtgcatggcgttaaaaggatgacgtatagatgatgacgcagaggagattcctctgaagagagttcgaactttaaactttaataaaacaaagcatgtggtacaaaactcgaaaggcatgatgagaccataggacgtccatgttttagcatctatatatcatttttccgtcaacccacctatagagaagtatacataaaattaaatgtatggtttaataatttggagatccattttctggttgatgttcaatgtatcaaatagtctttgataaagcatctgatatatttgatattccctctaaagaaacatcacataatcaaacttcaaactcaaaagaactccacatcaatatttttgttttgattaatggttagaaagtaatgactcagtcaattcagaatcctgaaacgtataaaccaatattgagttcgaacttccaattcttacgttgtatacattttggtgtataaaaaatgaaaggaatgcattttcagcctttaaatttatgcatagaatataataataagtttctaactaaaggtcaaatcatttaattgtatttaacatttttgacacaactattttatcttgcaagaaataaatatgtaaactggaaaagtagttgagaaaacaaaatagttatttttatgccatgagaaggatgtgtgtaaaataagttagaaaatgctctaagaaaagagaaacataaaaggatttttaagaagtcttacagttgacaatatgaaaactttagtaaaagtctaccataaaccgtaaaaaaaatgaaattttaattctggaagtaaatgtaatgcatgttgcctaaactcggacactatgtggtagattttgattggtcggaatatatgatctccgaaaagcaacaatgtcaaagctgcgtgaagaaaaaataagctagaaagtaaattatatacatgtacaataatggaaacatatgaataatattaaggagccaaaatcaaaaatgaccggcgatgattaaggtaataaaagtcaaagctcaacacaaccgacgcttttggcaggaaattcgaagacatatggtaagagtcccactttctcattattaatctcttttctttgtcaaaatttgcaacacaaaacacgtttagagtcaatgtcaacatcaggattcagcagtatggtatacggtttgaagagaagcgagaggtaagtgtctgtgtagcaaatgcttgaatctgcttcttggcatctacaaactacaaagtatcaaaaacatatgaataatcatataataaaatattaattgcaccatgccatcattggcttgagactcaagccttgagtgttagaatcataaatagttttgttacctttttggcatttggtgaaatccaacggtgtttgcaaacactaagagtcaagcaaactccaataacaaaaacataatgatccaagcagtgctgtagaaatagttacataaaagttcatacaaaagtttcatactatggtgacaaatgaaacctatagagacttaggctttattgggcccaatgtttgtgagctacgagcccaaatcaagtgaaagataatgaaactacaaaaaatgtaattaaataaagctctttgtagatttagctggacaaattttttaaaaaatcaatgaaagttaaaaaggacttgtggaaaatgtgacgcgagacatttctaccgacatctgagaagaagtgactgtatatccaataaggaaagagaaaggaattggatcttcgatggagcccacgagtgttcactacgcaccatggaattggttcatatggcccattaagagattaatgggcccaaatcagatggcgcgtgtatctcacggtgattcttcacccaggtaaattgctaatgcggtgtctatgttgtcaaatctgtcgttctcaatgagaaatctccatttttcacgtggttaattttcctgtttataattttttttttttttttaaagtagtatcacaataattaattggaaatgaagggcatggaattgaagttatctaacttccttttaaattttcagaaactgcaattttatttagattcaataatcttttaaaattaggttgtaattattagtgcctcatcagtagttagaaaagtaacaagaattgaaattttcgacttttaaaagtgtttctctttagtggttatggaaaatgagatctttgtagatagagattactccttctgataattcttcaatacagtgttatctacactgtttctttcccgtatggtttcagtatcttgttaaaatacattagcaaatgactttaataaattagcaaaaataagtatgacttagaaaaaaaaaggtgtgtattaaactaaaatgcaagaaagaggactagggaagtgtacaatgcacctcgtagcagggaataacatgttctgatttcccacaaaacaccgtagctagctagctgcttctagcgttttctccgtataaccgtttggtttaaatttctccggtacggtcccactttccagaactttcacggtttcaccaaacgccaatcaccaccgtctgttctcctacttacacgtgtacgtatcagatttcacgatcgtaacccatccaagcgcctatattaaccctgtttatcccgctaccgtaagtcctcatcagcaaacacaaacacacgactagataaactctaaatcctcacagcagatcacgtgctaatcacatg

SEQ ID NO: 11196 - DNA, 3000 bp, Unknown
  misc_feature (1)..( 3000): cDNA_ID_2701913_gDNA_ID_2214483_Annot_ID_133301 3000 nt of promoter + ATG
gatcggtcaataagggatataaatacaagatgatttaatattcattagccatcttcctttttagagagtcttatctattgccctataatatttgatttaaactgtttactaagattttgcgattgaccttatagagattttttgttggaggctttatgtgttatgtcgcatcaaatcggaattagacataaccagatgacaaaaaagagagcctttgcgtatgaatatgacagaattttgagcgtgtaagttaaaaagacgagattgtgggttctacttttggtagttctgctgattttgatagatcgcaaacgtctttttatgttgatttttcatctttttgttgattatttatctctttctttttgtgctttcctttttaaaactatagatctacttgtccggtgagacgatcgtatatataggatagtacacgttttggcatcaaacttgatttcctattctcgccaagcagttttaatttcttgtcttatcaaacaggctttaagattgttcttgagtaatatgcaatttagcagtagaaaaaaacagtgaaatattccttcaactcataaatcaatataattgacacaaaagaccggtcttatttcatgtcaatagaaaatggtattttctctcgtggtttgttacttttctgttcttataaggctaacctctagtggggatgcaaagttctagatttagacttgttcgttagatgactaggtggttagaatttagattcgcgtcgttgtttactgtgttcgggataatcgtttttagttgggatttgtcttcgcgggttcatctatcctttgctctactctgtttgtggttaaagattctctagtccgcgatcttcgagctcttatttccgcgagttttgctctcctccgactttcatgttgatctcatgagcttatcttcttgattttagtatattttcttgtggtcccatgtatcgggcttttgttttcggggatttctttattttctgccggctatgttgtacgaaaacgcattccaaaactgtatttcacccatgtattatataatgaaaatctttcagttaaaaaaaaaaaaaaaaaaaaaaaaaactagcttatttgggttgtcgtctatatcacatatctaatcgatgtaacaattcactgaatcgggtgttacaaataacatttgttttcttcactaaaagtataagatactggtacaacgcgaaatctaacctatattcgaatcaaatgacacgtcatcacttgggtgtctatttgtccacagttgaaagttataagaagcagacaagtgtctcataaagacatcgagatctgattcggttctcaggtacatacagttaatcgggagtgttgctttcccctagaactatggaggctactatttaagtgtcgttgtgtaacaaaaatcctgtgtttacttgcattacttaaactcctttactttaatagttttatatatgttttcgacctccctttttcgacggagtggatcgctatgacatgtaggcatctgattgtatttgctaatctgtttttgttagtatgttaaatttttaacccaatatatgtttatagtgcttatatattcttactttagttacatatgaatatatgatcattgatgaattaaacaatataatgtaataattaaatttgatttccctgatcgaattataatttatatgttttgtaatacgaatcaattaaaatattttcttgttacacattttgataaaatgtcgtagaacgttacttaaaagtaatgatgcattaacaaaatgtacaacatatattataaaagttatcatcaatattataggcattcgactttcagaatgtgtatcaataatcgaagtagtaatggaacgattattgaaagtatactacggtctctctttacttcatcgtggattctcattaaaaacaaaagtactttctctaccggcaactattgaaagtatattattgtttttaataactttgatagtgtttcttaattattattcccaacgtacgataaaattttgtttgataaaactcacaaaagtttagtatatttctgtaaatatatgcatagaagtcatagtgattgacagaggaaagacgtctctttgactactcttcaatcgaaaacaaaatgtgctaaaatttcaaaagcaaagtccctaaactcgcctaactccatttctcatttgactttgccttaaatgtcaatagtcctatgttatttagctacattcaaaattgggaattaagaattattttagactccatatacttagaaacgaatccgtattggaaactaatttccatttagtaatagtatttaagtattattatgcttaccgagtagcatgtagtagtttcttaatgttagctaatttcaaagcaaacgacgaatattaaatcgtgattgcacacaacaagaagtgattaataaatcattaatttcgcccatagtaatcactaaccagagtaattttgaacaagactaaggatgtacaataacttacgtctgcgatactgtgtggtaataaatatagaaactttatgaaatagaactctcttaccaaagaaagaaaaagcaagagtgcgtgttactatacatctgaacaagtcaaagggtcaaaccttagtattttaaaattacacaaacaattgaccaaatggagagctaattatgtttagcataatttactatatagttgcaaaattccactttagaaacagaataaaaaaataaaaattgaacataacacttatgccgtgttccagtcactcttcaacattctactcattttcaaatatcctttttataaaatactacttttaaaattatttgattcttatgttccttcactatatatatataaatatcgcacattgcttaatcacttcaaatctaatccacaaaaccattcacaccatctcatcttctttctctctatctcttttcctttcctcatttaaagtttctttataagaa

SEQ ID NO: 11197 - DNA, 3000 bp, Unknown
  misc_feature (1)..( 3000): cDNA_ID_1807651_gDNA_ID_2214483_Annot_ID_133303 3000 nt of promoter + ATG
aaaaattgaacataacacttatgccgtgttccagtcactcttcaacattctactcattttcaaatatcctttttataaaatactacttttaaaattatttgattcttatgttccttcactatatatatataaatatcgcacattgcttaatcacttcaaatctaatccacaaaaccattcacaccatctcatcttctttctctctatctcttttcctttcctcatttaaagtttctttataagaaatggaagattacgagcgaataaactcaaactctccaacacatgaagaagattctgatgtacggaaaggtccatggaccgaggaagaagatgcaatcctagtcaacttcgtctctatccatggcgatgctcgttggaaccacatcgctcgttcctctggtatcatcaaaacatcaatctctaaatatacatatacacaaaggctttatatatagataaacttatatatattttactcatatatgtgcagggctaaagcgaactggtaagagttgtagattaagatggcttaattacttacgtccagatgttagaagaggcaacatcactctcgaagaacaatttatgatcctcaaactccattctctttggggcaataggtacacactatatatctcaaatgttaatattttgctattctatatgttactagttaagtatgttattaatatatgtcttttttttcaattgaatatataaggtggtcgaagattgcgcaatatctaccgggaagaacagataatgaaataaagaattattggagaactcgagtccaaaagcaagccaaacacctaagatgcgatgttaacagtaatcttttcaaggagactatgagaaatgtttggatgccgagattagtggaacgaatcaacgcccaatcattacccaccacgtgtgaacaagtggagtcaatgatcaccgacccaagtcaaccagttaacgaaccgagtccggtcgagccgggtttcgttcaattcagccagaatcatcatcagcaattcgtaccggctacggaattgtcagcaacgtcttcgaattctccggctgagacgttttcggacgttcgaggtggggtggtgaacgggtcaggttatgatccgtcgggtcaaacgggtttcggagagttcaacgattggggctgtgttggtggggacaacatgtggactgacgaggagagtttttggttcttgcaggaccagttctgccccgatacgacatcgtattcgtataattaaggaaatatacgattactatacgtaacgaggaattcaattgcgtcacgtttggtgtaatattcattcgtgcgtgatgccaattttagatacggccttggtatacgaatcttgacttaattattatcttttcttttcctctcttgttttaatcccctgattaaattaagatttgatcatcagacgaggatatttgtgattcactgatttgtgatattgatatatgtgaattatttgatataacgttttaaaaaccaacaaaaaaaaaaaatcattccaaggaaaagttcttaattttgatactcgaaaagagcgtagactgactcgaatcagttcatattttctttggttcgttttatttacgacaaaattcactaacaaaaattaaaaaacgacaaaacgaaaatatgactaaatttatttttttgacagttaaccactgattattggttcaaattgtcacaacacatgatttatcttgatagaaatttagtagtccagaatgctgcatggttgatcctaagaaaaacaaatcatgcaaggaccaaggacttacattacttaattatacttaaacgctttataaaattcacatcaagtgattcctgacgatgatccagtaaaacccttcatccatatcgttgcttccacacgtagtttcgataataaactcgtgattatcgccaagatgcgatgtatcaaccactgaaattctcttccttgtcacgttttcgtctccgacgatatttctgtaaagtttcgcagcagacgaagaagaatccgatgtctccggctcgtctttaggcgtaagacggcaactcatcagtgctctaaggagcatcactatcgacgccatgtgtctctgacgtcgtaggatgctttagttggctttatctcgtatctaatcactttcaacatttaagacacacacaaaacatatgtatatatattgtgtgcatgcgtttgtgtgtgagcttgtgtcagtgtgtgtaatagtcttaacaaccattgtcgagtgttgaaagttggaacaagacagcacaaggaggaagccatcatgcatcgaggggatatctagttttggtaagttttaatagtgaatatactaaatggcccttgaccgattgccaacatagagtctacatcagtagcgaatcaaaggtattatggtctttactcatggttttgacgtggaagagacaacaaatagaatagttcatcttcagcaagaaacaatgagaggagaagagagaattttgaaaaaggagctttaagaaaaaagtctgatctaatccttttatcggtcaacgattgttggacaaccttctagattcctcttcttttttgggtaacttgagcattttggtcagtgaacctgtaaacaaatatttagtgtttcttttgaaaattatgtttttgtttatataataatccaatagtataagtttctttctagtttctacagcctaaaatttgattaatttataatcaaattaaccacttttaaagttttgatttttttggatggtaacattagaaacgatgacatattaacgaaacttgtagctacacataaactgctgaccgatcccaaaggttgaaagattctttggcgctaaaaaatccccagttcccaaatcggcgtcctcgtttgaaaccctaattcctgaatcgaagcagatcctgatcgaatcgaaggtgttcgaatgatagctacccagtaaattcagaaccctaattaaca

SEQ ID NO: 11198 - DNA, 3000 bp, Unknown
  misc_feature (1)..( 3000): cDNA_ID_2701905_gDNA_ID_2214483_Annot_ID_133304 3000 nt of promoter + ATG
cttcttctctttcccttttctacttggttatccagtttatctgattatttctggtgaatctgtcaaattttcagcttcatgtatacttgagaacctatggacttgaacaaatggtccaagctgcaagctctgctgttggtcttcgaacgatcaagcgggttgagcagactctgcaagatctcggggtttgtctttgcttcttgttctgtttaactctttctatttgtctatctcatttgcttatctttccccattgattgatgatgagacttaactaatgttataaaaggcacccgtactgaagctagctttgaatgtgttctatgtaattagttgggattttggttcgggtagaggctagtaggttcttgtcagtttatttgattgtagccactcttaagatttactaaatggattttttgagtatatagagttttctgtttacaggttaatttaaagccaaaggttcctaccaaaactgtatgcgatgagcatcttgagctaagaaaagaaatattaacactactgaatcttcagaagcaggtaaaccatacaatacaagtcttatctcacatagattcacaaatatacagctatttgtttatttaacttgttgccaaaacatggtggggtcgtaacttcagctgcaatataaggaatcagaaggttcatcacatcgtgaagggtcgtatgccgcaatgccagacactccaaaggtgagcaacaaactttgtttattggttctcgctacagtttcatcttcctgttgatctctttaatttctatatatatttgatcaggatcgtgttttcgcaccggacccattcagttttggaggtacattatttccttatcttgttggtttcagcattgtatgcactacttaaccatctctaagttcattttgtgtgtttatttcagctgaaagaccaatcaagaaggaacaaaaacgcaaggtggtgcacatcagagtttgctcttctttatttttcgtaccaattcctccgaaaatcctttgcatctacatgtaaaacttgaatcttaattaaaatatgtttgggaatcctgcagggtcctggaagacaagcagatactccttcaccagctcataagcgtccgagaaagttgaaagcctctgatctctaaaatctctctactcggtgcatactgactcgcaatttcatgtgtatgtatttgcctttttccggtgatttccgcaatgttttcagttcttaaattatttctgatctctaaaatctctctacttgtactcagacaccgcactatcttgtcaagccaattagagaaattgagaaaatgttgcacattatatttatgactagtaagaattattacatctaaagacattttcgaaaatgttaaattacaaatggttgattggtatgataaagaaaagaataaaaattaattagatagaagagagagtaaactatcgaaataagaaacacaatatcaggaggtggaaggcgaggagacacattcataagaatgtagataacagggagcttgaggtgggtagagacagagaagaagacagttgacaacaattgttgagtcttgaaggagtctcgctacatacatgtaaagaaaaacaaggattactactttatttcttcaaacttatagattcttctattgataggcaaaaatcttagcttcaatgtgtttatatgtatgccaaaactccaaccaaagaaagaatgtccatactttttctctcaacttagcaataagtcccattatacagtgggatttaagattactgaaattttcaacacttagaaatcttgagtttttagtatactaccaattagaccaaaaaataactaaatttgttccacatgtgacagaggtatactagttattataatcaatatcattatcaatattaagcacaactacattcgaatgactaacagagattcctacgaaaaaacaataatctgaagcaatagaagtaagagaagcaactatacatttggaatcgaatagccgatatgggaatccgccacagattctggagaagaatttgcagtttgtcggagagagcttttgattgaagaaatcagacaaaagttttggaggagagatctcgaaccggaacaaaaagtttacattagtattgaaattagaactaatttgcggttcggtttacactgggctaaagaggaaaaaaaaaaattcacgcgatggtgattttgaagacaactgcgttgataaaaaaaggcatgatttcaaaaggtgaacccctacagaattgctctcacgctctcaacgcgcactttgtgcgagtagatctgaaatacagccttgtgattggctaaaaaactctaaaaaaatagaaatagtagacatgttgctagcttatgttattatttagcttttctacaaaacgccgtcgttttttatttcgatcgtttcagcttttggcattgatccgaaccaatcggttcaactggctaagtctatccacaggtttgtataaaaaatctcatttggtcatgaaattaagcactaaatttatattaattaatcatttaatgcttatagacaaattctatttcatatttctaacgaatcagacctaattgtacgaaataaattattggttctgaaaatatcaattgggaaattaaaacccggttcaatttgaaaccggaaacaagactagctacgcctggaaactctcacacagagtcacaggagaagctcccgcgtctgcaaggaacggataaagtctctctctttctcactctctctcaatgaagaagaagatgctgacgagtcccagtaacgcacttcacagtagtactccacagttctggccagttcgccggagcagactttgccgttcccggaatttccctcgttttcactccggcgaacgcagcagcggcggaggaggaaaattgtgctcgctctctcttctctccggaagtggcgccagtaaattcagtgtcagagctctagttaggcctg

SEQ ID NO: 11199 - DNA, 3000 bp, Unknown
  misc_feature (1)..( 3000): cDNA_ID_2701901_gDNA_ID_2214483_Annot_ID_133305 3000 nt of promoter + ATG
aaattccattcggaaatagagaggtaatttcttcataaagctgtacccttttgatttcattggttgtttcatctggtcaaatttgaattcggagatgattggtaggatttgagacctttcgctctatagtagagaagcaaagctcgctgctttagatgtatgtgttgaacttgttttagcttcttcttaagtttttcatctttttctttctttttgtctactgtgtagattttagttgagactggtctcatggggagacaagcaagttctgcagtcacggtgacagatggagaaactgtaagtgtgctgtttcattcaatttccaaaactttcaactttttttcttagttcctcgagtttgtattcttcagtttagcttctgttacatgcttatctcttaatcggctttgtttcattatctaatctgtctacttgtcattgtagattgtcttcacatccgtttgtctagctgatgttccgagtgagccatcagattttcttcccctttatgttcactatcaggagcgattctcagctgtaggtcgaactaggtaagcgtttttcaattttggagtctcttgctgtaagaagaccatgtcattgcctaaatgatgatctaaatggaccttcttgtggtacagtggtggattttttaagcgagaagggagaaccaaagatcacgaggtatgtactaatgctgtttttggtttcgtctatttcgccatccttcttaacatgttgatttttatgcaggttctgatttgtaggttacttttctttgccttcctgcagcctcctacatcaccggacaggaagagctaaaagcatgcttaaatgattggaaatccaatggtttagtggtgtctggtttggttagagatcagagggagaagttgattcaggaagtgtcttccacgttcagtggcaagctcaacattcttgtaagttcccttctcctgcaaaatgcttgttaaaactgactctagttttttctcagcattgtgatcagaatcgtcattgatcttgaaatagtttattgcattagctctgcatccttataagtttattcagagagacgggagtcgccattagctcaaggatcagggaataatatgggtggttctgtgatgaatggtaatactcctccatcactagactgtcttttatctccaaaatccaaatggatcctcttaattaatgatgagtttctacatcatgaaaattgatcatgtcatggtgtttccagctaatgaatctgtttcacctgtaacctcttccccggttataacttcaacaccgttggaacatacagaggctggaactaaaggaaagacggtccccaagaagacacttcagccaatggaaatgaatcaactcgagagaaggtatcactttaacataattgtcattatttttatttaactctgagatggttcttctttgtgtttaacactaatatgcacagatgcgtgagaagcattatagtgaagataacagtcgtaagaggaaaagaggagaactggagcataattcggacctcaacgagactggtatgtcttaactctcattcgaccttctgaaattcatgatcagcttgcaatgttacaaaggctgagttccattatacgagtaataaatattactatactaaagcaatttcattaattatcttgttaatttgtgcatgcgttgatctccagtgctaccctctgattggactcccgatcctgtgaagaattttgctgctgatgatgatgatgaggaaaccaaagcaaaggatgcaacaatggttctgccttttgtgaagaagtcaccggtttggaagatatatgaatcaatggaggtcttcaaaagagtaccacaaagtcctcatttcagcccattgtttgaagcaaaagaagatttccgtgaaggttttgctttgggtatgatggtgactttttctggggtattagaaaaagtagaagatctgaaaaccgacgttcccatacgccaactaaatagccttaaagactcatttaccgagctagagaagcatggattcacggtcacagcgcctttatctcggatcgccaagctgttagctctcaaagatagacaactaaaaatattggaggaactaaaagttttcgacaaagagatgaaagatgaatctagcaaaaagcataaagctgagcaagagtttggtgagatggaacgcaagattcttgaagtgaaaaacaaggttctggagctgcagaagcaagaagcggctctggaaaaacagaaggatgcaacctatgaaaagatatgtaaaatggagtcacgtgcaagagatcttggtgtagagcttgaagatgtggagtgagttggagacaattctgtcagctccctggtaagttaagaaaaaaaacaaaactataatgatctattctgactcaaaagatttatctgagttcgttgttcgttataggttatgatgtttagcttttaatcttgaagccattagcttaacttcattttcctttttgtggatttcaggtgaaaaaacaaaacaaagaaggaacaaaagcgtaaagggtttataggatcaagatcagagtcaaggagagaagctgacgtggcaaagacttgtgagtgattaagtcaaagagagaagctgacgtggcaaagaaaaatgaagactgaataattaattaattaatatcagtgagagcagataaaaacaattaattaagatgggctcgttaatttaggcccaatagatttctttgtaactttcatcgcgccaaaaaaatgaagaattattcattaatataaagtaattaattaaggagtatgatatgacgacttctcagattcctatgtaaagctaatccattttcagaaacagagtttgggtttctctccgctttagggttttctgtggaagaagaaaaaggcgggggttttctctctctttgttctgaggtttttttttttttaatgtaatcagagtaacgacattggtagtatctgggg

SEQ ID NO: 11200 - DNA, 3000 bp, Unknown
  misc_feature (1)..( 3000): cDNA_ID_1807232_gDNA_ID_2214483_Annot_ID_133306 3000 nt of promoter + ATG
aggttggaaaaatttaatgatacattgtacgttttctaggttttgttctaaatgctcataaacctacttggatttggaaataaatgagagcttacatatatagaacaatactctatttccacaaaaattatttgctactcatatacaaatgtaggtttagaaaaaatccactttagcaaaaagagatgggaaattaatgaaaattcacttgactttctttgttttgtgagcaattttcgatttcaaagtaatggtcggacttagactttttcctgttcttttttgctgacttaataataagctgaaacttaacagttagaagttggaacaagatataaataaaaaagctaagttgtcaaacataaagttgaaaatgatttggtgatgtcaattaaataaaaagttgaaaactaatcatttgtatttgaccggcggttacttggaataagactaagaattattgtactttctatttaatgggtttgctaagttttttatcagatcattttaagcaaaatatcgataacttttcgaagagattagttgaaaatactaagcattatatatatttaaatatgatggatcagtatatatagttttgaaaatcacactgcaggatccgttggaattggtggctgagaacttttatgatcttcttaaaattttaatccgtaaataaattatacgagttggattggttcgcgtcttctaatgcgtattgacatctataataaaagctatcagaaaagttgctgatctttttctgtatcttattaaatatgtagacccgagcagagaaatgtggatcaattaataaatatcatgtacggatgaacaagagagaagaaaaaagtataataatactatagagcgaaaagtattgcatgatggagaaactctcaacaatttcaaacatgaacgacttcttacaaaacaatgtatctttagttgtcacaatctttgaaattctacaaatagagaagacggaaaaagatgaaaatgaaattagtgtttttctttggcaaggtccttggatctcttaaaagtgattagatcaacggtaatgttttagatatcctacatgtgcattgattcgataaaagcatttaaatagtgaatattacaaacaaaaatagatacttacatcatgaaatagaaacaaaatcaaactgggttgctacttaccagtaatcacgtgacggtaactggctaactgcaatagtatatccaaaacaactttaagaaatggatacgaaatgttttagttttgggaaaatgtcaaataaagatttcgtcacaaatccatcaatccagtatagaacacttttatcaaaatgattttgcaaattgattcttagagtacgatacaagttgcaaactggaaaaataattttgcagttgcaacaaataataataaatgattgtgcaaattgattctcaaattaagtaggaaacaagttgtagtagatatagactgtttttacatgatgttaattccaaaaggattcattgccatacaaatggttttctcatagaggacgtaatatcaattaatggaaaatagtagttgaagatttatagaagaaaaaaaaaactttccgcaaacaacactatatatatatatattggatcaaaaataaaaagagttaaatgaaagaaatacacagacctggcctgtatcaaccaactcatatattattatataaaccaacatccatttctcagctcctcatcaaattatcttctttctctttctctctgatcatttccaaattatttctaagctaagaaaatctttaaaaataacaaagcttctaaaataataatccgacctaccggattcaaaccattgatctgaagatcatctataaaccagtccttgatctataaactaaaataaggtcggttgcttaatctttgttacccttttatttttgtggttataattatattatcttcattttgtttccttttatgattaatcgatcatatcaggatagatatttcgttaagtttatagtttaaatccagaattttatgtttagaaaagagaatgggaagagttgaagtgtttaacgtctatgaatattcctcacgtcaagaaaaaagaaaaaaaactatgaatggtcctctctcgatgtccttacattggttagagagcgttgcaactacaatacatacatcactttcatcatatttattgtctttttcagaggttttcatatttcgactgaattcttcaatttgcaatattatgaataatagagaagatgatgaaaaaaggataaagagagtgaagccagggttatgcatgctctcacgtttagggcgtgactctaaactagcgatttagtttacggtattattaaaaataatattagtcacataatatttgtaattttagtcgaaattaatgacagaaaaatactagacgctaggatttgtacttccttgaatccttggaaaatatacgtatgtaattaatattattcattatcaaaccacaaatacggaaaccaagtttgtgtcaaatccaaatggagtagtttggtatcttaggttgttgtttatcataaatgagaaactttggggttgcactcgatcggtatggttaggtggaccggactggtgacaattaatgccattgatctataactgttagattataatctaaaggttccattgcagaacaattcatcaaactttaatatctatgtatttatgtatgttcccaactcacagaatttcacggaattgcaaaactatgataaattctgctaccttaatgaatacactatgaacttgactaaaaaaacaagaataaagtatgataaattccctcattttatatttctcttatctatttcacatttttgcttgaaaatttgtaccattaatctctctattcggcagtgttaaattttattatttaactccgtcggttggattcattttaaatttctcttcagggaagaaaaaaacaagagagagaaatagaga

SEQ ID NO: 11201 - DNA, 2063 bp, Unknown
  misc_feature (1)..( 2063): cDNA_ID_3039207_gDNA_ID_2214483_Annot_ID_183438 3000 nt of promoter + ATG
tgagaataggaaacaacaatacgtaagagttttaataagcaaaaaaaaaaatcttatgtgtgagaagacagatacaccccttacttgttgttgcattttcttaaaccgcgtgagaattataggggtataattgactctttagcggctgggccgacaaatagatcggcttaatttttgttgttttcttacaaattcatatataacctttttaccttcagattttaactggtgataccgtgccgatgcatttttcttgttaaaatctacttttctgaaccgccaaaaatatatataagtgaacgaattcaaatttgcaaaataacacagaagagcatcaaacaagcacactcgtatcatttactttagattaatcaatttaatgctagaagataaacgattttgaattcattcacttaacttcacaaattttgttatcaaacaataaaattgtatacatttcaggtgtttttttttttgtcaaattatttagttcacttattccttaatatatttactgtttctcatcaccttgaggctggccacaaactggttctattctatatgtcaaatttgtacatcggcccatgcttgataaagcccattacactgcatcaacataattacatgggcttgtttgttgttacccatcttgttgaaaccaaagattaattcccataccagcaaggcagcaattttaaaaccgtctaagaaactctcgatcaattcatctttctctcggctcaacgtcgttttgacacatacatctccacatccacaaaaaaataataaggaacgtatgcgagtgacctaagatcatctcagcctcatctaaacttaattgagttttttattatcaatttcacgaaactgcaaatgtaatcgaaccaaacacattatgaaacatatgttgtgtattgtactattcatattcatttatcacattacaatcatcaaccaaaccaaaaacacaaacataacaacaagggacaagaagaacaaacattgatccatacctaaagtttcataattcgaacatcaaaaacatattttttaattatcataagtacgacactcatcagtctcaggattatcattgcaatactcttccaaaggatcggagccaccagctttcttcttgtccctagcatgactcgccgccgcactcagctcctccacctcgtcccaagccgctacacactccccgctcaccggatcatcagcgcatgtctccttagcttcttgtatactcttctccaccttctccgatatctctccttccgatgtagccttaaccacaaccatccgcttcatcgaaccgaatttccacgggtaattcaaccggaccggacctaatacacgagccacaggtcgaacgaccactcgtggagtcgcgacgttgaggccagctgcagctatggttgtcatcgtcggaggattttgatggaggagaaaagttttttgatgtgaagagatgaagaagataaaatatactcgttcacgttattaaactctgtgaacacaatcctcttatcttctaagaaccaagcatattttgccacgtgtacttagattttttcacaaaaagtagtattctaccaatttgagaaacataagtttttccccggaatatttattttatcagccgttgaacattttttcttgaaaattatagaagctttttttttaatttttgactgaaataataaaaatttgttatcattttctcttctgtaattttcatagacataaacttctcatgaaaagtagcataataaattaataattactatatttttgagtatttcattttgttgagaaaaagggggaggacgactgacttataatgggccatattccaggaaataagcgctagttgggccatagataaggcccacataagcagtgaccactaccgatatttttcctgatattttttgttttcctggttaaaaatacatacagatacagtcgtcgttttgattagtgaaccgtcgaatagaaaaagagagaatcattcagagcactttaaaaaggttaaaaaagtcaagtattaaaaaaagatg

SEQ ID NO: 11202 - DNA, 3000 bp, Unknown
  misc_feature (1)..( 3000): cDNA_ID_1807374_gDNA_ID_2214483_Annot_ID_183436 3000 nt of promoter + ATG
agcaactggtggcaagtgccgaagctgctgtagaggaagtcgtcaggcgtggagtaagcattgctttatcctaaatccatcacctcggtattgtatgaaacccaacagttttgaaacttactattgtttgttcttttttcaaggtggctgatcgaagcaaaattgcagttgggggacactcctatggagcttttatgactgcaaatcttcttgctcatgctcctcatcttttcgcctgcgggattgccagatctggggcttacaacagaacactcacgccctttggtttccaggtgccaagaccaattgtctttctcctctcattctctgcattttgatagttaatttacttcgcttttttggttattctttaactatgcctgtaaattttcagaacgaggaccgaactctgtgggaagccactaacgtctatgtagagatgagcccattcatgtctgctaataaaatcaagaagccaatcttacttattcatggtgaagaagacaataacccaggaactctaacaatgcaggttacttcattgatatcacttgaaaggattggttcacaccaagttatcactggattggttctctctaactgtattcatttcacttactttgtataacagtcagaccgattcttcaatgcactaaaaggccacggcgctctttgccgtcttgttgttcttcctcacgagagccacgggtactcagcacgggaaagcattatgcacgttctctgggaaactgaccgttggcttcaaaaatactgtgttccaaacacatcagatgcagatacaagtcccgaccagtccaaagaagggtcagattctgcagacaaagtatccacaggcacaggtggtggtaatccggagtttggtgagcatgaagttcactccaagctcaggagatcacttctctggtaaactctctcaccaccattcccaaacagaaaacaaaaccacaagaattctcacatttgattatacttttttcagagttcccaaaagtggttcactagccacatgcagcatgcgagtgcacttgcagaaacagagagcacaaaaaaaggcagatgcaacacaaacttatttttcatacaaaacattgattcataataatatgaaaaaaagtttttgaattacttgaaatgctggaaacactctttcaagtgcaaaacttcgatcaataagtttcataaatattcaccttttgtaatttctcgaaacaaaacaaaagagattatgtctgaatgaacatcacatctgaatttgttacaaatcccattctcagatttgtttatttcttaagaacccaacaaaaaaaagaaaaaaaagacagaaatggaaatcaaacaatcttcaggaaccagttattgagcggcttaattactcttcagcagctacaacactgatctcacctctctcaagcaagtcatagaaagttctggttttcctctgttcgttccaatggtgcatcttccaaagaccaccagcagctaaaccgagtgccaaaccgataaataactccttgacaacgctaggccctttcaatgtcgcatgtgcaaccttgtgtcctgccatctcttctttcttcttctcaacctaccaaaagtaacaaatgtaactcactaccaactcgaaagattggatcttttttgcatcaagcataaccacaaatcagaaatgtattgatactacatatatacaagcatgacccgttataaagaataaccccaaaaacccaacatgaatcagtcctaacaaacaaaagctagaaatgtaatgaccatataaacctgtgcttaagatatgaactccatctatatactgccaatggattttcctatcttgaggcaattagtgatttgtatgactggaagatcgaaaaacttacaattcaatatcaatgacataaactagcaatctacagcccaatctataaattgacatccttcaatcgattaaaaaaaaaaaaaaaaaacagcctaatatccagaatccgcataacgaaagtttaaaaatcttccctcgaacgaaaatgataaacgttcattactacaaaaccataaagcttgaaattctttcccacaagagaaatcagatagaggaacgatggatcccgatccatgagatcgacgcaataagaagaaggggcattgatgcgaatcggttaaatcaaaaatcactcgttaatttctatctagaagaacaatcgaaacaaactagcaaatctagaaatcaaaagaaaaggagagagagagatgagtctggggatttaccaagtcggagtgtggaggtgtagacgacgaccggaacgaatgaagacgaggattcaggtgtgcgcaagagattaatcaatttaatttagtcactctcatggatcatacattttctctgtcaacctattgggctaacatctgagaccggcccattactgttcaactccagtcaattttgtctaaaaataataatatcatcaaaatttcaaaacacctaacatttgatgcgacccaaagaaagcaaaaccacaaattattatattgacagaaattaattctaataaataagaaaacacgatacaactatattaaaaaaaaacgtgtcaaattgaatattttctcaactgtatgaagtaaatggcccaaatgatattttcagctcacctaatatataaccaacttgtgaatttaaagcttcaacggaaatagtatagggcattaaattggtaaaaaggtacaaacatgaaacaacagtaatcaaaaatacaaaatgtaactattcgtattgaattctggacacagattctgggcccaatgatacattcaacgggccgccaaaactagtgcaaggttgtatgtgcatctaagtaagtgggccccatattttccaaatgttcgctcaccaaccaaactctctctgtatctattccacactttcttaaggtggtcttcctcgcacccaatttattactctctataactgtctttttcaaaatg

SEQ ID NO: 11203 - DNA, 3000 bp, Unknown
  misc_feature (1)..( 3000): cDNA_ID_3039211_gDNA_ID_2214483_Annot_ID_183432 3000 nt of promoter + ATG
acaataagctacaccattatcttccattgtagagcatatataggcatagaaacgctcttcgctcttaacagattacttaactgatgaactgagaactccccaatctccaatactgagaaacaaaacatgtagaatcattacaccaattaagcaaacagagattgtcaatttgaaatccaacgagtgcatcatcagaatctcagatcaatcaattgaacatacaaacaagcactaaactttcctagagatagcggatccacaactctatacgaattgaaaccaacactaaaacgatcgaatcgaagattaaaccaacacagaaaaatacaaactttaaacaatacgatcatcaacaggacataaccaaaaccaagtcaagagagaagccacgaagaataccttgattgctcagcaaagacgaattgagagaatcgagaagacgacgacgacgatgatgataagaagaatcgttgggaaaaagggagaattgaagcaaggaagaattagggttaggggaagaattgggaataaaaagaattaagaagaagaaagcgtaagaagacaagtagtaaagaggtgagagacttattatctcctccttcaccattttttgctatttcgacaccaacaacccacacacaaaaaaaaatataccaaaaaaaaaagaagctcaaagaacccttttttatcgctcttcttcgacagctagaatcggtgagccgactcagagcataaactcgctttccttttttatcggtttttgctaatccctcttctctactctcatctatctctctcgtttgtttctttttttttcttctgctgcgttggttttgtttagacatgccgatgcagcgcatgttaagaagatgcacatcagtgtatgttagcccatgcccctttctgtcatgtcacaaaaagacacgtgtggtttttcttctcacgtgacgccgatgttctgattagttctgatgttattaagaagatgcataacaaaatcaaagaaaaattaattgaacttactatttttattaatattataaatgaatttaattgagccgttatgacaaaacgacggtgttttattgttatagtgaacgttgtcatttttaattaacaaatatattaacaaaaaattaatctttttaataataggatatgttatcccacttaactatatgcctaatattgcgaggttatagtatttatttagataatcaacgaaagtttagtatttatttggaaaatcgatataagtttcatatttattttgtttcatcgaagatttaaatcaacgttttcaataagttgaagatttttgtgacatttttcccaaaatcaactgtatttaaatctttcaaatgatgtttattatgtgaaagcttatgattaatccaacaaattagttaaaatttggtatctaattcatgttaagaatttatcagtgatttcttaccgcttaattggctaactttagctaaagtggcaaaaggactgatgtatataagttgataaaaaaatggatgtatatatacataacataatataaatttcaaacttcgaaacatttttttgaaaagttcatatgataagtggatctaacggttctggaccttttgagacatggccaaaacgttgctacaaagcttcttcataagatcatcaagagacgccgtcggcgaatcaacatcaggaatatccacgaaattatcagaacaagtcgacacatcggagatggctgcactcaataccgaatccaatctcccgtaatctccctcctccatggccatcttcgcatcttcaagacctgagatcaacgaatcgtaattctcgacgcaaacactcatcgcctctttcaccggcatcggcgttttcctatcttccaccacacgtttcgcgtaatccaaagtcgcgttcgctttttttaacagagattcagcttccattcgcatcacatccttaggagcaattcctccgtctcctccttctccttctgcttgtttctgtagatccgggagaatcgcggcgatgcattcgttgttgtagtctgtgtttttgcagagatctttcgccgtcgtgtcgattttcattgacgagaaatcgaatttgtttatatgttcaaatttaggagctagatcagctatgtttgtgacagagtcgaagttgatgtctatgtcttcttgggatggtccgggtgcggagactgccgccgtgggagctaaattagatccggtgttaatgtcttcagaggtgggggatggtgcggaggctgggacgaccgagattgatgatacgggtggttcgatgagcgaagggtcaggtgaggaagcagggacttgggatgtctcttctactgaacggccggtggcgtggacgttggatacgccggagaatgtataacaacaaacagtaactccgatgaggataattgctttgtatggctccattttcttaacaaaagtttttttaattaactggtgatgattaagaatttaaaaggtacacaacacaattattaactatatatattgactggttttaaatgtgtcaaaattttggaaaagctaaattacatgagaggttttaaaaaggtgcgctcatttttgctcaaaacccaaaattaaaccctataattattcttactagtaaaaccattaataatgcataaaaattatcttatctgatctaattattacatgttataatccataaatgttacaaagaaaaaacactaatccactaattgggtggttttacaaaaattgacccttagaaaaaaaaaaaaaaaatgctaaacaaaggcccactagaggcccaaatgtatagacgatgacaagtcggtgaaccgggaaaataattttacttgagattgtttccttcctctccgattttacataccaccgggaaaaaacacgaagccctaaatttcgtcgtaattggcaacagttaagctctttgctaaaagctctagctgagaagcgaaattcgaagtgaagaatg

SEQ ID NO: 11204 - DNA, 3000 bp, Unknown
  misc_feature (1)..( 3000): cDNA_ID_3039223_gDNA_ID_2214483_Annot_ID_183428 3000 nt of promoter + ATG
atatcagcagaatctattatatgttgaatgttctgtcttccaataaatgatacaaaaataaatcttaaactaggatttaatccgtggtacaccacgggacaaatattttttatatatatatatataataatatgaattttacggttttagtttagtattaaagttatataattttatattaatattgtaactaaaaaaattggtgatgataaaataataaaataaatatttaacatgtgttatatcaatccaaacccgtcctgctattcatatcaatctaaatccgtcccgctatattttttgtctcatgattttttaattttttataagtttaaatattagttgttgaattagttatgattgtgattttataccgaaaaagttatggacttttaatttcatggaatattcaaaccaagataaggaatgtttttaggtgcacatataattgggtttgctcattttacgggattgtaaatgtattttggtttgtttcacaatgtttgttttaattgattgccgatatttaatagaaataatttaaatagttcaaattttggttgttttaagatttagtgaatattgtaggtgagataaggagaagataatttatcgtgttttgcgtgacatatgggattaccatatatttcgaatatttttggtttgttacacaattaattgccttaaaaaaatacaaactattaattaaaaaaaattaaataattaaaatccagtgacaaccattgtaaataaatcccaactccatgatttatttcacaaaatggatgcaaaaatgtatatatagatttagaaataaaaaaatggatcaaataaaaaactcaaaattttatgataaaaaaaactaaaagatcaaccaatattaagaaaatatatttagtaataatactatactataatatatagctatgatagtttagtttaattaacggcactgtattttaactattattgatttggcccataattaaaatacttattgggctagaggcaggaattacagttggggctaagcccattaatactagtgggtttaatttggccctttaacttaaatactgtgatccataaactgatatatggttaaactgtacgacgatacagatgatttaggtctctcttcttcttcttctttttcttcttgagcgccggcgaaaaaagtctctgtgagaaaaagatacgacgattgtcattagaagagtcgtattacatgttttgtgcttgaatctaattcaacaggctttatgtaagagattctttaacaattcctataatctttgttgttggattagattcacgcacaaactcgtaatctgtcttttcgatttttaccagatctgtcttcgatttcgaatcgatctcttttgattttggtgattttaagatttagatgttgctttaatttgggaatcgtaaacaagatctacatgtctacttttggaatcattcccttgcgttgatgatttctatcgttttctatttccaaatttggtattacctatgtttggtatgaatctcgattcgagagcccgacaaaaagttatcactctgtttatttatgcatattaaagttttcaagcactcatttcctaattgtcttgcttaattatgctttcttaagactttcaaagactttacttgagttactggatttgattgatgcaaacgacttgtccttaatccatttatgtctgtgtattaatgtctggaatcatatgacagttgttgttattgctttagcattttcttacgatccactggtaaagagaatctctttctcatagtcctgttctacgttctttgttggtttgtttgtccgagaaagcagatcaaaatcttttgtaaaaatattgtgaccaaattaaacttaaacatctttaagtcactctgattgtggggtgtgtctactattaacatttactaggtcaagatatttacttgtataattcaaagattttatatctgatttcaattaattttcttataacaaataccaaggaactcttacttattcagccaggtggtttgggaatactcaatggtagatcagaattttttcatgtctttatggatttactacactacatgaacaataatgttactagcgagaaacgtaagtttttcttgtaacaaaagtataaccaaatatatgaacaagtaaatagttcgttaataatagcattaataaacataaattcatattttagtgtggcacaatctgtagttaattaagagtcttaaaattaccctgccaataaaacggtcaaattacaatagaataaagtggtaattaagaaaaacaaagtacgtagcatcgaatcttcctctctctggctaaactaattcaaagtttcaactagagaggaattaatacgtacaaagtaatgtattaatttggttttaaaaaaataagagtgctgtgtagctttaaaagattttaaagccaaaactaataggtgactttaaaaaaaaataaaaaacaaagagtaaaaaaaaaaagagtgctgtgaaagctttaaaagattttaaaggcaaaaaaatcttgattggcaaaaaaaaactttgaagacttttaaaatctttctaaagtcttaaatgcttctgtcaatcacccccgaaatcgttaaaatatatgttatttagtttaggaaggtagaatatcagaccaaatatattttgtttggtatttttttatagtcaaataaaaaaactccaaatgtttaaacttatttttgttaaaaaattacatttaaattatatatatggaaatatttaatgtgaaatatttaaatatttataagatgatatcataccacatatgtacatatggatcagtgaatgcaaggtaaacacgctcgctctgtgaacagtttaatatataaacacctaattacatttacttagatgtgaattataaaaaatcaattctatacgatgaagagggtagcatcttacaattacaaaattgtgtgtatggtcgta

SEQ ID NO: 11205 - DNA, 3000 bp, Unknown
  misc_feature (1)..( 3000): cDNA_ID_2701945_gDNA_ID_2214483_Annot_ID_183426 3000 nt of promoter + ATG
tcgtctctatttgttctattgtttttttcatataaaaagtgttggttgatgggcttttataattcaaaattcgaagatttgacttactgtatatgatatgttattgtatatcccaatactctaaaatactgaaatgttttgagtaccgtcgcgggattacgtgatatagtggaagactggtgactcggaaccctgtgactcgtgaccggagtgaaattattattattctaaccattgattatcctgatttctcgcttttttaaaaaataaaataattttgtttctcctttaaaaaaaaaatccactatgctattgagatcctagacgtatccaagaagcaaccctagggtagtcaaaaatttaatatatttttttctttttttttggtggaataatattttttttttctgtatcgttcggtgatacgaatctaccttttctaacacctatttattttgttttgaatctagttttctttaagtaatgtaatttcacgactgaactgaaccatcaaatctcaaaagacctctgattaattttcatccatctttagaaaaatagtgaagtttgtttgatgaattgggacaatttagttaatatattggtggtatacagaaaattattaattattaattattttttttaatgtacttgcttctttcttgctcgcgcgatctaacggcagcaagggaaggagggagtaacgaaggatgaagcgtgggccattgaatttgagatagtgccacgtggacagtttagttaatgggacccataagccgacaaaaagaggacacgtgtagaatatatttgcacaaagacgtccgtagagagaaacatacgccaccattgatgcccgtccgcaaaccaacgccaacaccgagccgcgcgtcttttggccgacctttgattgagacgcttttctttattatccaatttcaaaattaagaaataaactaggcgaaaaaaacaaccaaaaatgttttgactaggactgatcctataatagtcaggtcgtagtaactagtaatatctgtaaacttgaaacattattatgaaatacggtcgaagaaaattaaattaaaataggttactaaaaaaaggggggaaacaaaatcatggaagcatgcaaaaggagagctaagtttgcaagcaaattatacgagagtgggtcaccactcactcttgtacaccacacgtgcatgcttcttctttccttattttttgtttcgcaaaatcaaaaacaaatttagttttcgcaaagccgaggtaaacaaattcaaaaaggataaagcaaattatatataggaaaatcggtaaaaaaagaacaaaaagagaaattcaaatcttgactttgtttaacctttagcttttcttctttagtcatcgggatcaccgctgtttataaaaaagatccatgaggcatgcaggagttatactaatccgggcccttcactttgatctattccgattttctttgggtccactaacctttaaacatatggagtagtactataatcttatttatcaaattatatagtatatccgcctacatcaataattggtgctacgaatgtataaaaaacactaatcttaacgtaattaggaaagtagaaagaatattgtgtattacctagtagtaagtatgtgagaaaccgatttgtttgattgaataaaatttaacagtagacagtttgtgatatgcaacctgcaacgtatacatgttcgtggccccaaactgaactaaatattatcataaccttgctatatgtttccacgtatttcaatacaaaaatatacacaatcaacacacatgtatatgtcatagctttgtaaccagagttttacaagttttctgcgttctttggacaaattttcctttcgcttaattattaaaaactaaagtattacttcgttcacaagcaccaacagaaagaagaagaagaatattagacctgcggtgcaggctttttatcagatatttttcttcgcataataacattccaaaagacaaaaagaagatgtgaacacggtccattaaattcggccttttcgatataaatatgatactaatatatgttaattctccaccactttaaattatttattttcataaaaacgtcgaagattttagattcatacgtgcttctttcctgatcaaaagtagtgtcgatcacatttttcttttcgctttacaaatttactactgattattttgtctaataacaacgaaacattaatactacgaaatttcgacataaaaatgattcttgatcacgattcacggacaacggtctcaccgcccacacatgactcatggcttgagtctatatattgaaacaatttaggaaacaataaggacaagtctctttttttgtttaaagatgaacaaatttttgtgttcacattaataaaaactaaaaagaggattcccatgcacacgaaccaacaccaagagcctttttattgtattttaatttctttatttgagccaacaactatttattttcgttcttctttcacactagctctaaaaaccggtttaactaaaccagtcaaaaaccggacgtatgaaagcgttcactgtcttctctgacttacgcgttgaccaatgactacagtattttgaaaaaaccttcgtgtgatataaccggttactggaagtctgtaaccatccgtactgtatatttaacctgctattgccggtcaataaaaaaaaatcaaggaccaccatttaacacagtgcggtgacaaatatcaaatccttgagtcattattatctctttcctctcttacgccatacatttcatctttcttctctctctatctctcctctttgaaccctaaaaactctttctttacaaggattgatctttttgtatttttgattttgacatttgctttgtgttcgatctctgttttgatgcgatttctctgtttttaaagccatttgatagattgtttccggtaaagctcagcgagagaagaagaagaacaacaatg

SEQ ID NO: 11206 - DNA, 3000 bp, Unknown
  misc_feature (1)..( 3000): cDNA_ID_2717174_gDNA_ID_2214483_Annot_ID_183424 3000 nt of promoter + ATG
tgttgagtccagaagctgttcgataaaaagtctcagagacaaaaaaaaaaagaagtatcctaaagaaagcatttttaatgaacaggttgaaagcaaagaagaataatcagaagagacagagagaggcaagagtcgcattcatgacaaagagtgaagttgatcatctcgaagatggttatcgctggcgaaaatatggtcaaaaagctgtcaaaaacagtccttttcccaggtatcagcaaatatatccatatcctttgaccatagttttacaacaacaagaagaaaaatcaaatctttttccttgttgttttgtttcttcttttttgatttgctcttgggtacatgcactatgttaatttgttggatctagcactgtcccattgtttcttaatgtttgggtgttagtgtttactaattaaatttactactgtttacagtgtccaaagaaagacttaattgtgaaccaaagttgattttgtgtaaatggtgtttcgtttgcaggagttactaccgttgcacaacggcttcatgtaacgtgaagaagagagtggagagatcattcagagatccaagcactgtggttacaacctacgaaggtcaacacactcacattagtccactcacgtctcgtcctatttccactggaggtttcttcggatcgtcaggagctgcttcgagtctcggtaatggttgctttgggtttcctattgatggctccacgttaatctctcctcagttccaacagcttgtccaataccatcaccaacagcagcaacaagaactcatgtcttgttttggaggagtcaacgagtaccttaatagccacgctaatgagtatggtgatgataatcgtgtgaagaagagtcgagttttggttaaagataatggacttctgcaagatgttgttccgtctcatatgttgaaggaagagtagtagtatatatatagtcttatagttttaatctagtttttttttgtataattgtctaaaagaaacggatcttttgttctgatgaagaagatgttttcttatggttctgaaatcgtaaggtaatgatgattgtaccaagccgagaaagtacttgtgattttcaccattgaatcactataaatgtaatttttatttactgtgaacttatattataaatgtgtgaacttataatttataacacaaaaatgcaccagattcttaaaaaaaatatgtggactagtaaacatgattttgtaaatattaggattggcaaaaacttcttaatcgcataataataatttgtcgttttgtaaattactgatcgtaggcgatttacaacaatggtcgtcttttaaaatttgttatgggctttgcatgaacactatgtcaaagctaggctttgtagttcgtgtttttttttttaattgaaaacttatttgatctatgattctaatatagtagccttctagggtttcaggttaatcaatctctctctagtcaaatacacagtcagttaattgttttttgtttgtttcgcttcgatatatgtcttggaatctggaaaaattaactagtttcatagtaatcaacaagattaattaagcgagataactaaagaggaaattaatgcgaaactggaagcataaacccaactacttctacctactcttctctatgtttctatcgacccttcatgatttctcttatttatttttaaaactttatttaccccttttgttcttgttgctgtttcatgattacactgcggtgaagaataaagacgtatgcactgtgttattgttgttagctattttcaattatttaaaaaaaaaaattcaaaacaaaggagaaaaatttgtcactctcttcactaattttagtcttcttttaaaaagggtttggttaaaatggttgtgaaacagagcaaataccaatcatagctttgtgtcatccccaaagggcatagacttgtggccttgtgagaataaagtagagaaacaagttaccatgcaaataaactttttttgtttcctttttctttttgttacttttgtagccatgtgtgtgtgagaaaatgttctacataacagaacaaggaaggaaaaacaatcttatgaggtaatatcacttttttgtctttttgtctagtgagtgcatagcaacgccattggctttagtatgtttgtattgacctttacggtgagtgataatccctaaccgaagaaggtacataatcattgtcccaaacaaagccacgaatgcaaccgaaagcaaacgtaccaaaactctcgatggcttaaaagtaaatgactaaaagacaaacttaagagacccattgtatcaaagaaaacaactaacaattttgctcatcatgtctccaagtttattccactttcaatatacatttgttagatccaaaagactctcaagccgtaacaatatcattgaagaaatacttattttaccttagcagttttgaatcaaaacgacaatagctactaaagaagaagaagtcaatgaaggtattcaaaccctgatgtcaaactcaaccttggggtagtaaatttcgaattaagtgacgatcaaattcgcagtctcaaatgctttctatgcacttcgtattgcaaatgcaatgcttaaggatacccttaattctatttgcgtcagtccacttttttttttttgttgtattttgtttaagtggtgtaagtgtttttttctctttctattgtaccatatccatccttgtcaaagtaagaggaggctggagaggttctttgtgatcaataatcaaaatgctagtgtttttactttttaacaaacaaaaaaagaatgagagagtcagaaaaatatattcagagaaacatgggctttacatacataggtcggcccacaagggaacttaacgggccttggtgcctaaaacaaatatcaaaagagacaaaaggggttaacctgaaaagtcctcgcgccgctgcttatcgttgagcctaaaatctatctgtctctcgttttgttcgttcgtaatg

SEQ ID NO: 11207 - DNA, 3000 bp, Unknown; identical to SEQ ID NO: 11200
  misc_feature (1)..( 3000): cDNA_ID_3039233_gDNA_ID_2214483_Annot_ID_183423 3000 nt of promoter + ATG

SEQ ID NO: 11208 - DNA, 3000 bp, Unknown
  misc_feature (1)..( 3000): cDNA_ID_2701901_gDNA_ID_2214483_Annot_ID_183421 3000 nt of promoter + ATG
ttggtttcgtctatttcgccatccttcttaacatgttgatttttatgcaggttctgatttgtaggttacttttctttgccttcctgcagcctcctacatcaccggacaggaagagctaaaagcatgcttaaatgattggaaatccaatggtttagtggtgtctggtttggttagagatcagagggagaagttgattcaggaagtgtcttccacgttcagtggcaagctcaacattcttgtaagttcccttctcctgcaaaatgcttgttaaaactgactctagttttttctcagcattgtgatcagaatcgtcattgatcttgaaatagtttattgcattagctctgcatccttataagtttattcagagagacgggagtcgccattagctcaaggatcagggaataatatgggtggttctgtgatgaatggtaatactcctccatcactagactgtcttttatctccaaaatccaaatggatcctcttaattaatgatgagtttctacatcatgaaaattgatcatgtcatggtgtttccagctaatgaatctgtttcacctgtaacctcttccccggttataacttcaacaccgttggaacatacagaggctggaactaaaggaaagacggtccccaagaagacacttcagccaatggaaatgaatcaactcgagagaaggtatcactttaacataattgtcattatttttatttaactctgagatggttcttctttgtgtttaacactaatatgcacagatgcgtgagaagcattatagtgaagataacagtcgtaagaggaaaagaggagaactggagcataattcggacctcaacgagactggtatgtcttaactctcattcgaccttctgaaattcatgatcagcttgcaatgttacaaaggctgagttccattatacgagtaataaatattactatactaaagcaatttcattaattatcttgttaatttgtgcatgcgttgatctccagtgctaccctctgattggactcccgatcctgtgaagaattttgctgctgatgatgatgatgaggaaaccaaagcaaaggatgcaacaatggttctgccttttgtgaagaagtcaccggtttggaagatatatgaatcaatggaggtcttcaaaagagtaccacaaagtcctcatttcagcccattgtttgaagcaaaagaagatttccgtgaaggttttgctttgggtatgatggtgactttttctggggtattagaaaaagtagaagatctgaaaaccgacgttcccatacgccaactaaatagccttaaagactcatttaccgagctagagaagcatggattcacggtcacagcgcctttatctcggatcgccaagctgttagctctcaaagatagacaactaaaaatattggaggaactaaaagttttcgacaaagagatgaaagatgaatctagcaaaaagcataaagctgagcaagagtttggtgagatggaacgcaagattcttgaagtgaaaaacaaggttctggagctgcagaagcaagaagcggctctggaaaaacagaaggatgcaacctatgaaaagatatgtaaaatggagtcacgtgcaagagatcttggtgtagagcttgaagatgtggagtgagttggagacaattctgtcagctccctggtaagttaagaaaaaaaacaaaactataatgatctattctgactcaaaagatttatctgagttcgttgttcgttataggttatgatgtttagcttttaatcttgaagccattagcttaacttcattttcctttttgtggatttcaggtgaaaaaacaaaacaaagaaggaacaaaagcgtaaagggtttataggatcaagatcagagtcaaggagagaagctgacgtggcaaagacttgtgagtgattaagtcaaagagagaagctgacgtggcaaagaaaaatgaagactgaataattaattaattaatatcagtgagagcagataaaaacaattaattaagatgggctcgttaatttaggcccaatagatttctttgtaactttcatcgcgccaaaaaaatgaagaattattcattaatataaagtaattaattaaggagtatgatatgacgacttctcagattcctatgtaaagctaatccattttcagaaacagagtttgggtttctctccgctttagggttttctgtggaagaagaaaaaggcgggggttttctctctctttgttctgaggtttttttttttttaatgtaatcagagtaacgacattggtagtatctggggatggaggaaacgattaggaaaggttctgaagtggaagtgtcttctacagaagaaggttttgcagatgcatggttcagaggtatcctccaagaaaatcctaccaaatcaggtcgcaaaaagctccgtgttcgttacttgactctgttaaacgacgacgctttgtctcctcttatcgagaacattgaaccgaggtttattcgaccggttccgccggagaatgaatacaacggtatcgttttggaggaaggaacggtggttgatgctgaccacaaagacggatggtggaccggtgtcattattaagaaattggagaatggcaagttttgggtttattatgattctccacctgacattattgagttcgagagaaaccaattgagacctcatttgcgctggtccggttggaaatggctccgaccagatattcaggtacgaggttgatgtaatccaagttgggttttttttttccttaattttgttgctttgttactaaagattgaaacttttatctgttgcatgttgtgatccattattaaatccgtttttttttcatgcttggagctgtctctgttttgttgcatgctatgttttgattgaaatggttaaaggcttgatctttgactttgattcttagtgtagactttgatgtttctgattgttttccttgaaggaattggataagtccatgtttagctccgggaca

SEQ ID NO: 11209 - DNA, 3000 bp, Unknown
  misc_feature (1)..( 3000): cDNA_ID_3039239_gDNA_ID_2214483_Annot_ID_183420 3000 nt of promoter + ATG
tttcccttttctacttggttatccagtttatctgattatttctggtgaatctgtcaaattttcagcttcatgtatacttgagaacctatggacttgaacaaatggtccaagctgcaagctctgctgttggtcttcgaacgatcaagcgggttgagcagactctgcaagatctcggggtttgtctttgcttcttgttctgtttaactctttctatttgtctatctcatttgcttatctttccccattgattgatgatgagacttaactaatgttataaaaggcacccgtactgaagctagctttgaatgtgttctatgtaattagttgggattttggttcgggtagaggctagtaggttcttgtcagtttatttgattgtagccactcttaagatttactaaatggattttttgagtatatagagttttctgtttacaggttaatttaaagccaaaggttcctaccaaaactgtatgcgatgagcatcttgagctaagaaaagaaatattaacactactgaatcttcagaagcaggtaaaccatacaatacaagtcttatctcacatagattcacaaatatacagctatttgtttatttaacttgttgccaaaacatggtggggtcgtaacttcagctgcaatataaggaatcagaaggttcatcacatcgtgaagggtcgtatgccgcaatgccagacactccaaaggtgagcaacaaactttgtttattggttctcgctacagtttcatcttcctgttgatctctttaatttctatatatatttgatcaggatcgtgttttcgcaccggacccattcagttttggaggtacattatttccttatcttgttggtttcagcattgtatgcactacttaaccatctctaagttcattttgtgtgtttatttcagctgaaagaccaatcaagaaggaacaaaaacgcaaggtggtgcacatcagagtttgctcttctttatttttcgtaccaattcctccgaaaatcctttgcatctacatgtaaaacttgaatcttaattaaaatatgtttgggaatcctgcagggtcctggaagacaagcagatactccttcaccagctcataagcgtccgagaaagttgaaagcctctgatctctaaaatctctctactcggtgcatactgactcgcaatttcatgtgtatgtatttgcctttttccggtgatttccgcaatgttttcagttcttaaattatttctgatctctaaaatctctctacttgtactcagacaccgcactatcttgtcaagccaattagagaaattgagaaaatgttgcacattatatttatgactagtaagaattattacatctaaagacattttcgaaaatgttaaattacaaatggttgattggtatgataaagaaaagaataaaaattaattagatagaagagagagtaaactatcgaaataagaaacacaatatcaggaggtggaaggcgaggagacacattcataagaatgtagataacagggagcttgaggtgggtagagacagagaagaagacagttgacaacaattgttgagtcttgaaggagtctcgctacatacatgtaaagaaaaacaaggattactactttatttcttcaaacttatagattcttctattgataggcaaaaatcttagcttcaatgtgtttatatgtatgccaaaactccaaccaaagaaagaatgtccatactttttctctcaacttagcaataagtcccattatacagtgggatttaagattactgaaattttcaacacttagaaatcttgagtttttagtatactaccaattagaccaaaaaataactaaatttgttccacatgtgacagaggtatactagttattataatcaatatcattatcaatattaagcacaactacattcgaatgactaacagagattcctacgaaaaaacaataatctgaagcaatagaagtaagagaagcaactatacatttggaatcgaatagccgatatgggaatccgccacagattctggagaagaatttgcagtttgtcggagagagcttttgattgaagaaatcagacaaaagttttggaggagagatctcgaaccggaacaaaaagtttacattagtattgaaattagaactaatttgcggttcggtttacactgggctaaagaggaaaaaaaaaaattcacgcgatggtgattttgaagacaactgcgttgataaaaaaaggcatgatttcaaaaggtgaacccctacagaattgctctcacgctctcaacgcgcactttgtgcgagtagatctgaaatacagccttgtgattggctaaaaaactctaaaaaaatagaaatagtagacatgttgctagcttatgttattatttagcttttctacaaaacgccgtcgttttttatttcgatcgtttcagcttttggcattgatccgaaccaatcggttcaactggctaagtctatccacaggtttgtataaaaaatctcatttggtcatgaaattaagcactaaatttatattaattaatcatttaatgcttatagacaaattctatttcatatttctaacgaatcagacctaattgtacgaaataaattattggttctgaaaatatcaattgggaaattaaaacccggttcaatttgaaaccggaaacaagactagctacgcctggaaactctcacacagagtcacaggagaagctcccgcgtctgcaaggaacggataaagtctctctctttctcactctctctcaatgaagaagaagatgctgacgagtcccagtaacgcacttcacagtagtactccacagttctggccagttcgccggagcagactttgccgttcccggaatttccctcgttttcactccggcgaacgcagcagcggcggaggaggaaaattgtgctcgctctctcttctctccggaagtggcgccagtaaattcagtgtcagagctctagttaggcctgatgataccg

SEQ ID NO: 11210 - DNA, 3000 bp, Unknown; identical to SEQ ID NO: 11196
  misc_feature (1)..( 3000): cDNA_ID_2701913_gDNA_ID_2214483_Annot_ID_183417 3000 nt of promoter + ATG

SEQ ID NO: 11211 - DNA, 3000 bp, Unknown; identical to SEQ ID NO: 11195
  misc_feature (1)..( 3000): cDNA_ID_2701949_gDNA_ID_2214483_Annot_ID_183416 3000 nt of promoter + ATG

SEQ ID NO: 11212 - DNA, 1542 bp, Unknown; identical to SEQ ID NO: 11194
  misc_feature (1)..( 1542): cDNA_ID_3435695_gDNA_ID_2214483_Annot_ID_183415 3000 nt of promoter + ATG

SEQ ID NO: 11213 - DNA, 3000 bp, Unknown; identical to SEQ ID NO: 11206
  misc_feature (1)..( 3000): cDNA_ID_2717174_gDNA_ID_2214483_Annot_ID_133307 3000 nt of promoter + ATG

SEQ ID NO: 11214 - DNA, 3000 bp, Unknown; identical to SEQ ID NO: 11205
  misc_feature (1)..( 3000): cDNA_ID_2701945_gDNA_ID_2214483_Annot_ID_133308 3000 nt of promoter + ATG

SEQ ID NO: 11215 - DNA, 3000 bp, Unknown; identical to SEQ ID NO: 11204
  misc_feature (1)..( 3000): cDNA_ID_2701953_gDNA_ID_2214483_Annot_ID_133310 3000 nt of promoter + ATG

SEQ ID NO: 11216 - DNA, 3000 bp, Unknown; identical to SEQ ID NO: 11203
  misc_feature (1)..( 3000): cDNA_ID_2701929_gDNA_ID_2214483_Annot_ID_133315 3000 nt of promoter + ATG

SEQ ID NO: 11217 - DNA, 3000 bp, Unknown; identical to SEQ ID NO: 11202
  misc_feature (1)..( 3000): cDNA_ID_1807374_gDNA_ID_2214483_Annot_ID_133319 3000 nt of promoter + ATG

SEQ ID NO: 11218 - DNA, 2063 bp, Unknown; identical to SEQ ID NO: 11201
  misc_feature (1)..( 2063): cDNA_ID_2701916_gDNA_ID_2214483_Annot_ID_133321 3000 nt of promoter + ATG

SEQ ID NO: 11219 - DNA, 3000 bp, Unknown
  misc_feature (1)..( 3000): cDNA_ID_2707474_gDNA_ID_2214484_Annot_ID_133324 3000 nt of promoter + ATG
aatatggagaagtcaaacacctaattaataagatatttcttgttaaaggaattgaaataaagtgttaaatacgttaaagtggactaaaaaaaaaaagaaaaaaatcttcttttatatggtaatgtatctgtgaaatctcgttaatatctttacgtagactatattcaaagcttctatgtttactccaacagaacatgaacatcaccttcaagctctttaaaacgccatcactaacttaattcaccactatagaggaatcaaaataacaggaagtgatcaaatacacaatgtatatatctaaaaccatagtgtttggtctctttgttgcaacactcctcgtgtcttgcaatgcggatgcaaacaccacgcagccgcttttcccggcgattctaatattcggcgactcaacggcagacacaggcaataacaactactactcacaagccgtcttcaaggctaatcacctcccttatggcgttgatcttcccggccacgaagctaacggaagattctcaaacggaaagctaatctctgacgtaatctccacaaaactcaacatcaaagagtttgttcctccgtttctacaaccgaacatctccgaccaagacattgtcactggagtctgttttgcatccgcgggtgctggctacgatgacgagacctcactatctagcaaagctattccggtctcacaacagccaagcatgttcaagaattatattgctcgtctcaaaggtatcgtaggagacaagaaagcgatggagattattaacaacgctttagtggtcataagcgcagggcctaatgatttcatcttgaacttttacgatatccccataaggcgtctcgagtatcctactatctatggctaccaagattttgttctcaagaggcttgacggttttgtccgggtaaaatcttgaaatttttgttttcatggtctgggaccagattatttcatggagctatatttgtcgtgctgactctcgaatcttttcttcttgtgtgcaggagctttatagtttaggttgccggaatattctagtcggagggttgccgccaatgggatgtttaccgatccaattgaccgcgaaattgagaaccattttgggaatttgtgtggaacaagaaaacaaagactccattttgtacaatcagaagcttgtaaagaaattgcctgagatccaagcgtctctacccggaagcaagttcctttacgctaacgtctacgaccctgtgatggacatgatccgaaaccctagcaaatacggtatatacaattttttcccttgttccacaagtcatctaaatctgaaccttactaacttatgcaatatatactcatcgtcgtacaaataaaaacaggattcaaggagacgaagaaaggatgttgcggaacaggatacttggaaacaagcttcttgtgcacttccttgtcaaagacttgtccgaatcattcggatcacttgttttgggactccattcatccctccgaggcagcttacaaatacctagggaacttcatagatgctcagattcaagagtggcttaagacttaagtcaaacttcacgatttacgaattaattaactaaacaatgtattttacttaattagcaactaaacaaatttatggcccttaaaatattcaaaaaaaaaaatgtcaattttcaggcaacctaatttaatacgagatgtacttgtttgggtgtgagttaagtaagctactgatttttcaagttgaagataaacctgcttcctcccaattaaaacacacatttacttaaatattgaatatgattataacattattaatatttttttgaatgtaaataagtcatattagttagtacttaatagcttgatcatccttaatccccaactttgtttcaacgttgaaaatagctccgcgtgcacctttacaagtttagtatcgttttacttacaaagtttatgtagcagaggtgtcaaatttaggcgtcgataaacatctaatgtatatttatctatataaacgaaattgggatatagaagtgagggtgtgagtgagaccatggcccatggacgtatgtagtgtgactcaaaaggtcaactaacaatttatttaaaagtaaaggttagttacttagttatagagttcaataccaaatccataccacaattttcaactcccatcgaaccacttctttcattttttattttcattggctggttttgtattgcaaccgctattatgctgcgcgactcattagctaggttttctagtttacgtataagaggatatgcagaaaagaacaataaagataacccgaaaactttattgtattttagtttaggactaaattaatttgaagaaaagaagagaatattatctattttaggatataatatagaagtacgtaaattaaatgtatacgccataatgccaagaataataaaaatgaacttatgcaaattaattttaaggaaaaacaaaaaaaaaacttatgcaaattaaaaacgtgtatcgttgtatgctaagggaaaccgaagaagatacatatgtttgaacgtaaacattaatttcattagagaagaagaatgtgaagatcttctaagtgctccaacttaaagaaaaacatcaatttaaatcttagttaataaatatcatttttagctaattcttcccaattaaaacaaacaaagtaaaacaagaaatttttgatttgcatgatttttaataatcaaataataaaggatcctagtttcgaattagtctagtgggtgtaccgaatcaacttaacccattgtgagattttcttttttttctccctcctgctgactctaaacctaatattagtttccactttggtaaaatataataaattgtttaattgctaacgaattcacgaagacctctgttgtttcccgcttagtgtgtataaataccactccttccttttctccaaactcatctcacaaatctccaacacagagagcttctcacagtgaagcaaacaatg

SEQ ID NO: 11220 - DNA, 3000 bp, Unknown
  misc_feature (1)..( 3000): cDNA_ID_2707482_gDNA_ID_2214484_Annot_ID_133327 3000 nt of promoter + ATG
cttcattcagaatctcccacacgagacaacaagcatgatgctacagcttctcttcgaacagtaccctggattcaaagagataagaatgatcgacgcaaaaccaggaatcgcgtttgtagagtacgaagatgatgttcaagcttccatagctatgcaacctcttcaaggtttcaaaatcactccccagaatccaatggtcatctctttcgccaagaaatgataagagtcttgtttttgtttgtttgttgtcctttaagacgatagtactggaccaaccaaacctggtgtgtataaccaaccaacggttctattggttaacggattaatccggttttggtttaatcattgaaagagacccttgaaacgcggtttcacacttgacgatttatcacaaattaggagacgactcatcaaaaaagaatatcttactggtcaaccattttatagaaatattaaaatcaaaaatgatatttaggccaaagtagaaaaagacaagaagagagagaaacaaaaaaaaccttgctcaatacgccaccgtcgtcgtctttaacccaatctaaaagcctctgttcttttttagttttatcctctttttcatttcaagatcaatttcataaaaaagtttccttttttagcgaatcctctgttttagaaatcttaaagttgtctcctttattaaagaccatcatgtcttccacttctttcaccgaccttcttggttcttccggcgttgactgttacgaagatgatgaagacttgagagtttctgggtcgagttttggtgggtactatccagagagaaccgggtctggtttacctaagttcaagacggctcaaccaccacctcttccgatttcacaatcttctcataacttcactttctccgattaccttgattctcctctgcttctcagctcctcacacgtaataaagcttccattttttcttaattttcttctatttattgcagaaatgaaaaaaaaaaagacaatcttttgatctctggcttgtgttttgtcttgtttacttgcagagtttgatatctccaacaacaggaacgtttccattgcaaggctttaatggaacaacaaacaatcactcagattttccctggcagctacaatctcaaccatcaaacgcttcttctgtatgtgtttccttattagcgttttgaaacatcttcacttgctttgtattgatgaatcaaacttagtttcgttttttgttattttccaggctttgcaagaaacatatggtgttcaagatcacgagaagaagcaggagatgattcctaatgagattgcaacacaaaacaacaatcaaagttttggaacagaacgtcagataaagataccagcatacatggtgagtaggaactctaatgatggttatggttggagaaaatacggtcagaaacaagtgaagaagagcgaaaaccctaggagttacttcaagtgtacgtatcctgattgtgtttccaagaagattgttgagacggcttctgatggacagatcactgagatcatttataaaggtggtcataatcatcctaagcctgagttcaccaagagaccatctcaatcttcattaccatcatcggttaatgggaggcgcttgtttaatcctgcttctgttgttagtgaacctcatgatcaatcagagaactcttcgatttcgtttgactatagtgatcttgagcagaaaagttttaaatcagagtatggtgagatagatgaagaggaggaacaacctgagatgaagaggatgtaagtagttttttttaattagtggaagcaaaaggtttcttcttgggttttggaaatgacatgttttgagttttgtgtaacaggaaaagagaaggtgaagatgaagggatgtctatagaagtaagcaaaggagttaaagagccaagagttgtggttcagacaataagtgatattgatgttcttatagatggctttagatggaggaaatatggtcaaaaagttgtcaaaggaaatactaatccaaggttgtttatacaaaacttagtttctcaaattgttaacatgtttcaagtttctaatcctctctttgttgtaacaggagctactacaagtgcacattccaaggttgtggagtgaagaagcaagtggaaagatccgcagcagacgagagagcagttctcactacctatgaaggaagacacaatcacgatatcccaaccgcgctacgtcgctcgtgaaattattgggacttagtcactagtaatatgatttaggctttctaaaaacaaaaaatcttactatggcttatcttttgtgctcattcacagtttgtttatttgtttgttacacagtcaatactttgttttgtacagagtggtgcttagtagtgtttttattattatcttggccttatagaataacctctcttctcatctgtgtgactttaaacacttgagagtccattttatagttcttgtgtattggtcttttgtttgatttatgtacatttttaatattcaaatttgataaagcaataataatggtttgtaacccactttgcttgattggtgcaacacatctagcattctatctccacattgtgtgagttcattttatttattattagaacttagaagtgaaaccaaaaccacaaatttagaatggttgagattatgaggaaagatgatcaaccaaacataataatagaaagaaacaataaatagaaacaacaaatataggctcatctttcttctaccttctctcacatacctctatctctctctctttgatctcaccaaagtcgaagaaccaatctatcttttgtgtatttactgataagaagaagttagccttcatagccacaagtaaaaacagagtcctctgttttcttctctcattctcccttacattttctcatcaaaaatgaaaacataacattgatagtttcccaaacctagtctctctccctctttctactcgctttcttcgttttactgataaggaaaagactatg

SEQ ID NO: 11221 - DNA, 3000 bp, Unknown
  misc_feature (1)..( 3000): cDNA_ID_2701968_gDNA_ID_2214484_Annot_ID_183463 3000 nt of promoter + ATG
atgtttagtgattgattgcataaactgggtttggttggtaggttcactgtaaacccgaggcggagaataaggcagcacaatggagagatcactagtggtgcttggagaacaaagaagaaacgtccatgggaaatggttctctgtatctatggtttccccaccaatgtctctgcccttcaggtccttttgctaccctaaagcaaaagattccttgccaaaagattctgtttttacttcttttgttctccagttgtggcctcgctcttgaatgttttgctaacgtaaaaaaaacctttttgcagtttgaatgggcttggcagcatccgagagaatcggttgcagttagagaagctgctgcggctttcaaatccttctctggggttgctagtaagatcaagcttgtatatacaatgttaaatcttccagcttggaataggtaaggaagcttcttgttgttgttgctatgctttggtatccattttcttataacttatatgtctctttgtgtcttgttgatcagtttgaacctcacggttaattatttctcgtcaaagtatgcacaccacggtggtaaatctccaagtttacctttacatatgaaagttcaagtttgtgctatggaggatcttcagtatttcacaaaggtagatgacagttctcaacccgaagatgaagagagtcccgaggttaatgaagaggatgatgatgatgatgatgatgatagtagcaacctaagccagcctgggaattcaaatacaagctcatcggatgaccggcattttgaaaaagcgaaagaacctgtaactgtatttgatgaagaagacagattagcaaatttcagtggttttggcttattagatgaagaagagactgttgaagatgaagtatcacatatcactgttggatccattagagctactgagaaagaacccgagactgtattcaatgacagattagcaagtttcacttgttttggcttagtagagattgttgaagatgaagtatcacatggaactataggatccactgaagctatggagaaagagtgtaggaaaagaaggaaccatatcacctcaacgacgactgaggttgatgtagaggtgatagatctgatgactccatcaccaagctgcagagctggatcatctatgaagagacgaagagtttctgagtttatagatttgactatgtctcctaatttcatagagtcgtagaagtaatacacgagaatttgtgtgaaaatcaaaatcaactttgttgtaattttcttttatatctaataaaagatttcaaaccttttgaatctgagtctctcatcttcttccaagagcctattcatgaatcgttttttcgtaatttctaacttacgtcgcaaaacttaggttcttaaacgacacttaatttaaaacgggggagtatgtattttgtgttagtgtatatctgttgtcactttatgatttcaaaagtataatgaatattgttgttgattaagaaagaaaaatccatattgttagtctccaaatctccattattgcgtaatctaaagttacttagtggtgctttctagtttctagttgcaccaattaagattcacctcaacttttggttctcaacagaattgacacaacttctgcgaatacatgttataacaaggcaacaaaccctttcgtaataatactatttcataattattttagttccaagatatatgtccacatgaacatcaacatttacacttgagaaaaggaaaattcgtttaccgattatcgaagagtgtgaaattgatgagatcggcagtgtccacatgttctcgatgttgattgttgactttatatttttgttcagtcatgcatatcaaaacgtgagcgtacttgacactagagaaaaagaaaattagcacgaacaatagttttgcaatcatggtcaatgatttaaactataaactagttaagcatttaatttggggttttagatgtaaacatccttcacgtgcaatcacatgtccaatagtatgcatttctttcttcttttgtaaccattgtcttttgtatatatatcgtgttagattttttctacagcttgacatatttcacatttagtagcaactaacacgtgaagaggttgaccaaagataaaacaacgaaaaaagttcgttgtcgcccattttaacatataaaatgagtaatatttatagcaccaaaattagtctttttaaggattaaaatttattttctacgggtactattgctagttgctacgtttaaaccataatctgattgagtctgatcaaatcggtatggttcatcgtgattgtagaaaccttgtgcttgctcaaatacaaggactggtacaattgcgcaatgttttgtttaagtttttttttttaatcttcaactaactttctttaaccacctactctaatgtttatatatattatgaatgttttgatcgtgggtcgaccttatttaaattaaatcaccaaaaaagctatattattatggtcttcttcaaccacatatcttttagtatcgattgttgtattttttagtaacaacatgcaatatacaataacaaaagttacaaaacttacatatataaaccattaagctacaaaattttggtccgatactacttatgatctgttccaaatctcgagcttactcataactcgaatattgataattaataccttaacgtacaagagcaggacagtaagacttctttaaacatatagtatacaatataattaagtatagaagtctatagattttcccttttaaataaagaaagatcatttaattcaccctaatgactctccttattaaagaaactcttcttcttcttccttgcttctcttcctcctcctcctccattgatactctaaaataaacttataaatagcatgcgtgaatgtcccgagaaaggtaaaactaaatcaacatatatacatctatttacgatctttttgattgataaatcaaatcggtggtggtgaaaatg

SEQ ID NO: 11222 - DNA, 3000 bp, Unknown
  misc_feature (1)..( 3000): cDNA_ID_1807086_gDNA_ID_2214484_Annot_ID_183462 3000 nt of promoter + ATG
gattttcccttttaaataaagaaagatcatttaattcaccctaatgactctccttattaaagaaactcttcttcttcttccttgcttctcttcctcctcctcctccattgatactctaaaataaacttataaatagcatgcgtgaatgtcccgagaaaggtaaaactaaatcaacatatatacatctatttacgatctttttgattgataaatcaaatcggtggtggtgaaaatgattggaaacaacagggaaggatttggagagtactacgagaccgtcaagaagataaagaaagatccagccttcgagacaacgacggatcatgccgtgatgggaatcaggagacatgtggcggtgcctccggggacaacgttgaacaccgtaacaccatgcgccgcttgtaagctcctccgccgtcgttgtgcggaggagtgtcctttctcgccttacttctcgccgcatgaacctcacaagttcgctgccgttcataaagtctttggtgcaagcaacgtctccaagatgcttctggtacacatattttctacattaatgaatatttattttcttttcttagttaaggtttcttaatttgattactcttttgatatcgtatttgattaatctgaatatatagttgaacggatctaccatttttgatatttgactctttccaaatatattcaaaacatatatttatcccatttgttatagtcgaggtggtttatctaactagtataggtagaaattcattatcctaagatgcacatacatactaagattgagtattggtaagttatttacttttcgtacataatatttgattgagctatatgtatattaacttatggaataagaaaatgttgtaggaagtgggagagagccaaagaggagacgcagcaaatagtttagtatacgaagcaaacctaagacttagagatccaatctacggttgcatgggagcaatctcagctcttcaacaccacattcagtctcttcaatccgaactcacgaccgtccgtacggaaatcctacgccacaaataccaagaagccaccaccatcacttctctccaaaacaacttcaacagcactacaacaacttcatcagtgagttgtgatcagcatgctctcgcctcggcgattctcctcccaccaccaccgccaccacctcctactccacgaccaccaaggttgttgtcctctcagccagctccaccgcctacgccacccgtttctttgccatctccgtccatggttgtgtcgtcctcttcatcttctaattcatctgccaccaattctatgtataatcctcctccatcttcgacggctggatatagcaattctctgtccagtgataataatgttcattactttgattaaatcagaattctgtgttccttaatttttttaaaatactattatagcccttattataagctacgagattgaatggtgatccatgttaaagatagggttttcaacttttgatttattttatttttcatattgattaatgggttccattaccatactaacgtacgtaaatacaatggtaaagaatcttagtatcatgagggtattactcatgactcatatgacaattttagtaaccaacacgaagttgaaaaaacatttacacaaaataacacaattccacattaaatcagaatcagaaatctaacatattgttagtcctgaaaattgagaaattctactaatgaaattatgagcttataattattaaattacatgagaattaacattaaatggaggcgttgactaaacatataaatttggcaacgagcattcccacgtacctctaattgtcattaatatataaatattaaatatagtttttaattaaaggtattaattgatcaattaattaatcataacccaaacagaatctatttatatcccataacagagttccagagtcaccacatgacgcaattacatacatatagtactagtatttcttgattacacagtgtcccacaagctcttaataatttacattaatgtttcttaatctcaaccattacctacaggctacagctcatgttttgcttgttaacatacacaatgtattctatatacatgtatgcagtatgtatatattttcttagatttttataaatactattttgtaattctgctatataaaagtataatatatgatatatccatcaatgtataactaaaatttgttacgaaaaaaatcttttaaaaaacactagaagttttttttttaaaaagacttaacaataaaactttgtagattttagtgagattcactgaagatcaaacgattttcagttttttttaaaagaaattagtaaaagtttggtactgagaaaatgtagctcttaaaaaaaaagagagaggattggattcaccattcacaaaatggtaaaaatactaaaactaaagtgaaagagagaaagcaatattttcttcttaacacatctaattgcacaaatacatgaaacaacaattattaatcttcttaactctaaacaacaattttatcttttaaaatatgatttttaagattatcaaactttgatacaactagttaataactctacttcacattgctcgttagcgaatctactcacaaatattcagttttgggcagcaaaattcagtaacattcaatttaaattcatcaagagggagggcaataagataacacatgatttggcgaaatttggttgtaattcatcttgtttttattctgattctagaactcttcctagttggcttcaaaaacatcactgtaacaactctatttaatcaatgaatttgttttgacgtaaaaaataaataaatatgattttaaagataattagtagtatttaagacgaaatgcgtgacgtttcatggaatcaaaacggcgcgtagtgcaacaagtatatggttaactgatacgccacgaaatagtcggggataactaattcaatcgttaccgaaccaattcaccggcgagagagaatg

SEQ ID NO: 11223 - DNA, 3000 bp, Unknown
  misc_feature (1)..( 3000): cDNA_ID_2701975_gDNA_ID_2214484_Annot_ID_183460 3000 nt of promoter + ATG
gctacggggatttatgcggtggctacgagtcttgtctcggttcctgcggttttagtacttgtaggcattgctctgtttcttcttgctcctcttgctataccaattggagttggatttaaagagcttatgtcctctagaaaaactcaacaaaaggtgcacgatcttgaagctcctgtcgataaattttatttcgtagaagaagatcacacgaaagaagaagaagagtttgagaaggcaataattggagttaaagaagaggtcgagtggacacaactatggaagaaactcgatttttggatatactttggactctatttgttcggtccaacggtcgggctagtgtttacgaacaatcttggtcagatcgctgagtctcgtggctccaccgccaccagttccttggtcgctctctcgtcgtcgttcgggtttttcggccgcttgttaccatcattactcgactacttcttttctaggtaaaaatcacttactttttttttacccttttgattaattagcaagatactaattaaaacctaatcaattaattccttcataatacaactacgttgacctagcacgtataattataacatatgttgcattctttgcatctatctacgtgtttggtctcattcatcgaacaaccttcgacaaatcgacacattctttataatcaatctcctaatttataggaaaaaaacaatatttattctaacattttatttttctttactacaggaacaaatacatgccatcaagtccggtttctatggcgggttcactggtagcaatggtagcttcgtttctcctcctccttattgactccgacattgctctctacatcggcacggcgatgattggcatcttctccggagccttgacttcactctctgtcacaatgacggcagagctttttgggacgaagcattttggagttaaccacaacattgttgtcggaagtattccccttggatctttttctttcggtttgttagccgctaaaatttaccgcgacggagctgctctttacggagatgatggcaagtgttttgggatgcattgctttcaaaccactttggtattttggggaatgctttgttcgatcgccgcacttctcgccgccgttttgtatatacgcaaccgcaagttctattcgcagaagccgtagaagaagaagaagaaccaacaacaagaagttttgatggcaaaccgtagcacattttccgttggtatcaagcaacgcaatttttttggtacatccgtagatttttatttaacctatggaaaccggttaaagtgtaaccgacggtcaggtttttgtgtatatagactagtagaggatgtaaaaactagatatagtaacaaaagcatatatgcattgaattattattgatcgaaatttttataaagatcctttttaattattattcttaatcatggttttatttatttatttaagaaatagtgaaatgtattcttaataatgtttgagagcaaatcaaattttgtttttgtttttggctgaattaagctagatcatttatgaatgctggagaatttaaaacgactttgtttgattattaatggaaaaaaggacttgacgaaatttcgggagagtcttattaatatatgcctacataatattctgttggtacgtacgtagttggtgttcttgttggttcgaacgtgggttattatttaactaattttaattgtaatgtgaaccaggttttatgggaccccaacaacaatcaataaactttcacctaaatcaattcttttcattactttatgatgtccagatatttttttattggtaagtgattattagacatacgtcggttttgcgagagtgacgacgtgaacgttttcacccacaaaggagaactaaaccaatatatggtcgagatcaagacatgcatgatttacgcagcatttaagatttgaacttcatacctatatacaatttatgccacaaaacattttcagtgaacgttaaaatccaagtatccaattgttagtataatctagatacacaaacaatgataaaaataacattttgaaattaagaaaggataattttcatagtattaaacctggtgtaaataacttggagatagataaatatatcattcttttaaatttgttgtcatgatcagtggttaagtccacggaacaacttacaataaatgacaccatacgtggctactgaggaggcccggccaattttaaacaagatattatgtatcttaatttgaattggttagtacttttacatgttggttaacgtagtctagactcagagagccttttaaaacaataacaaaattctttaagaaaaataacccaattgcaaacggtccttaacatgtacatgactactagcatataacatcttgacccattgtagtaaactagtaggtataaaataaatattttataaacatcatgatttcaagtgtttatggccaattttcaacatgaatagtttatttgaatcacgtccgtacaatccgtctccaaggaggtaaaatgactttgccaaatatgtagttcatggctcagattaattagcattatttgtcttaacataaaaaaaatacaaaattaatagtagtttaagataagaaacgttatattcattgatttacttaatgcattgtttttaataaaatgttatttattacaaaaatatttttgtattttcaatatgctgatggacataaaacccttttcaaactaattgaccaacaaaaatttatctactttttttttacaaatttagtttcaatttcttctgtttttgaccatactatagttatatctttatttagatcttgttttttctttttatcttttgttatatttcaagaagaacaaacttacaaaataagagaaccagtatggttcaaaaaccaactcactcctacaaaagtcaaaagttgtccttataaattgtgaaacaagaaataaaaacaacaaatcaaattaattatcaca

SEQ ID NO: 11224 - DNA, 3000 bp, Unknown
  misc_feature (1)..( 3000): cDNA_ID_2994242_gDNA_ID_2214484_Annot_ID_183454 3000 nt of promoter + ATG
cctggatccatcgatcattcactagtagtcgcaatggttgccatatttcttcaaggatgaaagtgaaacatcctcgatttattttctcagtgtaaagaaaaatgtaacacagaaacaaaaaggcattttagtacattgcatttttaatgccttttgattcaatcggctcacacgtgaattgtattatctatcacatgaatattgagatatactaaggtctaaggttaaatcttttttcagaacaaatttgcaagctcagctggaaaaatacaacatcatttacattattttaaaaagttgttgaacatttgaatcaaaatgattcacaagacttttgttggaattttgcaataaaaaaattgatctcgagtctataaaagtccaatcccgaccactcattctatttccggttcaattctgtctagccggtcaaattcaaatccggtccatccggtcggctcattcacgttggtacaaaagtttaggaaatcgaaccaacaaactaaacggcgtcgttaaatagtctgatgttgaaacgcagctatttcttttactcttcttcgtctctctcattcccagttcccaccattagggctctctctaaattcctcagtctcgagaatcttcatcgtcttcacgagctcactcgaagatgttaacggcagatataccaccgaatcaatcaatctacatccaaaacctcaacgaaaggatcaagaaagagggtaaacttctcttctcgtttaatctaattcgtcaagtaaatttccaaattcttagatgttgaaacctccatgaacttcctgtaccaatgattcaagcttctacagtactgaatgttagggtttttgcttgtttttagcttatatagagtgttcgtttctaaatactagggtttcagaatcgtattgaatctagtgacaaggttataaggaagatatatatgttggtgttgtctgttttcgccattgtatggataattgttatagacgtgtgaagtagtgttggctcagggcagtatcatcaatctcatgctttatctgacttggtttttgttttctcagaattgaagagatctctttactgtttgttctctcagtttgggaggatacttgatgtggttgctttgaagactccgaagctccgaggacaagcttgggttacttttagtgaagtcactgctgctggtcatgctgttcgtcagatgcaaaattttcccttctatgataaaccaatggtcagtatttcatcactcttgagtatatcaatctctttatagtttccatgaaagtgatcttctatgtgttgtatagatcgatagaagcaaatcgttagtgtgtttgtgtaattgattactaacaatttgttttggaacctttgacctttttctattcccaatccattggtagtcatatatgtgtttagattttgttgctgttgatgagtaaccaatgattagtatccactaccttttctgtcttgagtatatcaatctctgtataatttccctggaagtgatattctgtgtgttgtatagattgattgatgcggtaaaagcagaaatccttagtgtgtttatgtgattaccaatgattacctttgactgtgttattctcaatcaacatttagttatatgtgtgtttggattttgttgctgaccttctcaaatcacattctcttatgatttctgttgtcaaaatgtttgttctgtttgatatatacattgtttttataactaaatcttacctctttcgattgtttgtaaactattcaactacttccaatcaggttgagatttattattattcatactttttatgtgatcttttaagtgcagcgcttacaatatgcaaaagcaaagtcagattgtctagctaaagctgagggaactttcgttccaaaagataagaagaggaagcaagaagaaaaaggttttaaactttatttcttctttttgcattttgtcgtagatgttggttcaatgatacaactataaaattttcacttgcatctaaagttaacaaacttcctttcttactttcagttgaaagaaagcgtgaagattcccaacgaccaaacacggctaatggcccaagtgctaatggtccaagtgccaataacggagtccctgcggtaagtgttcttgttctcaccttcatcttcagaaaaatcttccattgttggatcatgtgaaccaaactattgttatctggagatgatgctgatgttttgcgttttatctctgctcttcttaatgcagccttcgttccagccgagcgggcaagaaacaatgccaccaaacaacatactcttcattcagaatctcccacacgagacaacaagcatgatgctacagcttctcttcgaacagtaccctggattcaaagagataagaatgatcgacgcaaaaccaggaatcgcgtttgtagagtacgaagatgatgttcaagcttccatagctatgcaacctcttcaaggtttcaaaatcactccccagaatccaatggtcatctctttcgccaagaaatgataagagtcttgtttttgtttgtttgttgtcctttaagacgatagtactggaccaaccaaacctggtgtgtataaccaaccaacggttctattggttaacggattaatccggttttggtttaatcattgaaagagacccttgaaacgcggtttcacacttgacgatttatcacaaattaggagacgactcatcaaaaaagaatatcttactggtcaaccattttatagaaatattaaaatcaaaaatgatatttaggccaaagtagaaaaagacaagaagagagagaaacaaaaaaaaccttgctcaatacgccaccgtcgtcgtctttaacccaatctaaaagcctctgttcttttttagttttatcctctttttcatttcaagatcaatttcataaaaaagtttccttttttagcgaatcctctgttttagaaatcttaaagttgtctcctttattaaagaccatcatg

SEQ ID NO: 11225 - DNA, 3000 bp, Unknown; identical to SEQ ID NO: 11220
  misc_feature (1)..( 3000): cDNA_ID_2707482_gDNA_ID_2214484_Annot_ID_183453 3000 nt of promoter + ATG

SEQ ID NO: 11226 - DNA, 3000 bp, Unknown; identical to SEQ ID NO: 11219
  misc_feature (1)..( 3000): cDNA_ID_2707474_gDNA_ID_2214484_Annot_ID_183449 3000 nt of promoter + ATG

SEQ ID NO: 11227 - DNA, 3000 bp, Unknown; identical to SEQ ID NO: 11224
  misc_feature (1)..( 3000): cDNA_ID_2994242_gDNA_ID_2214484_Annot_ID_133328 3000 nt of promoter + ATG

SEQ ID NO: 11228 - DNA, 3000 bp, Unknown
  misc_feature (1)..( 3000): cDNA_ID_2701983_gDNA_ID_2214484_Annot_ID_133332 3000 nt of promoter + ATG
taaaaaaacctaagtcaatttgaaaaagcttaacagagaagtgttttttcttttttttttggtgaacgatatagatttttaaaatatcaaaatcaatatctctgaatttaacataatttcctttttatctttacttaaccgacaaaccattccctatttttaactgataagcggtcaactgataagtgataggacatgataacacagtttacctctaaatcctttagaagaaaaaacgtttcgagaagttactaatccaaccctcctttaaatgcagataaatgtagaaatcagcttaattagacaaaacaatatatttttttataaagtaattacctttcttttcgaattgttgcttgttttgggtgggcaagggactggtactcgcataatttcttggatgagtgtttctttgaatacttcggtaaccatgttatgcgcatgttcttttagtttttttttttcgttttgttctcttatcaagaaacttatgtttagtaaattatattgtgtgactaattttatttaagaaagtactgattcaatattgttgaatttcaaatgactttcatgtgcattttttttcatcttttgatcttataaacatgttttatttgtaaagaaaccaactaacttttttagtatttggcgatactaaaaacttttattacatctcataaatttttaatatgtctcaaatactgaagaaatctcatacttgattaaatttgtgaagtaattttatactggtgcaatgtggggtgactactttaacaataatcgattacaaaagcaatatccaaagtgttacttaagagtcttattctcagttttttatatacttttttactaccatttttagaatcgattattacttatgttttctctaatcagtaaaaatttgtatcgctttgtatcactaatcaaattcggtatctaaactctaaataaaattgttaaaatatgtattattgcttgggtttaaatgagattaacaagtcacttataactaaaagttcagtaaactgtctttagtctcttccatttagatatataaattatgttttagtttatagaatccacaaaaattagatttcgcagaccagatctattgaatggtttaactttaagatattaaggtagatacatcgacgtgcaccaacacgcctacatgaatcttgtattcatatttggcgcagacatgcatgtacatttgctatgtgtacttttttttttctttcatctgaacatgattttttaatttcatttctgcattacgctgactcctgaattttgataaatgtttttttgagcattttatgctcatctataattcaaaaaaacacattacgtcaaatttaaacctgaatgataacacgaatttttttgacaaaattataaactacacaagttccaatttctttctcgattgcatttatagttttaaacttcaactttaccaaatatatatttaataaaataataatatacaaatgcagcatttaaattttcgaaattcaacattattggaaatacttacaacgaaacacgtattctgacaaaaaaatatattaacattttgtatagaataacatggcgctataattcaacgctatatttactcatttatttgtactttacacaatgatagattatattcaactactatttaattaaagtctaaccaatcaattttgtacggcacaatataattattcaaattcttaagatatatgacataaagtgtactaatacagaattggcatataaatatttgatataacaatttaatgttcacacctaaataaaaatgaacgtgattgattctttcattttcttatactacgtttcatgatgaaattaaatgctaattatgtaaaataatgcccttgtttttcggaaacgcacaagcatggcaaaaggtttaggatctaagccgtctctcgtctgcaattgaccaactttcttttgtgacttgatttctacgtgggaaaaatggacaatatattctatagtttaagatgataaaatatttctcactgcaaaaagaatgaataagaacatacgaggaagaatgttaaagacagcaaaaaaaagaaataagtcgtatctagttggttgatatccaactgtcgtttcttcatcagataaatttccaataatttcagacgacaccaactccagtgttactccagttgccatgcggcttatcttcaacctatttttgaaggctattaagtattaacatatttaatatctccaaattaaacatttgctacctaccttaattgaaacattcaaatctaagctcctttgcgatattaattatgacttataaaccaactttaagaaagaaaaaaaaattgtttgtcacacataatattaattgcatgatagagcaatgagagaagaacacattagtgttgggaaagaattttattactctcataagaatgaactagataatcatccacgttgtgtgaggggacaacaaactattagatatttgaagaagttttattatacagaattatatatatatacgattgtaaacaacggatgccattttttcttataaagagaggccatggattatattcttcaattgaaatagagaaacataggagaattgtttactatcatggatcatataactagtttgttaagtttccccttaattataagcatcctacaaaaaaaaggagttttaaggtctatgcgtagactctcgtaggtctcaaactactcctattattagtatagatttcattctttctctcccgaaaaccaaaaactattttttttggatttttgtaactaaattctaaaacagaaacaaaaatctaaaaatcttccttcaaacgctgagataattgctcactgttttgacagtttcaattctttaatgattggtcaagcgaagctttttgaacattttgctggctatccattgatgagtatttcgaaatcaactctcaaaaaagttattgtgtgatcatg

SEQ ID NO: 11229 - DNA, 3000 bp, Unknown; identical to SEQ ID NO: 11223
  misc_feature (1)..( 3000): cDNA_ID_2701975_gDNA_ID_2214484_Annot_ID_133334 3000 nt of promoter + ATG

SEQ ID NO: 11230 - DNA, 3000 bp, Unknown
  misc_feature (1)..( 3000): cDNA_ID_2701972_gDNA_ID_2214484_Annot_ID_133335 3000 nt of promoter + ATG
tttggcaacgagcattcccacgtacctctaattgtcattaatatataaatattaaatatagtttttaattaaaggtattaattgatcaattaattaatcataacccaaacagaatctatttatatcccataacagagttccagagtcaccacatgacgcaattacatacatatagtactagtatttcttgattacacagtgtcccacaagctcttaataatttacattaatgtttcttaatctcaaccattacctacaggctacagctcatgttttgcttgttaacatacacaatgtattctatatacatgtatgcagtatgtatatattttcttagatttttataaatactattttgtaattctgctatataaaagtataatatatgatatatccatcaatgtataactaaaatttgttacgaaaaaaatcttttaaaaaacactagaagttttttttttaaaaagacttaacaataaaactttgtagattttagtgagattcactgaagatcaaacgattttcagttttttttaaaagaaattagtaaaagtttggtactgagaaaatgtagctcttaaaaaaaaagagagaggattggattcaccattcacaaaatggtaaaaatactaaaactaaagtgaaagagagaaagcaatattttcttcttaacacatctaattgcacaaatacatgaaacaacaattattaatcttcttaactctaaacaacaattttatcttttaaaatatgatttttaagattatcaaactttgatacaactagttaataactctacttcacattgctcgttagcgaatctactcacaaatattcagttttgggcagcaaaattcagtaacattcaatttaaattcatcaagagggagggcaataagataacacatgatttggcgaaatttggttgtaattcatcttgtttttattctgattctagaactcttcctagttggcttcaaaaacatcactgtaacaactctatttaatcaatgaatttgttttgacgtaaaaaataaataaatatgattttaaagataattagtagtatttaagacgaaatgcgtgacgtttcatggaatcaaaacggcgcgtagtgcaacaagtatatggttaactgatacgccacgaaatagtcggggataactaattcaatcgttaccgaaccaattcaccggcgagagagaatgaatacgccgatgtcactctcggcggcgcgtggccgtatgctaccttttttagagaaggagaaatcagaagaagagtctgaaactctggaatcgagtctcttacagctaatcgacgacaatcgtcgatcatcgttacagctccgggaaaaaaccggtacgtaaatcgacccattcctcagctaattctgattcaaataatcgagaatgaaaaagtgagattcacagagacacaaaatggaaaacagagagatcgagaaaggaagcaatcaggcacgcggcgagaacggcggatctgctagtgaaggcggtgaacggaggagtagaggaatgtttcgttaacgagaaacggattgagtcggagattaggaatcttgccattacggtggcgaaattcggcaaacaaacggatcagtggcttgccgtcactcacgccgttaatagcgccgtaaaggtttctgatcatctctattttctacgagtcttcaaaatcacgtttcgtcttctttgttttgttcaatgatggatctgtgtgttgattttgttaggaaattggagattttgagaattggatgaagacgatggagtttgattgtaagaaaatcactgctgcaattcgaaacattcatgaagatcaacaataagagcaagttattgtgattcattcacttgttggtgttttttgatagagagttcttatagccattgatgttatataccacttctttagtgtttctctgtttgagtagtggaaatgattggatcaaaagagtttgatagtctactcaaaataaaaacatgaactactcttttggccttgttgggttgtctttgtgagtgttacaagatattttcttcgtacttctcttcttcataggcttgttctttagcctgagtaggattcatcatgtgccttattatcaagacagactctctctttttgacctcttttgctgagtgagtgcggttaggctgatctagctcgtctggtatcatactcccgacctatgccataacattcttttgtttgtcaaaagaatgacaacatcaaaaagcatcttcacctatcaaaatgcagctgagttgttttcctttaactacttttcaaataacgttcttcaaacatgttttcagcaagccgcaagagaaaataagctatttttatgagaagaactaaaaccacagggaggcaagtcactatgacttaagatatataatacatcatcagaaagtttgaatgatagttaagcctcagttagacccacaaccttttctgcgcgagtatctgctaggcaatgacatagaaatgtaagcttttaactgttaagtggctctcttttaacgaccataaatgagaagcataatcatgtggaaaccaaatcaaggttagtaccttcaaaacatgtttgaaagagaagagcttaacgtaatccagtttacaaaacgaaaaactaacgaatatcacgaatagtgagtgtacagcttggcaatttcgagaattggaatctcaacctagataataaggtagagaagtttagatctacgtaggaatcaattgtcaatatgaaatgttcagttctaaaagacgatcccaaaacgcgatcgtgcataggatatataaaaaaaaaactacacgttgatatatagttcagttccaacgtcctgatgttttacaatatatataacaaaaccgtgttttaaattgacaaaacggcacgtagtttgacaaaagaaatcaccggagcttttatgttagcgccggttctagaaacttagccaagttttatttctcatg

SEQ ID NO: 11231 - DNA, 3000 bp, Unknown; identical to SEQ ID NO: 11222
  misc_feature (1)..( 3000): cDNA_ID_1807086_gDNA_ID_2214484_Annot_ID_133336 3000 nt of promoter + ATG

SEQ ID NO: 11232 - DNA, 3000 bp, Unknown; identical to SEQ ID NO: 11221
  misc_feature (1)..( 3000): cDNA_ID_2701968_gDNA_ID_2214484_Annot_ID_133337 3000 nt of promoter + ATG

SEQ ID NO: 11233 - DNA, 3000 bp, Unknown
  misc_feature (1)..( 3000): cDNA_ID_2717194_gDNA_ID_2214485_Annot_ID_133341 3000 nt of promoter + ATG
tttcaccatgttggagggaagatcaaggtacaagatgctcccatcacttgttactcgagcaccagttggcccaaacaatttttgcagcaaatatctcgtaatggcctgtatatttggagtcaacgagttgattataatgatttaaacaaaaacaaagcacaacagagagacagacagaaaatggaaaataagcattttaccccaaaaatcccaaaaacagccaaatgaattaggcatgatatgtactccaaggactttggtaacactcgctcttcctcctttccctgtgcaacccacgagctacaatagatcaaaacattggacaaagaaaccaatactaacaatgatgtgactatgcaaagttagaggtagtctctacggagttgtttatttcaggtgacaagagtgacttggtcggtaaaggagatgctgttatgtcctcaggcaaagttttatttacggaagcagtgttgaaagctcgaaggtcatgtaatatatcttgttcttgacgagaagtatcatgagtcccttgttctataaaatcatcagcagacaaacggctgcttctaccagcactatgccttctccgaagtgagcggtccccaatatcccctgcctctgagacactctcactatcgacgtcattgtcaattaggtgaggcaaactacgtgataagcttaaagaagaggctacactgctctcccgactaaaagacttggcttgataaggttctatgctgctttgacccgtatccataggcgttgtagccaaagcataagattcttaaatgatgctccacctgcacatattttaagccacagccacacacacaagaaagaagacatgaaggaatgtgcaaaaagagacaagagataatcgaacaatgtggcaagtaaacattcgagaaattcctaatgcttattaaagacactgtttgaaaagtttagctgtaatcttcaaaaccatagctttttgatactaagacaacaaattcaaaaaagttcacatattcatgatagattatgactttagtttattactttctacagaagcagaataagaatgacctggtgaagggatccaaaaacagttttcaagattttgtcctccactatcccttaaaacaaaagataaaaatttacttgcgttttagttagtggaaatcgaaaaaaaggtagactaaaataatcacttgttcaccaatagagaaaaaaacgaaaatcttaaaaagttgtacaggtggcaaagacgaatgaatacttttcttagattgggacctgttttgggtttggattttgagctagacatttaaaattcagcagctttacctaatggcgaattcaatcttaatcgtgaagaatcaaatttgatcccaaaagtcgccggcggagaaatcgagctaacaggagacaatcgaaaaccatcaatttattctctggtttattggatgttaagggaagtaggttcgattgtagaagatggacgaacaacaaagcagaagacgattgtaactttgtttagtcgaacacacatgtacagacaagtagagttggtttagtcgggaaaatcgcaccctaaaaaaaacaaaaacaatacataagttttaaaatatttctaaattatgggccacaaagagctggcccagtagccccgcttctcataacagattttttttgtctctggcggataacaaaaatatccttggaaacgacagcccaaacaaaatcatctttaacatatatttagatgttacttgaaatttgatcatatattttgaaaaaatccagataaattattaaaagttaatggtattaaaaaaaaagtttcattgtttttagttgaagaaaatagtgtcattttgattctacatttgatataattttactaaaaattgttttttttctgtgttaaaaaaaaacagcatttttgaggattgaatatgaaggtggatttctttaaagttgtgtcacaactgataaaaataaaaataagaatcaagttggggagtggcaatgaaaggaataattctaatggcggcttttattggcaaccttcggaaaaataataaaaacattcgtatactttgccgtcaaacttaggaacgtcgtcgttttcgtcgtaatataattggcgtaacgcaactctaaaacgaatcaggatgttccacgtacactacactaggcttttaatgtggagcccgtgagagagccacccctacttggcattgacgcaaagatttatatttgggtcaacatcagcaactgtacttaagtacttatatatattaattataagattatcttcttctttttttttggtttaatataagattaccttcttaatatcacgacaactaatctaatcttctccttattttttgggttttttgatagaagaagaaaggtcccgtaaataaatgaaacagtttcggaattcttctatttttgtcgaccacttgtgttatccgcagctagttgcaaaattcttttgtttgattgtataatcaaattgattaatgaatcaaataaattggcaggaaaaaaaaaaaaaaaaaaaaggaagcacaaatgtcagtgaggtgagcccaagtcttcgccacctctctctgctttcttagtttgctactttgctttgccttttcccaaagaagaaccataaaagtatgatttcttattgaagccaagactagaatctatcgtctagggttctttctgggttccaaggaaaaatgggttcatcgaagaggcaattcaaggccatgctccgcaagaattggctcctcaaaactcgtcatcccttcgttacttcagctgaggtttctctctttttctttgctcctcaaaactatgtcgttttcatgcttattcactgctcgtcttaatgggtcttcttctccttgatgctgaatgcaatttttgtttttaaaatttcgaattgttgatcaaattttgcttctttctcttattcattggcagattttgcttccgactattgtaatg

SEQ ID NO: 11234 - DNA, 3000 bp, Unknown
  misc_feature (1)..( 3000): cDNA_ID_2702019_gDNA_ID_2214485_Annot_ID_183490 3000 nt of promoter + ATG
taacaactttacgttttggtaattgtggaatcaaccatgataatcttatattattcgatattaatcaaaatatggcttaaatagttaaaactcacacataagtccataagttccaattgtataatattatacttttaataaattatattatatttatacatatgaataaaaaggaaggtttcaggaattcatggttacaaaatgagtttaaaaagatgaacatttcccccaaaacactaattagatcgtacggttggtgagcctaaagaagtagtgctactaataaatgagaataatagtttttggtacgacatcccacaaatccttaatgatgagagcataaatctcggcataatcttcgtttcaagagttcgaaagcatattcatgaatattcacaaatgattacgcagaaagtcagtttgataggtaaagcatccataagctaatgactaagttttcattgtaatcattggttaacattttctctaacaatgttaattattgaaaatttaaaacaattaactacacttcttatctccccttcttcacgagtttaaagcgacgaggtgcttccatcattatgtcttctctttttcttgttgctcttcttatgattcgtctttaactcattcgcctatttgtgaaaaaaatagattgcttgaaaagcataaaactaatcaactgaaaaaatgtatatgcataattaaaaatcaattcatagaaaaattcagtcgtactttcgtcaattcatggatttattttttgttgtagctaaaacttcagttgtactaccaaaacaagaagaagttcaacgtcttgttgatagtatcatgagttgtgaaaactcacgtgaaaagaaatgtaactatgtaataaagttttttatagtattaatagaataaaacttgcttaattggtggtgttatttatatatacttaattaggcaattaggtttcaagaagaggaaaaaaacgatgggacggaggtggtgagtggtggtggtcggagcagacaaagaagggtcctacaatttgcctaaccgtaaagagccacattcctttttcttttaccccatcccgtgagtgaaccccactcttcctcattctattattctcaatctatattttcaaaaataaacataaatatacaaactctttgcagcataaaggaatatgttgataaaacggagctttgtttatgattttgtttcattatgatatattttttttaaaacatttaccaacaatttcttagaaacataaattaagagctaactagtatatctagtatttctcgaaacccaaactcatgttcttaattttttatttttttctggaatgttaatgactatcggatatttgagtataattgtatgaatttgcttgactgttgcatactttgaatctttctttctagtttacaattgtgcaaattaaatcaaactcgttttcagtattttaccttttagtactatacttaattatgtcatctgtatcaggtaatagttagaggaaagaggaaaatggtgtaatataaacaacaattatttgtatgtgagtttacgaccatcatctagcttaaagtacacaccaatgagaatatgaacacagtttagctcaactcatatatgatctatccgacatcttttcaatgttttgggtcgcgtaggagtatcggaagcagcttaagacatagctatttaataaattgttggtatgttttatttataacaattatcacaaaatcaaaagatactaatctcgctgtttgaggcagacatctgagaaaacatgtcttctaccaacattcaagatttgacaaatcgttgtttacgtattgttatattgagcatcttacaacaaaaatttacgtgtattttgaaactcggaaatcaatcatatctattgatattaacacacagtgtttcctgactatcgtcgcagacgaataataatagtaataatcttccacctcgtgtgattctataatcttatattcttgacataaatgtcgtcaaaatttggtatacatcaaacatggatcgtgtttaaagtaatcatcaaaaatcaccacacgagagtagattccctattgtcaaatatagatcaaagagaaaacatgtaggctacaaatataacctagtccctacgaataagaaaaatgtcattataccacaaatgataactgcaaagtgtgtgtaaattttgattttaaaagaaggtaaaaaaataaaaaagatagatttggaaacaatcttttacctctttggtattgaacattgtgacagtatcaatcagtatggtacagaaaaaacgtcagaggaaaagaattatcaaaaaacgtacactcttcattttcattaaaatcttttttttttcttccaaaaaacaaaagcagaaaaaatgtgtcagaaagatttatgcagctttcattcattcatcacttgcactgtctcgtgaagaaaattaaacttttttgtatcagaaattaattacattaaaagaaaagaaaaaaaaaattccctcctttccaagtgcgtttgctttgtggagtctctctcttctctctctctgtctgtgtgtgaagtgagaggatctttgtttggttctgcaatcataatttcgtgatatactaaaaaaaatgcaatttcctcttctctcttataagcagagaccctactactctttgatcgaattttccttgctctcttctctttgttctctcatgtttttttctccctaaatttatgggctttgctctctctctaagccacactcacactctaaagcactcgtctttcttcttctttttcttcagaaacagttattttgacttgaaaaaccagagctttaatcctggattcatggcaaaaagagcattacttttcttttcctctctcactttcttgtttcatttggcttaaaaattcaatgataattttgtatttgggggaaagaagaagaagaacaagagtgtgtgattgattcaattcttaaaa

SEQ ID NO: 11235 - DNA, 3000 bp, Unknown
  misc_feature (1)..( 3000): cDNA_ID_3039306_gDNA_ID_2214485_Annot_ID_183488 3000 nt of promoter + ATG
aaatagcgttattttaaatttcagtaagaaaaattattttgcatttcataaggccagtgtgttcttaattctaatttaatttcagtaacacatgtcacatgaagggtgaaactaatacaaagaactaaactataagctccgatctttttagtttaattaacgatgataaattgttgtttacgctgatatattatagttttcatcgtagaactaaatgtaaaatttcgctttttatgtttacgtgtagggcttctcccaaatgggaactttgagcaaattcctaacaaatcaaacatgagaaagaggcaaataattggcaaatactctcttccacattgggaaatctccggccacgtagagctagtctctggcggtccacagcccggtggtttttacttcgcagtgccacgtggagtccacgcagctaggctagggaacttagcatcaatatctcagtatgtgaaagtgaaaagcggcttggtctattctctaacgtttggtgtcacgaggacttgtgctcaagacgagaacatcagaatctctgtgcctggtcagaccaatgagctaccaatccaaacattgttcagtaccaacggtggtgatacgtacgcatgggcttttaaggcaacgtctgacttggttaaggtcactttttataatcctggtgttcaagaagaccctacttgtggcccaatcgttgacgctgttgccattaaggagattcttcctctccggtataccaaaggtaacaactttcaattccggttcggtattggtcgtgtctcattccacattccggtttgactttattttagaatattaaccgattcacatacaaatcttgaaatctaccacacaatggcttagtatataggtttcatttccggtttggattcatttcttttatattttaaccgggttaaattggatttctggtttttgaagagtaaattcaatttaaccaaaacttccacataccagtttggttttgcaatttggtccttatcttttcatattattttctctttcgcccctaacttttaatttgtttacgtaaaaatcaaccagggaaccttgtgaaaaacggcggatttgagaccggtccacacgtattcagcaacttctctaccggaattttaattccggcgaagatacaagacctaatctcaccgcttccgggatggatcgtcgaatctctaaaaccggttaagtacatcgataaccgccacttcaaggttccctcaggtctcgcagcaatcgagcttgttgccggaagagaaagcgcaatcgctcagatcatccgtaccgtctccggtaaaaactacattctctcgtttgttgtgggagacgcacacaatggttgtcacggatcgatgatggtggaggcgtttgcgggaatatcggcgtttaaggttacattcgaatctaatgataaaggagcgttcaaagtggggcgtttcgcgtttcgtgccgattcgaatcgcacaaggataactttctatagtgggttttatcataccaagcttcatgattttggacatctttgtgggcctgtgcttgataatgttagtgtttttttggcccattaaattattacaaaagtaaaataaatattgttcgatttcaattatataattttctatacttctgtaaaaaggtcgttaagaaactgatattcaaaaaatatcgatattcatatttcttgatccaaaaaatattgcattgtatttatatatatctaatatactgagtgacaaaaaaaaatagtatattacactgaacaatgggattttaaatctgtggatctgtagatcagatataaaagattacataccaaaacgtcatagcctaaaagaaaatcagattcaaaatcacaactaatattcaatctatttttatttgtggacgtaaatttgacttaaagagcaaatcatggcgatgattatgagcggagaccatatatggacttctggaactccgcttaacatatctctcgtgtacacacatgcgcatttaattataaatcttattgacacaaatttctttgttttaacgttttttttctttgtaagttaaacgtaaagctttattaaacaaagaacaaatactacgtagattgcggagaaaagaaccaaaaagttgattatgttttgcttacatataaactcagtgaatgcaattagatgaacacagacgattagctaggtttcgtcattgtaatttataaattcatgttggtgcttgcatctactctaaaatttgatgaattcagcgccagttaataaatattatgctccatagattggcttttttcgcccactttggtgagtgcaacttttccgatagtaattttatcaaaaagaaaagaaaaggcacaacaattcctttattttgttaattaaagggaaaaattggctagacgacaattcatttaacatgttgagatttttttttgtcatcgatcgacggttggacttggagttcatttaatgtcttgattatatttttcacagcagcatcgctcgtgatatgtttgaatcacaccatgcacatgttaggattcgtgcttggaaggttcgttgcatatttttcagcgtctgatagctcactgcacacaaagtcacaaagcacaagacacgtatttttaattattcttttggtaaagtgtaaattagtaattttccatcgtttaatacaaaaccgaagtaacatgacagacagtgagtcatacattgcggctcgtaaggtgcggtctttaacgtggttcgagtttcccttcgtatacttctacacggaaactttctctcataaacaatttttttgccgacaatttagttttgttgttgtatatttccaaaaatgtacatgctgctgcttcctctttgtttcttatttataatatctcatgtcaagtgataactgataagtataaaacctcctatatatagcccacaaggtcctcattgatataggcgaactaattaataagactttaaaatg

SEQ ID NO: 11236 - DNA, 3000 bp, Unknown
  misc_feature (1)..( 3000): cDNA_ID_3039309_gDNA_ID_2214485_Annot_ID_183487 3000 nt of promoter + ATG
ttatttgtggacgtaaatttgacttaaagagcaaatcatggcgatgattatgagcggagaccatatatggacttctggaactccgcttaacatatctctcgtgtacacacatgcgcatttaattataaatcttattgacacaaatttctttgttttaacgttttttttctttgtaagttaaacgtaaagctttattaaacaaagaacaaatactacgtagattgcggagaaaagaaccaaaaagttgattatgttttgcttacatataaactcagtgaatgcaattagatgaacacagacgattagctaggtttcgtcattgtaatttataaattcatgttggtgcttgcatctactctaaaatttgatgaattcagcgccagttaataaatattatgctccatagattggcttttttcgcccactttggtgagtgcaacttttccgatagtaattttatcaaaaagaaaagaaaaggcacaacaattcctttattttgttaattaaagggaaaaattggctagacgacaattcatttaacatgttgagatttttttttgtcatcgatcgacggttggacttggagttcatttaatgtcttgattatatttttcacagcagcatcgctcgtgatatgtttgaatcacaccatgcacatgttaggattcgtgcttggaaggttcgttgcatatttttcagcgtctgatagctcactgcacacaaagtcacaaagcacaagacacgtatttttaattattcttttggtaaagtgtaaattagtaattttccatcgtttaatacaaaaccgaagtaacatgacagacagtgagtcatacattgcggctcgtaaggtgcggtctttaacgtggttcgagtttcccttcgtatacttctacacggaaactttctctcataaacaatttttttgccgacaatttagttttgttgttgtatatttccaaaaatgtacatgctgctgcttcctctttgtttcttatttataatatctcatgtcaagtgataactgataagtataaaacctcctatatatagcccacaaggtcctcattgatataggcgaactaattaataagactttaaaatgtctctctatcactctcttagcattttcctcctcctatctctctgccatggctcttacagtcttcaaccacgtcgagttcctcatctagacggtaagacaatcaacatgaagttataatattcatttctatatcaattaatttgataaactaattaaacatgacgttgtaatattcatggtttccatatctatagggattctcccaaatggaaacttcgagataacccctctcaaatcaaacatgaagggtcgacaaataatcggggctaactctcttcctcattgggaaatcgccgggcacgtggagctagtctccggtggacctcagcctggaggattctatttccccgttccacgtggagtccacgcggttagactcggaaacttgggcaccatctctcagaacgtgagggtgaagagtggtttggtctactctctaacgttcggagctacgaggacttgtgctcaggatgagaacatcaaagtctctgtgcctggtcaggccaatgagcttccgctccagaccgtctttagctccgacggtggagacacttacgcttgggctttcaaggcaacttctgatgtggttaaggtcactttccataaccctggtgttcaagaagaccgcacgtgtggacctctcttagatgttgtcgcaatcaaggagattcttcctctccggtataccagaggtaaatcaattaacatatccggtttagttaatgtaatatattttgagcttttgcagtttgatccttatactttagctatgtgtttatgcttagcctgtaacattgttttgttctcttaggaaacttggtgaaaaatggaggattcgagatcggtccacatgttttcgctaatttctcaaccggaatcttgattccagcaagaatccaagacttcatctctcctcttccgggatggatcgtcgaatcccttaaaccagtgaagtatatcgatagacgtcatttcaaagttccttatggacaaggggccgtcgagctagttgccggaagagaaagcgcaatagctcagatcatccgaaccatcgctggtaaagcctatatgctctcattcgcggttggtgatgcacaaaacggttgccacgggtcgatgatggtggaagcgttcgcaggaagagaaccgtttaagctttcttttatgtcagaaggtaaaggagcgttcaaaacagggcattttaggtttgttgctgattcggatcgaacgaggctaacgttttatagtgcgttttatcatacaaagcttcatgacttcggccatctttgtgggcctgttcttgatagcgttgttgttaccctggcccgttaacaatttgtggcttttaattcttattagactgaatattcgaaacactatactctattcgtaacgaatttgtggttgcactacattttgttgtttcttgtcattagtcttgtcactcataccagtgatgcagaaaatatttataatatgtatggaaactttgtggaaattaaactaaaattaaaaagaatggtgagatagatttcaatttaataataatttacatctttcatccatataatgtatattgctaaaatatgatgtattcaaagtgaattctgaatctctgatataagaacatagaaattcaaaattttacaaagaccagtttacatggtcaactagaattaataagacttcttctatagctcatgggatatattcattatacaaatgacgtggctaaatctataccgtagataatattcagacgtagacgttagcacagtagataaattcctgtcctctgtatcttctctgagctgagaaaagaaaaaacagacgccggagaagagataaagaggtaagaagacccaccgaagacgaaacgtaatcgaacaaagatg

SEQ ID NO: 11237 - DNA, 3000 bp, Unknown
  misc_feature (1)..( 3000): cDNA_ID_3039313_gDNA_ID_2214485_Annot_ID_183485 3000 nt of promoter + ATG
tcccctgaattctgtttaactgcgcttttttgcaacttaggaacgattctggcatctatggtgtacagttcattatccagtcctcggttaaggtaccaaaccatccagccatctcagtcattttttctaattaaggctcatctccttaaattccttgaggtttaatctttaatagggtcctggacatattgattcgagggtggagtcattactgaagaactttgagagtaaactttacgagatgagtaatgaagatttcaaggtaagacggatcaaccaatttattatatatctcatttgatctagctatgcaatatggtcctcatccggagctatttaactgatatgagttactcttcctctagagcaatgtaacagctttaatagacatgaagcttgaaaaacacaagaacttaaaggaggaatcccggttttactggcgagagattcaaagtggaacactcaaattcaaccgtaaagaggcagaggtacatggaacagcttctttttccttctatattttctcataaactaagaaaaccgcctcccgaatgcatgacccatgcatatatacttcctcgaatagttgtatcacttgtacgattaaatacaagttggtatgatggtgttgaaagtgactgatcgatgagagaatggggttgcaggtttctgcgttgaagcagcttcaaaagcaagagttgatagatttcttcgacgaatacattaaggttggagcagcacggaagaaatcgctgagcataagagtatacgggagccagcatttgaaggagatggcaagcgacaaagacgaagtcccatcaccgtctgttgagatcgaagacattgttggtttcagaaagtcccaacctcttcatgggtcgttcaggggatgcggacaacccaaactgtgagggctgaatgaaactcacttctttattatacaaagacaaaattgtttttcgtttgtcctttttctggttgtaataacaatatttaggtgaaccttaaattgttagaaaacagagtttgaatcatcaaagagaaaaacattgattactacgcatttcgctatatgaggctgtacctaagttaatcgctaagcaacccttgttcctcaattaataacataaatcacaaactctcaagcaccagctttgttttccatgcaatcgagttaaagcagagagaagcatagtaaaagataacaatccatttgatggatagagttgtccagaaatgcttgtgtttgtggtttatattcagacatggtgcatatacaaaggcggtactgtcttccaccccctccagatacttgttgttgctgcatgtgatcagttaaacgagatcatcagtgttttgtttcattttggttgttcgatctgaattcaatctttgctttacaggattgttggtgtagtgttcataacgctggagctctacttagttcactaagaaaacttgaggaacactcaagacgataaaactgaatcaagccgaatcctttgatatggaaaaactcgagcaaccttgatgaattccgaatcaaagctatgaatactaagaagagaagagatattctcttttaatggtatttcttattattaaaatctataactcccacgaagataagaggaaacacaagtccttatttgaaagcaaaatgaaaaagaaagagggctttaattagacttgttgaaactttggatcaggactccgtttaagaatataagaatacactgactaaaacacttagtcgtgaatggaaacgtaagagaaaagtaatcttcaatgtcagatataggagtaggaccaaggcttagatactaagcggggtgatctctatcgcggatctccttgacaatcttagatatgatgttcttgatggcgagcttgtgatcctcgctaaaagaagttggctgtggaacattactcattattacactcgcctccgaacccatcccctccaggtcaaccatctcagatctgctggctttcttgacggcgagacggtgatcctcgttaaacataagctgctgatcatgattcatgattatcttaccgctggccttccggtcaaccatctcagatctggtggcttccttggcgagagcgagacggtgatcctcctgcttccgcctgttttccataaacaaaagcagttgctccttattcatgacaatcttaccacccgccgtcttgtcgtccatcgagatcggattcgggtttcaagtagaagggaatccctagggctgtttcggttgcacacggactcaaccctaataataaagaatttagtatataccttttacgaatgggccccaaagaaaaacaaaacccactaatttttagctcctctccgaaagtgacattgatctattcagtttttggaactgttactgcgaataaatgataaacttgatttgtgttgtgtatatatcataatcagcccatttatgatccgctactattttgtcgtttttttttcttaaacctcaagcaaagtcttggagtttgatctttggggatcttgatggtgtttctccagcagcatcggaacgatacctctaggcttggaatttgaatcaatccaaagtgtttgattttgactttcttgaagatgatttcagagagatgataatgagatcatttcgccaagattttttttttgcttcttagggttatactagaggatcactaacgcaggctttgtggatctcgttggtccatttctattcactctatgcataaaagctgtgttgattttttgtttgatacgaacattttcgtattatatgatgtttataattagttatagtggaaattcgttagtagatcaaattctataataatttcatcctcgtatcctttttttatttttatttactatttgcctatttctatagtaagtaaatagtatttatttgtcgggtaaagtaaacgtattaaacatttccgtataagaaaatgcatttttaataatatttaaggctttgcttcatg

SEQ ID NO: 11238 - DNA, 3000 bp, Unknown
  misc_feature (1)..( 3000): cDNA_ID_3039321_gDNA_ID_2214485_Annot_ID_183482 3000 nt of promoter + ATG
actcctctccttaccaaatccttactaaacgtcaccagaatccccgcccgccgtctcctccgccgtcacatctccaccgccggaggaaccgcactcccagcaccgccaacaatctacctcttcccttcttctccttcctctcccgccgtcactatatccgaattcaaatccctaaacctcttaaaccatcgtgagatctcaaatcccccgccgctgagactaatcgtattcgacgcgacgtggaaacacgcgaaggagatggtcaaagctagcgaggtggtgttaagagaagcaggagcggttagagtgtgtttggatacggaaatagacgcatcagtgagtggaggaaccatctacgattcagagcttgtgctaaggaaggaaccattcggaggatgtgtaactacggcggaggctgtggcacggtgcttaggagctattgaacctgacggtgaagaaatagagaggaagctgattagtgttttgaaagagatggttagatttcaatctaagtacttgaagcctatgaaaccaagacctaagttattgaagaagagatttcagaatcagcaaccacttgaacaagaagaagaatgagttaaatcctgaagtttagcaaaaaaaaattgctctatgacattagtccattgtattaatttgttcttctatatcaataattagttaatttacaaaatatcaaataattctgtgatttctcaaatttattcacgttttcttgcgaatttggagtagacaaatcaatcaatatatttgtgtgtgtggaacagatagattatgatgaactttatgaactagaaaagaagaaataatgggacatgggaccttgttccacgtgaagtgagaaatagaggtgagggggtcgtggattgttttgcgatcatataactaactttcgagatttataaatgaaggtgacactttttttaaaaaactagacactcactgaatcacatgatatgtttttaggccttttagtaccgatgttataatatatagatgcctaattcctaaagcacacaagttcaatcattaaaaccgtttcctgtaaattcatattcctttttacggtccatattcgaattggagatcaaaataagtctgacttactattttgaatgaagaaatgtattgttggttgctaatcgatatcgttggtcgttgtccgaataacttcaaaacaaacatgatctatgctacgtaatacgtacggcacaaatactaatttcagaattagataaattctgaattgaaagctcgaaacttgttagtcaagaaaaaagagatgaaactgctaagttacgatttcaactttaatttgtttaggttgaatcttacttaattacattagttttggccctgctcaaagaataaaccgagcctgttcattctatgcaatcggaaatatctgatcgaaactcctatcatctctttatagagtttacttaaaaaatatatatatttttgataccgattatatatatatcaaccatacatagtatatttctcgaaattttaaaacatataatttctttcatttcattcggtgtggacattgcactctctttattcatttttacgttttccttaatttacgatggagtgaccttcaattataatttttattcatttcttgatggtatagtacaagttaataacttttatctgttttcgatatttattgtttgtttacgtgaagttgacctggcaacacacaaaataaaacaatgatcgatttatcaagtatagcaactttgttttgaacaccttaaaaaaacattcactgatatattgtgaaataggctacgggagagggatttggatcctagttaagtgcatggtagtcgaaagtctgttatgtaccatcggtcatatagaagctacactttgtaccctttttttttgggaggtttcaagtcaagtgtatcatatgcgaatgagactatcaaaaaggagagatataaatggaaaacggtacggtgaacttttaaatgcataattatattagtcaagtagagaagtttgtaagagtttgaacaaactctagttggcaaagcattgatggaatgatggtagctgattctgaaatttcttcttctatgtatttacgaatacgattatatacatgacataacttttttttttccttctttttttttgagttgaaaacgagagtagagaaaaaaggagtattatccatccatgacatctgccaaaagcctaaaagtagaaaagaaggctgttctctatttatctggttattgtatttcattcatgattgttgtttttcatgttaaagagtatattattacgaagaaatactatagtgtattcttttaatatacgaaaagtgcatatccttcaaaaaggagttgaatcgtgcaaattcacatgctaaaaaggacatcgtgtcatgctgaaatagcgaatgatgagaccaatctctccaaatcaaataatttattccgaaatacttttcttttttacaacattctatatgatattaactatgtataatgaatttggatagttttttttaatttgtgttaaaagatcttatacggtctattctacacctacataggttatatccaaatcaagtatgatttcacctatcttttcttgcaaatatttgcatcatttttttgttaatgtttatatataactaggtctaggttggtagctatttatggtacaacaaatccaataaatgtatgtaagtatatatatatatatatatatataagtttagatgcaatatatatttcaagacaaaaattagcgacgtttccaattgtataatgatgacctatttttttccatgtatattatattaaaatccaaaatattggtaatatattaattaaaatagctaaaaatagataaattttttttttttattgtttgcgaaggtctttaaaggtcggtactaccgaaaatccaatccgttggataatattaaattatattctccatcttatg

SEQ ID NO: 11239 - DNA, 3000 bp, Unknown
  misc_feature (1)..( 3000): cDNA_ID_3039325_gDNA_ID_2214485_Annot_ID_183480 3000 nt of promoter + ATG
cttattgctctcaaagtctcaatcgttgggaagaagttgatgccttgatggtgttctcaattcctgggctggccggtttgctagaaagaatttcccggttcttatcaaggtacgtatgtttgattttgattggtattcactgagtgtgttttgaaactaaaaaatttgcaatgacaaaaaagtatttcttcccataattaatatcattggttatcaaagttcaaaacataaaagaaaaaaactataatcatcatacatctcaaacaaaatgatttaatcaatgttcatcatgatcttcaccacataatgtatccaaaatatctttagcagaggacgagtccgacccgatgagccggtctagcttatcctcactccaccaacttgtaggttgtagcttacggcgacccttagatttgtggcccgacttgatagctggcgacacgtgacaatgactgtacttggaccgctcgctttctccggtggtatttgaatggttggtagtctttgatggaacttttgtaaaatctccaaaagctggtggtgaatcgagccggttggaggtgggtcgcggattaaagccccgcggatgaatcattcccgtccttacgatgccttggtgacgaccttcactcttcatgtttgcttattttgatttgagacttgttgaattaccgatgtcttgtttatatttatatttgtggggcttactaaatatgtttggggtacaagaaaatgagaatagtcaaaaatgcttgtccagcaagatattaatattatattctttgtctaccttttgtttttgtcggcattatctgaggattgaaagaaaagtcttttttgaaaacattttcgtttgctcttcctaattttgtggactttttaaggattctatgtaaaatgttattgagctttatatgatttaagtagtattaaactctaaatcctaaaaactgaacagtaagcatgaaattcttaaattttaaagtttaccttatttttagtaagttttatatttaaaaattttaccctgaatttttttaagttctttttagtttatattttagctactataataatgttttcctaattatcaatagttgtcaatctggacctaaatgtatccctatttttatcctaacaaaacgggccaaaaaatatgagagatgggctttaagatccgtaagagggtgataaataaatataagctacttatatatttaattaaatttaagtgataaataaatataagctacttatgtattgagatatgtggtgaaattggattttaaactacatcaaatgggtttttaaaatgacaaaatgagaactaatatctactcggtctcctactttgtgattattttatatattcaatgataaaaaaaaactcacttaagagctcttcatgattaagaacaaattttgtacaattagatgctcattatttcatgcatttttatgacatcaaatcaccatttggatttcaaaatcctaatctggtcaaactagtgctaagcacacatatccaatgtatatctgttcttaaattatcttaatctttttttaatgtttgaggatgatcgccatattttcatgcggctggatcgcaaatatttcttaagtttttgcacattttgtctttaccatttttttcattgacccttattgtttcttcacttttgacgaaacatgaccctttttattctttctctcaagagaatgtatggcagagatctacatggcatgacgctcttcgagctgatgttgttcgaaggtcgtctactcgataccttgaccaatgtcaaggcttagatgcttgaaccaagaatggacgaaatcgctagacagctcgaacatgtaataaaaacatttatacccaatgtatatctctcctcgtatctagttaaatcatctaaatctcttctcactctttctttgtttctcgcaaggaatcaatgtctctctctactgagaaagagacatgtggcaaagttgatcaccaacagatttccctgcggttttgatcgcacatcttttgcctctctttgtcaagaacatgtggcagatccgtcagactcaaatgacttccaattgatcaatcggttgatagtttatctttgctttgatgtttaactttgatcccatcaaccagggtttaatttccttttgctattattattagttactcttgttattattcagagctggagaaacgtagcatcattcgtatgctagctgttttaactttttgtgtcgaaatttaatcttcttatgtagttatatggaattttgttgctcttagtgttataatgtacaaagttttttttgtctttggtaatttatgtaccttttctttggctaatgcctctattgtgaccgagaaatattgattttggccaagttaaaatatgtgcacaacattctaacaaaaaacctttattttaccgtttaagacaaactatgaataaataaaacggatctcataatagggtaattggttggtactgttagatggtgatacgtactgtctgataaacctcgagaaggatcctcccattgtcatttttgatgaaccatctccagataccaatatatattggttgatcttcaagacaacttaatcacatcatcttcttcattatcatcattggatggatccataagcatatatatatgatcatgtcatttgctcgtcacttcaatttcccttcttcaaagaggcgattgtaaggaattaacaaactcatgttctcaccccaattcaaggaatttctcttgttttttatgcatttatcgaaacaaagtcttttatgttgttagtatttatttactatactttaaaataaataaaagttatttttagaaaatcaagttagtttacaaattgaccataatgggccgaaacatatcggatatggggcctaagatccgtagccgcgagagtaatgttatcctcttttatccaccgaagagccttccttactcgtttggctgtgaatg

SEQ ID NO: 11240 - DNA, 3000 bp, Unknown
  misc_feature (1)..( 3000): cDNA_ID_3039333_gDNA_ID_2214485_Annot_ID_183478 3000 nt of promoter + ATG
tgggcatgtgaagccaaaatatctccctgtttccaacatagaaaagataccagtcttgttcaggtagtataatcatcaaagttgtagcaaatttgtaacaactaacccaaggagatactgccattattcaagaaatgctaaccaattcacagaataaacagagagatgtacaagaaaaagtttgaaggcgacaagaaactagggatgaaattgccttcttattagctggaaaaaagaacaaaacatacctcacttcgctacagacaccataatgcgcagatgttatataagtttccagctctatgtcatctttaaaaattttagtaactagctgcaaacagaagacacagggtcgattaaacgtgtgacatatgaagagtaactatcgatctagaatgcagcataagatgaagacgtgatgatgattacccgcagttccggaaacttaagagacaaaatgtcgatcatgttattagtttcatcagtgtcaggtgcaaaagctaaaaaatccccctcagcaagcaaaagcttcaaaacttctggaaaactaggagagttgcctttgcccacttcgacgactgtatctttgtctatgttcctttcatgatcaacagaacaaaatgcagaaaacgaaatcaaaatccaattttagtacgagagagagagaggctagtgacgagtgtaaaaaactgatatcttacgagtgagccgggtgaattgtggtgtcaacccgtgtcctgacggctatcaacagcaacattacaatagtcggaagcaaaatctgccaatgaataagagaaagaagcaaaatttgatcaacaattcgaaattttaaaaacaaaaattgcattcagcatcaaggagaagaagacccattaagacgagcagtgaataagcatgaaaacgacatagttttgaggagcaaagaaaaagagagaaacctcagctgaagtaacgaagggatgacgagttttgaggagccaattcttgcggagcatggccttgaattgcctcttcgatgaacccatttttccttggaacccagaaagaaccctagacgatagattctagtcttggcttcaataagaaatcatacttttatggttcttctttgggaaaaggcaaagcaaagtagcaaactaagaaagcagagagaggtggcgaagacttgggctcacctcactgacatttgtgcttccttttttttttttttttttttcctgccaatttatttgattcattaatcaatttgattatacaatcaaacaaaagaattttgcaactagctgcggataacacaagtggtcgacaaaaatagaagaattccgaaactgtttcatttatttacgggacctttcttcttctatcaaaaaacccaaaaaataaggagaagattagattagttgtcgtgatattaagaaggtaatcttatattaaaccaaaaaaaaagaagaagataatcttataattaatatatataagtacttaagtacagttgctgatgttgacccaaatataaatctttgcgtcaatgccaagtaggggtggctctctcacgggctccacattaaaagcctagtgtagtgtacgtggaacatcctgattcgttttagagttgcgttacgccaattatattacgacgaaaacgacgacgttcctaagtttgacggcaaagtatacgaatgtttttattatttttccgaaggttgccaataaaagccgccattagaattattcctttcattgccactccccaacttgattcttatttttatttttatcagttgtgacacaactttaaagaaatccaccttcatattcaatcctcaaaaatgctgtttttttttaacacagaaaaaaaacaatttttagtaaaattatatcaaatgtagaatcaaaatgacactattttcttcaactaaaaacaatgaaactttttttttaataccattaacttttaataatttatctggattttttcaaaatatatgatcaaatttcaagtaacatctaaatatatgttaaagatgattttgtttgggctgtcgtttccaaggatatttttgttatccgccagagacaaaaaaaatctgttatgagaagcggggctactgggccagctctttgtggcccataatttagaaatattttaaaacttatgtattgtttttgttttttttagggtgcgattttcccgactaaaccaactctacttgtctgtacatgtgtgttcgactaaacaaagttacaatcgtcttctgctttgttgttcgtccatcttctacaatcgaacctacttcccttaacatccaataaaccagagaataaattgatggttttcgattgtctcctgttagctcgatttctccgccggcgacttttgggatcaaatttgattcttcacgattaagattgaattcgccattaggtaaagctgctgaattttaaatgtctagctcaaaatccaaacccaaaacaggtcccaatctaagaaaagtattcattcgtctttgccacctgtacaactttttaagattttcgtttttttctctattggtgaacaagtgattattttagtctacctttttttcgatttccactaactaaaacgcaagtaaatttttatcttttgttttaagggatagtggaggacaaaatcttgaaaactgtttttggatcccttcaccaggtcattcttattctgcttctgtagaaagtaataaactaaagtcataatctatcatgaatatgtgaacttttttgaatttgttgtcttagtatcaaaaagctatggttttgaagattacagctaaacttttcaaacagtgtctttaataagcattaggaatttctcgaatgtttacttgccacattgttcgattatctcttgtctctttttgcacattccttcatgtcttctttcttgtgtgtgtggctgtggcttaaaatatgtgcaggtggagcatcatttaagaatcttatgctttggctacaacgcct

SEQ ID NO: 11241 - DNA, 3000 bp, Unknown
  misc_feature (1)..( 3000): cDNA_ID_3039337_gDNA_ID_2214485_Annot_ID_183477 3000 nt of promoter + ATG
taataaaaagccaagcacagcatacacccattgaccatcagcactaagatccagcattttctggttccaaccgctgaatgttgtcagactccccaaataaccagtcgataatcctatcgccacaaattcagaaactcttgctatatctgctttgaatacaacgccaaaccaacccatcaagaatgatcctacctataaggaagcatttggagaatttttattaagaaagataggtttgtaattaagtttgagatgagtgcattgcgactttcaccatgttggagggaagatcaaggtacaagatgctcccatcacttgttactcgagcaccagttggcccaaacaatttttgcagcaaatatctcgtaatggcctgtatatttggagtcaacgagttgattataatgatttaaacaaaaacaaagcacaacagagagacagacagaaaatggaaaataagcattttaccccaaaaatcccaaaaacagccaaatgaattaggcatgatatgtactccaaggactttggtaacactcgctcttcctcctttccctgtgcaacccacgagctacaatagatcaaaacattggacaaagaaaccaatactaacaatgatgtgactatgcaaagttagaggtagtctctacggagttgtttatttcaggtgacaagagtgacttggtcggtaaaggagatgctgttatgtcctcaggcaaagttttatttacggaagcagtgttgaaagctcgaaggtcatgtaatatatcttgttcttgacgagaagtatcatgagtcccttgttctataaaatcatcagcagacaaacggctgcttctaccagcactatgccttctccgaagtgagcggtccccaatatcccctgcctctgagacactctcactatcgacgtcattgtcaattaggtgaggcaaactacgtgataagcttaaagaagaggctacactgctctcccgactaaaagacttggcttgataaggttctatgctgctttgacccgtatccataggcgttgtagccaaagcataagattcttaaatgatgctccacctgcacatattttaagccacagccacacacacaagaaagaagacatgaaggaatgtgcaaaaagagacaagagataatcgaacaatgtggcaagtaaacattcgagaaattcctaatgcttattaaagacactgtttgaaaagtttagctgtaatcttcaaaaccatagctttttgatactaagacaacaaattcaaaaaagttcacatattcatgatagattatgactttagtttattactttctacagaagcagaataagaatgacctggtgaagggatccaaaaacagttttcaagattttgtcctccactatcccttaaaacaaaagataaaaatttacttgcgttttagttagtggaaatcgaaaaaaaggtagactaaaataatcacttgttcaccaatagagaaaaaaacgaaaatcttaaaaagttgtacaggtggcaaagacgaatgaatacttttcttagattgggacctgttttgggtttggattttgagctagacatttaaaattcagcagctttacctaatggcgaattcaatcttaatcgtgaagaatcaaatttgatcccaaaagtcgccggcggagaaatcgagctaacaggagacaatcgaaaaccatcaatttattctctggtttattggatgttaagggaagtaggttcgattgtagaagatggacgaacaacaaagcagaagacgattgtaactttgtttagtcgaacacacatgtacagacaagtagagttggtttagtcgggaaaatcgcaccctaaaaaaaacaaaaacaatacataagttttaaaatatttctaaattatgggccacaaagagctggcccagtagccccgcttctcataacagattttttttgtctctggcggataacaaaaatatccttggaaacgacagcccaaacaaaatcatctttaacatatatttagatgttacttgaaatttgatcatatattttgaaaaaatccagataaattattaaaagttaatggtattaaaaaaaaagtttcattgtttttagttgaagaaaatagtgtcattttgattctacatttgatataattttactaaaaattgttttttttctgtgttaaaaaaaaacagcatttttgaggattgaatatgaaggtggatttctttaaagttgtgtcacaactgataaaaataaaaataagaatcaagttggggagtggcaatgaaaggaataattctaatggcggcttttattggcaaccttcggaaaaataataaaaacattcgtatactttgccgtcaaacttaggaacgtcgtcgttttcgtcgtaatataattggcgtaacgcaactctaaaacgaatcaggatgttccacgtacactacactaggcttttaatgtggagcccgtgagagagccacccctacttggcattgacgcaaagatttatatttgggtcaacatcagcaactgtacttaagtacttatatatattaattataagattatcttcttctttttttttggtttaatataagattaccttcttaatatcacgacaactaatctaatcttctccttattttttgggttttttgatagaagaagaaaggtcccgtaaataaatgaaacagtttcggaattcttctatttttgtcgaccacttgtgttatccgcagctagttgcaaaattcttttgtttgattgtataatcaaattgattaatgaatcaaataaattggcaggaaaaaaaaaaaaaaaaaaaaggaagcacaaatgtcagtgaggtgagcccaagtcttcgccacctctctctgctttcttagtttgctactttgctttgccttttcccaaagaagaaccataaaagtatgatttcttattgaagccaagactagaatctatcgtctagggttctttctgggttccaaggaaaaatg

SEQ ID NO: 11242 - DNA, 1893 bp, Unknown
  misc_feature (1)..( 1893): cDNA_ID_3039295_gDNA_ID_2214485_Annot_ID_183494 3000 nt of promoter + ATG
ttcgtccatacctttgggtctctcaagcaagcttcgcacatgtgtattcatatatatccgtttgatgtattcatacgtttttgttatacgtataataaaaagagttcaaaattatatatattttatatattcaatgtatatataccatttttttgtttttggggtgtaaagtcaatatatacctttcgtacgttgacctagtttttattaattcagaaacatatgcatgggtaatagtatttctcgttgaattcggaagttcgtattgtagttgtttaggatctttttgaatcactaagtcaattttctatgtttaaccgggtttcattattattataataaaacagttttgttggaaaatcaaaatccgattagaacttgttactaattttaagggttcacgcatgattcttatttttctagaagaaacacgaaatggggttttactgctcaatcatgtgttaaaacttaaaagtaaacacattgaaattttgaccgcgtgttaattcaaatgtcgcccatgtcataaatcaaatttccacaagtaaaacaatgttcatattttttgaacgggagacacatgtgcttaactctctaattaagcttcacgtgcatcgcctaactttgcttcccatacgccatgcgtgtgtcgcgcgcaatagtagttgaacctacgacgtcgtttacttggaacatttaatttgttaaacaagtaactattatggggttctgtctttttaaaaatgcgattttcccaaatataatgtagttcagtcttcttctttttgtgtgtgaggtcagattcttatatttctatccagcattgatagataaatcgacttacgtgggtgatgggatgaacaaaaaaatatacatttaagtattcaattacggtccaacttgacaaacaaacaaaaagtctaatatgacgtggatatatttgaccatataaaccccaaatttcgttctttacaataagcaatgtgacgaataaggaagagcttgcggcggtcacgtgaaaggtagttatcgccatttcaactgaaccttcacgaacatacatttcggtttttctttactgaaattacgcatatctctataatacacgaaattacgactattcttaacgaaaacgtgcttctttcgtagtatgttgttatatagctcacgtatgttaattatttctcacgtaaatttgcatttatgggggattagcgacataattgtattatcatcatacggcataaaatacatgtttgaagatttaaaaatcacaattatatcataacgtataataatatatattattatataaccattatcatacataatttcttggaggaaaaatccacatacagtatatagtgcatttagtcaatctaaccaataaataatcgagctgacactagataaaataaaaaaggggaaagtaaacttcaataccttaaatccttaagcgatgtttcttgcagaaaatacgataagcatggtctcgctaagagacaactaaatttttaactaaatgaattaaacaatgagatagagagaggattaatatagatatatattttattaaaggagaggattacaatatgaaactctaaaggaagaaaataagataaaataaaattatagatgcctaaagtagtgtttacgtgacaatctcaatttcactccatacctcgaactcattcaagctcaagaaacctaaattttaaacgtcccttttgatttgcctataaatacacgtgcctccacacttctccaattaaaaaaaaacaaagcaacacaaggacaaaaaattcacaaacatcaaacattctccacctactgcccaaaaacgacagcattccttttccagcaacaaagaaaaaacacatttccttgccaatg

SEQ ID NO: 11243 - DNA, 3000 bp, Unknown
  misc_feature (1)..( 3000): cDNA_ID_2994722_gDNA_ID_2214485_Annot_ID_183493 3000 nt of promoter + ATG
atatagatatatattttattaaaggagaggattacaatatgaaactctaaaggaagaaaataagataaaataaaattatagatgcctaaagtagtgtttacgtgacaatctcaatttcactccatacctcgaactcattcaagctcaagaaacctaaattttaaacgtcccttttgatttgcctataaatacacgtgcctccacacttctccaattaaaaaaaaacaaagcaacacaaggacaaaaaattcacaaacatcaaacattctccacctactgcccaaaaacgacagcattccttttccagcaacaaagaaaaaacacatttccttgccaatggcccgttgtaccaaccttgttaccgttttcctattatgggctcttttgatgttctcatggtgtaaagcttcaagaatcagccctaatgtatatgaccattcttataaaaggttcaaatccgatagcttaatcaagcgaagagaggacatcacgggattgagaagttttgtaagagcctctttgcggactccaaccaccgttagtgtttctgattttggagctaaaggagatggaaaaaccgatgacacgcaggtgtatatatacacataaaaatgtttttattttatttcatcgtataattaattagaaaactgtttttagtactaatgatccatgcatgcattgtttaggcgttcgtgaatgcgtggaagaaagcatgttcttcaaatggagctgttaatctcctagttcctaaagggaatacttatctccttaagtctattcaattaactggtccatgcaattctattctcaccgttcaggtaattacaagaaattgttatttgttagttaaatacgatgtgtgtgtggattttgaaacgagcgtttggtcgatggaacggcagatattcggaacgttatccgcatctcaaaaacgatcggattacaaagatatcagcaaatggataatgtttgatggcgttaacaatctatcagtcgatggaggcgacactggggttgtggacggaaacggcgaaacgtggtggcaaaactcatgcaaacggaacaaagctaaggtgggtatatatatgtaaaagtataaatcttctctttaattaataaacagctttgaatattgagttattgctgatattgaaacttttttttttttttttttttttttttttttttttgtatatgcagccatgcacaaaagccccaacggtacgttgaaacatatatgatatcaaaaaataatgttgatggatttgatcatagttggacaagtgttttacgtatatatttttttacattcaggctcttactttttacaactcgaaaagtctgatagtgaagaatctgaaggtgagaaatgcacagcagatccagatttcgattgaaaaatgctccaacgttcaggtctctaatgtcgtggtaactgcgcctgcggatagtcctaacaccgatggtattcatatcactaacacccaaaacattcgagtctccgaatccatcattggaacaggttactattttatacattaacatttgttttctttattttgtccgtgacttaaaaaagttgcttgcttaccaagagagatggattttaaggctatatataataatttacggagattgatctaaagggagttttaatagttgttttttcctaaatataggcgatgattgcatatctattgaaagtggatcacaaaatgttcaaatcaatgatataacttgcggtcccggtcacggtatcaggtatcaaatcattgttttgaataatatatcaaaagggttcgatcataatctaatactaagaaaatttgatatttatttttgaaaacatgagcagtattgggagccttggagatgacaattcaaaggcttttgtctcaggcgtgactgtggatggtgctaagctttccggtacagacaatggagtaagaatcaaaacttaccaggtgaaacttcacaaactagtccttcgattttaactaaactctcaaaaatttccccatctgttaattgttattccatttaatccaacccaatttatcagggagggtcaggaactgctagcaatattatatttcaaaacattcagatggataatgttaagaatccgatcataatcgaccaagactactgcgacaagagcaaatgcactacagaggttcactgcaatctgatcaaatctatccaatactcatcatcattggtaacacatattcttggatctaatcatttagtatatattttcagaaatccgcggtccaagtgaagaacgtggtgtaccgggacataagtggcactagcgcatcggaaaacgcaataacgtttaactgcagcaagaactatccatgccaaggaattgtgcttgacagagtgaacattaaaggaggaaaagcaacttgcaccaatgctaatgtggttgataaaggagctgttctgcctcagtgcaactccacttagttacttagatcgcttagatctatcaaacacatacatatagatatataaatacagatagatcgattacaaaatatactaaatatacttgtggatatatatatacatggacaataaataacagatattgtctaactatgaattataggattatagtataggaatacatgtataaacaatgttcttgagatttgttgttttatttgtattcttacatactaaattgtttatctaaagttatatgaataaagggatacattctttataaggttatggaccttatggtattatttgttctgattaacgtgtgacattagaatgtcaggcccatttaagcccactttctgtttaagttaccaaaacaaacccaacaaggcctttagaaaccctaaaaatccttattgtagcagctggagcaatatatatcccaatttgccgcaactagggttttctcttcctcacgcaaagcaatacatcgcagtctcccactgattcagcagctctttgaactactcttcgacaatg

SEQ ID NO: 11244 - DNA, 3000 bp, Unknown
  misc_feature (1)..( 3000): cDNA_ID_3039299_gDNA_ID_2214485_Annot_ID_183492 3000 nt of promoter + ATG
agtccttcgattttaactaaactctcaaaaatttccccatctgttaattgttattccatttaatccaacccaatttatcagggagggtcaggaactgctagcaatattatatttcaaaacattcagatggataatgttaagaatccgatcataatcgaccaagactactgcgacaagagcaaatgcactacagaggttcactgcaatctgatcaaatctatccaatactcatcatcattggtaacacatattcttggatctaatcatttagtatatattttcagaaatccgcggtccaagtgaagaacgtggtgtaccgggacataagtggcactagcgcatcggaaaacgcaataacgtttaactgcagcaagaactatccatgccaaggaattgtgcttgacagagtgaacattaaaggaggaaaagcaacttgcaccaatgctaatgtggttgataaaggagctgttctgcctcagtgcaactccacttagttacttagatcgcttagatctatcaaacacatacatatagatatataaatacagatagatcgattacaaaatatactaaatatacttgtggatatatatatacatggacaataaataacagatattgtctaactatgaattataggattatagtataggaatacatgtataaacaatgttcttgagatttgttgttttatttgtattcttacatactaaattgtttatctaaagttatatgaataaagggatacattctttataaggttatggaccttatggtattatttgttctgattaacgtgtgacattagaatgtcaggcccatttaagcccactttctgtttaagttaccaaaacaaacccaacaaggcctttagaaaccctaaaaatccttattgtagcagctggagcaatatatatcccaatttgccgcaactagggttttctcttcctcacgcaaagcaatacatcgcagtctcccactgattcagcagctctttgaactactcttcgacaatggccgaacgtggtggagaacgtggtgttgagcgtggtggagaacgtggtgatttcggacgaggattcggaggccgtggaggtcgtggagatcgtggagggcgtggacgtggaggccgtggtggtcgtcgtggagggcgtgccagtgaagaagagaaatgggttccagtgaccaagcttggtcgtctcgtggcggctggtcatatcaagcagatagagcagatctatcttcattcactcccggttaaggagtaccagatcattgatatgctcatcggtccaacattgaaggatgaggtaatgaaaatcatgccggttcagaaacaaaccagggctggtcaaaggactagattcaaggcctttgttgtcgttggagatggtaatggtcatgttgggttgggagtgaaatgctctaaggaagttgctacggccattagaggagcgattattctcgctaagctgtctgttgttccagtgaggagaggttactggggtaacaagattgggaagccacatacggttccttgtaaggtgactgggaagtgtggatctgtgacagtgaggatggttccagctcctagaggttctggtattgtggctgctagagttcctaagaaggttcttcaattcgctggaattgatgatgttttcacttcctccaggggatccaccaaaactcttggaaacttcgtcaaggtttgttcttttttactttcatgtagttacctatacacgagattcgtttccttttgattggtttctggtagtttctttgaaatcacaatttgattattcgaaatttgagcattttctgtcattttagtacagtagtagctatataagtagttccaggagtccatttggttaggaaaaattctgacttcacactgtatttgatgaaatatctctggaaatgttattggtgtattgatggaagagaaaaagtgtttctctttcgtctagtgattctctttagctgtaatgaatgatcgctttgtaggaaacctttaatgtagcaaatgaagaatagattcagtttggcatctcttgatacttgactgttttcacttgcttatgatgtgtttgttttcttgctaattcacgagttttgtaacttgaatacaatataccctcagttttttatccatgtatagtattcacttgtaccttagtttttttcacggatgaataattgttttcatgatgttgattaaattgcaggctacattcgattgccttcagaagacttacggattccttaccccagagttctggaaggagacaagattctctagatcaccataccaagagcacactgatttcctggcgtccaaggctctttcgaccagcaaacccgacccagtggttgaagaccaagcctaaacaatgcttccaccttgtgttctttttggattataatccttcatgagttaattttggttgaacctttggtagtatatgttgctggattgtgcaccttctgttttcatctcctcttccaaactactttatttttgcttatggatcttaatgttctagttttgcttttacttttgttgagaaaagttaatccagtggtgccaattttaattttcatcaatattctacctctacaagtttggtttatgatatagactttgtttgatataacatgttcaatagacgaaccattactgtgaagaacattcgatgacaggttctgattcttggaaagtaaagttaaagaatttcctgaaaatttccgaatgattcaaagtattgacttttttttaattggattgttctaacatagacaaaagagaaagactgagaatatagaagaagaaatcagtttgacatttcccacatatttgaaagctttcacggcttctgcgatatttcagctcatctaaatctgcagaatcctatttctttttttccttgagtttctctctctcgccggatataaaccctatttttggtcggaattgttgttcgaattcgaatg

SEQ ID NO: 11245 - DNA, 3000 bp, Unknown; identical to SEQ ID NO: 11239
  misc_feature (1)..( 3000): cDNA_ID_2702003_gDNA_ID_2214485_Annot_ID_133343 3000 nt of promoter + ATG

SEQ ID NO: 11246 - DNA, 3000 bp, Unknown
  misc_feature (1)..( 3000): cDNA_ID_2702007_gDNA_ID_2214485_Annot_ID_133345 3000 nt of promoter + ATG
aatcaaataatttattccgaaatacttttcttttttacaacattctatatgatattaactatgtataatgaatttggatagttttttttaatttgtgttaaaagatcttatacggtctattctacacctacataggttatatccaaatcaagtatgatttcacctatcttttcttgcaaatatttgcatcatttttttgttaatgtttatatataactaggtctaggttggtagctatttatggtacaacaaatccaataaatgtatgtaagtatatatatatatatatatatataagtttagatgcaatatatatttcaagacaaaaattagcgacgtttccaattgtataatgatgacctatttttttccatgtatattatattaaaatccaaaatattggtaatatattaattaaaatagctaaaaatagataaattttttttttttattgtttgcgaaggtctttaaaggtcggtactaccgaaaatccaatccgttggataatattaaattatattctccatcttatggatgaagaagtattgtttctgatcgatctctggttaacaaaggatttattaaaagagtcggttttggggcgtccatttcagtttaggaggattcgtggattccaactcaattcccgagaccagcaaaaagtaatggctcagttattgatccatgcctaaaagttcaaagtcttattgacactcgaacaaatttctggaagattgacttattaaatgagctttttgtcccagaagatgtttcactaataagtgctctgcacttgggtgcgtcaactacggaggatactcttggttggcactttacaaagtccagaaaatattcagttaaatctggatatcatacggcaaagctagaaactttggatgtaaatgtttcctttattgggccagacatcaaagctttaaaagctttcatttggaaagtgcagtgtccgcccaaattgcgtcattttttgtggcagactctagcgggttgtgtgccggttacagataatttacggaaaagaggtattaattgtgattcagggtgtgtctgatgtggtaacgtagaggaaacaattaatcatgtacttttccaatgtcaccctgcgcgacagatatgggccctttcacagattccttcggcggcaggaatatttccatatgcctctatttatgcgaatttggattatttattttggaggattatttcggattttgattctttttcatacccatggataatttggtatatttggaaggcaacgaatgaaaagatttttgacaatgtcgataaagatcccttaaaggtattatgtttcgcaaaaagtgaggcacagtcatggaagtcagctcaaattgagttgcatgttgaaaatcatgaaactcctaatttcggatctaggagtagagcgagggatatctatcctgatatcaatttcttgggatatcgttgttacgtggatgggtcatggaaaaaagacgattttttctctgggacaggatggtactgtacatcagcaattggagagacgccaacaatgggagcagcaaaccttagacgaagtctatccccactacatgccgaagtggaagctcttctatgggcgatgaagtgcatgattggcgccgacaatcaagatgttgtgtttctcacagactgttcggatctggtgaagatgatgtcttccccaaccgaatgaccggctttctcagtgtatttggaggaattgcagagtgacaagaaaaaattttcaagtttttttttatctttaatttctcgtagtgcaaatgtcaaagcggataatttggcgcgtaaagttcgtgtccaaccgcatcatatcacttatgtaaacaaaattcttcaggaatggctcttttgagctctaattaattttggatgacaaaaaaaaaaaaaaaatatttttacagttattaccataatttcgaaaaaacaatatgtattaaatttgggattaatgtggatttttggaattaaaagtgtggtaaagaaagaaaaagaaaaaggcaaaacaagattggtcgggaggaaattgaatcacgaccggatctaatttacttggccttaaaaattgacagactcttctttaaacgtcttttctcaaaactttgtctccctcctctatattcttcgtcttcgacctcgtcgtctggcagtaattcaatctctctctctctctctctactgtaataaatctaaggaaacaaaaaacgttacgaaagaaaaagcattaaaaagaaaagctttagagagaaaaaaaacacagctcacaacctcttttcaattattcaatttagctttttttctcttcttcttcttcatcttccctcgtcttctttgccagttcttcttcatctttcgtcgttttcttagtgccacccaaagatcttcgtgcaggttcgtacttctttctacctcgatcgattttgactaaatgtatggatcatctgatttccgatttgatcgtggttgttccttgctctgtttcatgatctgtgaatctgagtttctcgatctggctgcgtctttttcggaaaagtcgagaattttttcctgctgggtcttctgaatcacatttgatcaattcctggaaatcgcaaagttttgagtttttctaatttctaaaggttgatcgagccaaaatcctttacgtgtctgtgtctgactctctgtagacctttcctgtttcttgatcactagctagctttcgagattggatttaaaattttctagatgaatctcaaattataattacagaattgaccaatgctttgcttgagaaacagtccaagaagaaatgcttgagatccttcatctccaagtaaatgggaggatttggttgattatctgctcattttcttaactttgttccgtatttttttttttgactcaacaggttcattggcgtttgtagtacataaattttccctgacacacagaaaaagaggatttgactgttatacaatg

SEQ ID NO: 11247 - DNA, 3000 bp, Unknown
  misc_feature (1)..( 3000): cDNA_ID_2702013_gDNA_ID_2214485_Annot_ID_133347 3000 nt of promoter + ATG
aattatttgatttggagagattggtctcatcattcgctatttcagcatgacacgatgtcctttttagcatgtgaatttgcacgattcaactcctttttgaaggatatgcacttttcgtatattaaaagaatacactatagtatttcttcgtaataatatactctttaacatgaaaaacaacaatcatgaatgaaatacaataaccagataaatagagaacagccttcttttctacttttaggcttttggcagatgtcatggatggataatactccttttttctctactctcgttttcaactcaaaaaaaaagaaggaaaaaaaaaagttatgtcatgtatataatcgtattcgtaaatacatagaagaagaaatttcagaatcagctaccatcattccatcaatgctttgccaactagagtttgttcaaactcttacaaacttctctacttgactaatataattatgcatttaaaagttcaccgtaccgttttccatttatatctctcctttttgatagtctcattcgcatatgatacacttgacttgaaacctcccaaaaaaaaagggtacaaagtgtagcttctatatgaccgatggtacataacagactttcgactaccatgcacttaactaggatccaaatccctctcccgtagcctatttcacaatatatcagtgaatgtttttttaaggtgttcaaaacaaagttgctatacttgataaatcgatcattgttttattttgtgtgttgccaggtcaacttcacgtaaacaaacaataaatatcgaaaacagataaaagttattaacttgtactataccatcaagaaatgaataaaaattataattgaaggtcactccatcgtaaattaaggaaaacgtaaaaatgaataaagagagtgcaatgtccacaccgaatgaaatgaaagaaattatatgttttaaaatttcgagaaatatactatgtatggttgatatatatataatcggtatcaaaaatatatatattttttaagtaaactctataaagagatgataggagtttcgatcagatatttccgattgcatagaatgaacaggctcggtttattctttgagcagggccaaaactaatgtaattaagtaagattcaacctaaacaaattaaagttgaaatcgtaacttagcagtttcatctcttttttcttgactaacaagtttcgagctttcaattcagaatttatctaattctgaaattagtatttgtgccgtacgtattacgtagcatagatcatgtttgttttgaagttattcggacaacgaccaacgatatcgattagcaaccaacaatacatttcttcattcaaaatagtaagtcagacttattttgatctccaattcgaatatggaccgtaaaaaggaatatgaatttacaggaaacggttttaatgattgaacttgtgtgctttaggaattaggcatctatatattataacatcggtactaaaaggcctaaaaacatatcatgtgattcagtgagtgtctagttttttaaaaaaagtgtcaccttcatttataaatctcgaaagttagttatatgatcgcaaaacaatccacgaccccctcacctctatttctcacttcacgtggaacaaggtcccatgtcccattatttcttcttttctagttcataaagttcatcataatctatctgttccacacacacaaatatattgattgatttgtctactccaaattcgcaagaaaacgtgaataaatttgagaaatcacagaattatttgatattttgtaaattaactaattattgatatagaagaacaaattaatacaatggactaatgtcatagagcaatttttttttgctaaacttcaggatttaactcattcttcttcttgttcaagtggttgctgattctgaaatctcttcttcaataacttaggtcttggtttcataggcttcaagtacttagattgaaatctaaccatctctttcaaaacactaatcagcttcctctctatttcttcaccgtcaggttcaatagctcctaagcaccgtgccacagcctccgccgtagttacacatcctccgaatggttccttccttagcacaagctctgaatcgtagatggttcctccactcactgatgcgtctatttccgtatccaaacacactctaaccgctcctgcttctcttaacaccacctcgctagctttgaccatctccttcgcgtgtttccacgtcgcgtcgaatacgattagtctcagcggcgggggatttgagatctcacgatggtttaagaggtttagggatttgaattcggatatagtgacggcgggagaggaaggagaagaagggaagaggtagattgttggcggtgctgggagtgcggttcctccggcggtggagatgtgacggcggaggagacggcgggcggggattctggtgacgtttagtaaggatttggtaaggagaggagtggtgttgagcttgtggcgtgactcgtgtggatggtggaggatgatgatttctgtattcgtcggaattagatccgctggtaagacgtggcagagacaaatcgcatttgggcgatcgcagttgtcgcagatctgccggcgatgatgcgcgtcttgctcgtcctccatcgtcactgctctgtcacgcgagcattccaacattaatgggaaattagaaaaaataaaataatacgctgtcgtttttggtctattagaaacacggcatcgtttaaactaagtttctgaacgacggcgtttgacccattcacgaatacgaatacgattacgattgtattcactacgtcgtcgtttggtctgttcacgatacatcgtcgttgggcattaacttatttaactctctgtctcttctccggtcaccatttacccaattgtacacgaccactttttagttttgacgattagatgatcaacgttgctggaagtaggaaaattagataagagtactgatcaaatcctaagagaga

SEQ ID NO: 11248 - DNA, 3000 bp, Unknown
  misc_feature (1)..( 3000): cDNA_ID_3039313_gDNA_ID_2214485_Annot_ID_133348 3000 nt of promoter + ATG
atccggagctatttaactgatatgagttactcttcctctagagcaatgtaacagctttaatagacatgaagcttgaaaaacacaagaacttaaaggaggaatcccggttttactggcgagagattcaaagtggaacactcaaattcaaccgtaaagaggcagaggtacatggaacagcttctttttccttctatattttctcataaactaagaaaaccgcctcccgaatgcatgacccatgcatatatacttcctcgaatagttgtatcacttgtacgattaaatacaagttggtatgatggtgttgaaagtgactgatcgatgagagaatggggttgcaggtttctgcgttgaagcagcttcaaaagcaagagttgatagatttcttcgacgaatacattaaggttggagcagcacggaagaaatcgctgagcataagagtatacgggagccagcatttgaaggagatggcaagcgacaaagacgaagtcccatcaccgtctgttgagatcgaagacattgttggtttcagaaagtcccaacctcttcatgggtcgttcaggggatgcggacaacccaaactgtgagggctgaatgaaactcacttctttattatacaaagacaaaattgtttttcgtttgtcctttttctggttgtaataacaatatttaggtgaaccttaaattgttagaaaacagagtttgaatcatcaaagagaaaaacattgattactacgcatttcgctatatgaggctgtacctaagttaatcgctaagcaacccttgttcctcaattaataacataaatcacaaactctcaagcaccagctttgttttccatgcaatcgagttaaagcagagagaagcatagtaaaagataacaatccatttgatggatagagttgtccagaaatgcttgtgtttgtggtttatattcagacatggtgcatatacaaaggcggtactgtcttccaccccctccagatacttgttgttgctgcatgtgatcagttaaacgagatcatcagtgttttgtttcattttggttgttcgatctgaattcaatctttgctttacaggattgttggtgtagtgttcataacgctggagctctacttagttcactaagaaaacttgaggaacactcaagacgataaaactgaatcaagccgaatcctttgatatggaaaaactcgagcaaccttgatgaattccgaatcaaagctatgaatactaagaagagaagagatattctcttttaatggtatttcttattattaaaatctataactcccacgaagataagaggaaacacaagtccttatttgaaagcaaaatgaaaaagaaagagggctttaattagacttgttgaaactttggatcaggactccgtttaagaatataagaatacactgactaaaacacttagtcgtgaatggaaacgtaagagaaaagtaatcttcaatgtcagatataggagtaggaccaaggcttagatactaagcggggtgatctctatcgcggatctccttgacaatcttagatatgatgttcttgatggcgagcttgtgatcctcgctaaaagaagttggctgtggaacattactcattattacactcgcctccgaacccatcccctccaggtcaaccatctcagatctgctggctttcttgacggcgagacggtgatcctcgttaaacataagctgctgatcatgattcatgattatcttaccgctggccttccggtcaaccatctcagatctggtggcttccttggcgagagcgagacggtgatcctcctgcttccgcctgttttccataaacaaaagcagttgctccttattcatgacaatcttaccacccgccgtcttgtcgtccatcgagatcggattcgggtttcaagtagaagggaatccctagggctgtttcggttgcacacggactcaaccctaataataaagaatttagtatataccttttacgaatgggccccaaagaaaaacaaaacccactaatttttagctcctctccgaaagtgacattgatctattcagtttttggaactgttactgcgaataaatgataaacttgatttgtgttgtgtatatatcataatcagcccatttatgatccgctactattttgtcgtttttttttcttaaacctcaagcaaagtcttggagtttgatctttggggatcttgatggtgtttctccagcagcatcggaacgatacctctaggcttggaatttgaatcaatccaaagtgtttgattttgactttcttgaagatgatttcagagagatgataatgagatcatttcgccaagattttttttttgcttcttagggttatactagaggatcactaacgcaggctttgtggatctcgttggtccatttctattcactctatgcataaaagctgtgttgattttttgtttgatacgaacattttcgtattatatgatgtttataattagttatagtggaaattcgttagtagatcaaattctataataatttcatcctcgtatcctttttttatttttatttactatttgcctatttctatagtaagtaaatagtatttatttgtcgggtaaagtaaacgtattaaacatttccgtataagaaaatgcatttttaataatatttaaggctttgcttcatgcggtggctttgcgtgggtcctacagagaatacagcaagcaagaattactgtttagttgtctctttggttggtttggtgattaaagaagaaaagaacccaaagttttgcaattgcattgaccttacagctcacagagactctcagacttggctttcctatcaaagctcttttacatttgcattcaagcttaagcaacgtcaattccaactacaacaaccgcattactttcacttgcaaacaaaacacgaatccaaaacttccatttttgttcacaaatctcagcttcttctgattcaaaaagttttgagctttattgatccaatg

SEQ ID NO: 11249 - DNA, 3000 bp, Unknown; identical to SEQ ID NO: 11236
  misc_feature (1)..( 3000): cDNA_ID_1830751_gDNA_ID_2214485_Annot_ID_133350 3000 nt of promoter + ATG

SEQ ID NO: 11250 - DNA, 3000 bp, Unknown; identical to SEQ ID NO: 11235
  misc_feature (1)..( 3000): cDNA_ID_1808325_gDNA_ID_2214485_Annot_ID_133351 3000 nt of promoter + ATG

SEQ ID NO: 11251 - DNA, 3000 bp, Unknown; identical to SEQ ID NO: 11234
  misc_feature (1)..( 3000): cDNA_ID_2702019_gDNA_ID_2214485_Annot_ID_133353 3000 nt of promoter + ATG

SEQ ID NO: 11252 - DNA, 3000 bp, Unknown
  misc_feature (1)..( 3000): cDNA_ID_2702023_gDNA_ID_2214485_Annot_ID_133354 3000 nt of promoter + ATG
accctatttttggtcggaattgttgttcgaattcgaatggggactccggaatttccagatctggggaaacactgctccgtcgatgtttgcaagcaaatcgatttcttgcctttcacctgcgaccgttgcctacaggttcctttctccttctctccttctctccttctctctgtttatattcacatgcaaagactcgatttttatgttttcgcgaatggtgtttgactctgactgaatcctatatctctgggatcaacgataatcatgctgttacttattttctcgttggtttcgattttgtactttaggactaagaagaagattgaattgaagtctcgaatatcgaatttatcacttgaatccttttggttatcgttaggtgttaagttaactgacattttgagcttaattatcggtattttggtaaattccaatttcttcattcttgtctcagaaaaattctgctcgtaactaatgtgatgattcttgactgctttcttgattcaagagaacaatgattcgtgtctgctctcttggttcggttgtctgttctcatgtttctgctagatccattgactgttgacgatttgaattttgtttttgagttagcgctctggttttctctgaatctttagtgtcaaaatgtttccttggtttggaggaaaagtcttacattggaaatttttacaggtgttttgtttggatcatcgaagctatatgaaacatagttgtccaaaaggcgatagagaagatgtgactgtagttatctgcccactctgtgctaaaggagtccgattaaacccaaacgaagacccaaatataacatgggagaaacatgtcaataccgactgtgacccatcaaactacgaaaaagctacaaagaagaagaaatgtcccgttccaagatgcaaggagtacctaactttctccaacaccatcaagtgccgagattgcaatgtcgatcactgcttgaaacatcgttttggacctgatcacacttgccctggaccaagaaaactcccattcatgggtttcttgagtagtagtaccaccagaaaagaagctaagacaacaagacccaacaaagctcatccatcaacttcatcatcttcttcttcttcgagatggtctaatctcctatcttcagcagaagcaggaattagcaggctcggtaatgacattagccagaagctacagttttcgagcagcaaagataatggtatcgtggaggtgtgtccacagtgcggtgcgaaattctcttcggttacttctcttgtggaacatgtagagaaaacacatgagaggaacaagaagcagaatcatggcaatgtcacggtcgatgtctgccctagatgtagcagaggattccgcgatccagtagatcttgtgaaccatatcgaaagagatcaccgaggcacttcgaaagcataggaacatatgcgtttacaagccacacatcacaacataacttgtgaaaggtactcaaacatctttgtatttttcttttcatatttgtactggttttaaacaaccaaaaaaaatgtcacattctttgaaaagtcatggactcatgtccagaagtgtagccagaagtgtagtagactaatgttatcattatccttgggccttggcccttgggctttgggtgatatggttttttcaatgaacaatatgagaagaaattcaacggcgaccaatgtggttaagtccgttaaaaaataagggtaaaaccgtaaaaggttacaattggcgagttcgcgggaaattttaccctctttccgcggtaagaaaaaaaaaacagattgctgaccccacgtgaccgtcatgtgcagttaacgacgttaatgataagtggcagctaacttaacggtgcaataaaccttaaatcttaacgaattgaatgtttcagtactttttctcttaaattcaaaacgtggtcatgtcgaaagaattcgacttgatttcaccactagcatcctaatctaacatttagcctttataaaaaccaggttaaattgacttaagtgaagtgtgtatcagttctataagaaaagaaatcatagtcagggaattaaaaaattacatatctccaaataaaactttcttcttctagagtgtataatacacaattacacatcatgcacacacacaccgtgtgagtaagtaattaactaattatagaataatttaagagattatttgctttattagcagtgtatgagctggccaaaatgcaataactacctcagcaaatttcaacaaagcaggaaaaaaattaaaataatacgttatataatcaaagccgcttatattcgcatccgacggctgaggtttttatgtgaagaatgtttaagagtagttttaatatgaactaaaaataagaatgaagtagcaagcaacgaaacggcagaaggtggaacccgcgtcgtggccgttgaaacgtatctgaggaaggaaatattattatcagagctaaaagcttcgccggacgatccggcgactaaatcctactgagagaataatccggtctctcagagagagaaagggtttcgagttttctggtgtgtcgccgatcagttttcagttaccaactggcttatttgtgctttgatctgaggtaaattgatttttcttttgcagcattacgttgaaatcttctgatcaatctgggttttgttaaatcattgattcctcgggatgtgatgatttttttgggtaattcgttttcggcggaatttgactctggattatacaatgaattggtttcgttttgatcaacattacatcgtttttgaatttttttaaattttggatgtttcaggcgaaggtttgagttctaaggagtgtatcgtttaatcatcgagctctgttttccttctttcccgaggaagctctagggctttttcggtggatcaagagggagggagggaggattaacacgtaaataagatttaacaggaatttgcggaattttgattatatcagtgagtagaagaaatg

SEQ ID NO: 11253 - DNA, 3000 bp, Unknown; identical to SEQ ID NO: 11243
  misc_feature (1)..( 3000): cDNA_ID_2994722_gDNA_ID_2214485_Annot_ID_133355 3000 nt of promoter + ATG

SEQ ID NO: 11254 - DNA, 1893 bp, Unknown; identical to SEQ ID NO: 11242
  misc_feature (1)..( 1893): cDNA_ID_2702027_gDNA_ID_2214485_Annot_ID_133356 3000 nt of promoter + ATG

SEQ ID NO: 11255 - DNA, 2080 bp, Unknown
  misc_feature (1)..( 2080): cDNA_ID_3593271_gDNA_ID_2214486_Annot_ID_133357 3000 nt of promoter + ATG
tttgttaagtgatagaatagtctagaagactctagataatatggttcgagtattttaaaaaccaacattagcttccattggtgaatgtaaaaaatgtaaatgactagtgacatccaagagtaaaccatttggacgcatcaattttgaacgagagattggtggattaatgtctacatacacgtttactctcaagctatttatggttgtgttaaaggttcctatcttacttagcggctttgttttgggtataaatatattgattgaattttaacatttaagagtatcatcgtttagaaaatatttgtgacgaaaataattagactatggtcagattgattataactttacaaaacggtttctttttacttgtgtaatgacatttagctatagatcaatttagcgttcttaatttgtgttgggttagattttgaattggaaaacatttgacgtatatatgagttggatccagtttgtattttggttacattttcagttatatatgtgataagaagagttaatttagaaagttattttttactgtctgtatatatctctataaggaaaattttctaattaaatcatttctttgaaactcttatttgcatcaatcatatatgccatatattcacacatatattcgtgtcgaagatgttatataatatttctaagaaaaaatcattgaaaatgcgaaaatatttcataccgatatgaatattggtttgtgattataggtttataacaagatctcaccaacgttgcttcgttggagaactacagtattaaggtgacaaacttagtttcatgtcaattactcgttttcgttttgttttggtctcgtttcaatatattagttatatatggatgatgaaagaataaaattttgtattaatatgaattggtttttgactttacgtatatttcagtagaggaaaacttgcctaattcacaatttccttatgaatataaacttttttataactatgatatataataaacctataatctcaaatcaatattgatgtttgttcagaaatttctcgcggtttaactatcatcaatgttgatttgttaaagaataggcatagcaacatgttacctgaatcgaaattcatagcaaagatttatgtttgctaacgaatatcatatactattattgataataataaagttacatttaagcttttagaagctatatgcatatacttgcatacatcatcattatacgcatatgcttcactaattccacattttaaaacaaatttaaactttgtgattcaattcaagatgtaatgactttcaaatatgtaaaatggttccaacgcattactctttggttatcttagttaggactctcttaaagagagacacatcacacatgcaacaagttgtgtggcaccacacacaagaagatggtcatctttggtcggattcaacaacacaattttccaccttaaactcatccgatttcatcaaatcatagttcgttacactccttgattagtctagttttcaacgaacataaccattaaaaaaaaaaccataagcattctccaaaaaaccaaaaataccgtaatactatcaaaacaaaccatagttttgaccaaccttgcttcaatccccattttctcatcctacacaaaaccatttcaatcgattaaacactcaaacaaaaccttacagaattatctacacaatgaaaaaaacaaaatcaaaatccataaagtaaacaaaaagttatgataaaatcaatcaaagctaaaagcacaccaatacaatacacaaaagcacctatccacatccattaacctccgcatccttacattcgtaatcctaaattataaaccgtcgatagatttaaatccaacggttgaaattcaaacctgagttgatacaccgatccgagtactcatcattttaaccaatcagagaagagattacaaactctgtctcataaacacatctgactatataaacatcattcccatagttcttctccttctcctcatcacaaaattctccgacgcattacattttcttccgatcaatacagagagatcagtttctgagagagaagaagatg

SEQ ID NO: 11256 - DNA, 3000 bp, Unknown
  misc_feature (1)..( 3000): cDNA_ID_2706187_gDNA_ID_2214486_Annot_ID_133358 3000 nt of promoter + ATG
tggtagttgtaaaacttaggctaaaacattaatctctgctcttaactagtgttggtttggatttttgttagaaacaatgattggagcataagtttttatagaagaatgcttccaagttagttgcttttgtgctatatcttgagggcttatggttatacaacttatagctcttttatttgttttttgttctcacttttctgtcaaggtcttatgttagtgttcatactttgttttcttctttacaggtctataaaagacactactggttgaattagaatctgtaagagatattagtgtttttgttggccaatattttgttactgtgatgaaatgacaaataacgagctgattatgtcgggaaaccacgatatctcgtttaggcaggagcaatatatggaagctcgacagaacaatgaactttttactagtcatgattacaattttgctttggaaccattacaagagaccaacctgcagataggtgtttcccgtgagcaaaatgaggtttggaaccacggccaggaacatgcattggctctacaaaactcagggactcacagtgaagaaatacatgaaaagcaacttgtggaaggaaaagatgaggttgattctcaggaaaaccaaaatgaaagctatgaccatacttttgacctctcctttcctgataatgatgactcgggaacttcagagaatgataaacttgctttattagtttctcaggatctcaatgataatttacagttggcggtgggtcattgcatgaatagggatcccttacctggcctgaacataagcctttctcagcagctagagttggctcctcctatccttcaatgccggtctctgcaaacagctcctgagcacaatttgatcgttggtatggaattttctgatgtccttgcgtgtaggagagcactcagagatgcagcaattgccttacgctttgagatgcagactgttaaatctgacaaaactcgcttcactgctaagtgcaatagtgagggttgcccttggagaattcactgtgccaagcttcctggtctaccaacctttacaataaggactattcatgggagtcacacatgtggtggtatttcacaccttggtcaccatcaagcttcagttcagtgggttgctgatgctgtgacagaaaggctgaaagtaaatcctcattgcaaacccaaggagatactggagcaaattcatcaagttcatggaattacactaacatacaagcaagcatggaggggaaaagaacgtataatggctgctgttcgcgggtcatatgaagaagattatcgccttcttcctcgatattgtgatcaaattaggagaacaaatcctgggagcgttgctgtggttcatggaagcccagttgatgggagcttccaacaattcttcatttcttttcaagcatcaatctgtggttttctaaatgcttgtcgacctcttattggattggacaggactgttttgaagagcaaatatgtagggacattgctgcttgccactgggtttgatggagaaggtgcagtgtttcctttggctttcgctattattagtgaagaaaatgatagtagctggcagtggttcctctcagaattgcgtcagctgcttgaagttaattccgaaaacatgccaaagctgacaattttatctagtagagatcaatccattgtcgatggagtagatactaattttccaacggcgtttcatggcttgtgtgtccattgtctcacagaaagcgtccgtactcagttcaacaactccattcttgtgaaccttgtttgggaagcagcaaaatgtctgaccgactttgaatttgaaggaaaaatgggagagatagcccagatatccccagaagctgcctcgtggattcgtaacatccagcacagtcaatgggccacatactgctttgaaggaacaaggtttggacatctgactgcaaatgtttccgagtcacttaatagttgggttcaagatgcgtcaggtcttcctataatccaaatgttggagagtattcgtcgccaactaatgactctgttcaatgaacgccgtgaaacaagcatgcaatggtctggtatgctagttccatctgctgagagacatgtccttgaggctatagaagaatgtcgtttgtacccagttcacaaagcaaacgaagcacaattcgaggtcatgaccagtgaaggaaaatggatagtggatattagatgccgtacgtgttactgccgtggatgggagttatacggtttgccttgtagccacgcagttgcagccctcctcgcttgtagacagaacgtatacaggttcacagagagttacttcactgtagcaaattaccggcgaacttacgcagaaaccatacatccagttccagacaaaactgagtggaaaacaacagaacctgccggagaaagtggtgaggatggtgaagagattgttatcagaccacctagggatttaagacaaccaccacggccaaagaagaggagaagtcaaggagaggaccgtggacgtcaaaagcgggttgttcgatgtagccggtgtaatcaggctggccatttcagaacaacttgcacagctcctatatgaaaaacatatgacatctctctttagattctttacttcttctctgatctgaatttattatttcttatacttaggtttagaatattattttcaaagcctttctctgtaactcatttttccaatagatatccaatgacagattcttcttatgttatagccttaacgaatagattttataaaaccattgccaaaacactattatatcatacattggggatgagagtttggttattaaaacaaaatggtgagtcaaatcacacaaaaagcaaactaagaaacttccggagtaataggactcaaagctattttagtacaacacacgtggagaaagcagatacattgtctcgtaacagaaaacaaactcaagaatggacccaatcttagagttctaacaatcttaatctcatg

SEQ ID NO: 11257 - DNA, 3000 bp, Unknown
  misc_feature (1)..( 3000): cDNA_ID_2702082_gDNA_ID_2214486_Annot_ID_133360 3000 nt of promoter + ATG
gcatgttttataaatatcaaccttgtattggtgtcagctttcaatcgctctttacagaatccatgtataactagatctataatgcaaaatttgtttactttactcaggttagatgttatcgataggtgcttctcgaagagaacaatggaagaaattatatctgcacttgtaagtttttcattaatatataggatatgtcgacttccgttcctaagttggttgagtttacctttgacattgcactctgtgttggttaggagagagagaccactcaagaactagatgattggagcttaactacgattcgagctttgaagaagtcttcaccctcaagccttaaaatatctcttagatcggttagttcccaaaatgtgtcatatgcaataatgggacagagctgactatgtgtataaatttcagataagagaaggaagattgcaaggggtaggacactgtcttacccgcgagtatagaatggtgtgtcatgtgatgaagggagatttaagcaaagacttggtggaggttttgacagcttttctgattgtatcttcaacctgaaattttactttgtagacaagacaataattaaaaaatcatgttttacttatgcaggggtgcagagccatattgatagacaaagataggaatccaaaggtttaacaaatctctccatttagtatttgttgttatgtcatattgttgaaattatatatgttgtattgttggaattatagtgggagccaaggcgattggaggacatgaaggatagcatggtagatcagttctttgagagagtggaagaagaggagcgatgggaggatcttaagctttcaccaaggaacaacttgcatgctttaagaattgcagcaaagttgtgaagtagaaaaatgtgattggtcagacattaaaccaatgacctaaccaagattctgtgtcggaaccattcttctttttctttttttttttgttgttgtagaaaataagaatacacatgcttcttttactcctttcaaggagtttaatatctcatatttccactactttccctttatgtaattactttcgtgtatgtaggaacttatggttccaagttttttattgaaaataaaagaaaacaaaatcaaggctgaaattttttcctacggaaatattgtgttatatattgtaattgcacatgctttgattggaggttccattatgtgatattagagccttcattacatttttgatctaaaccactttatggtatccaaaccactcattcatcacagatttttatttttatccggtcgcgatttgtggtattaagaggaacacacattatggatgcaagattcggttccaattatggtgtgaatataagtataaattggaattagtctttcttgataaaaccaaagagaagaattgtagaccgaaaacaaaaggaaacaaagaaatgaaaaagttggtatttatgatgaactgtattaatacacagaaattaaattatatagtacaaatgtaacttgctagctaggttttttgtgtgcgaagaagattatcctcgatgacattcctcttattttatactagctcgagccttctaatatattgtgtttttggtgtcttttgtcctatgtttagcagtcgttttggttcatttgtcgtgttaaagtctatcttttgtgtcttttttattgtgttttgaatcttgtacatgttttaggtataggattgggtggtttcgaacgtgtttggatcaaaagcagggatcaaagctgaaactaggagcagagactggtggaccgatggatcggatagctgacggatggcataaactcagtcggatcgattagtcttctccaagaccgattggtctggttttctgactcgtttccttttatttttcagtattctacgacactcatttttaataaatatatattcttgaccgaaacaaacaaagtataattaagatttacaaccacttgacagaaaacaaaagtcataaataatgatttcttacaacaaaccaaaataaagtcacatataatataccaaataagaatctatctttttcaaccatactagcaaaagtcaatgttaaaagaaccataatagcgaaaccacctttctatttctcagtgtcacgcatcaatccaacggacaaaaaaggaagatgaatggaaaaaagggaaatatgagttataaagacaatttattcacgtacgacgtaatttttgtttgattgaaaatgtgcaagtgaaaagatgggtcgactataagataaaataaatactaaactaagagaaaataaaaaactatttgttttagaaaacaaaggaaaatcgatcacgacgaaagttagaaaggttaggcacatgtagtactgtcaatgttgtcatatcttattgatgcaagaataggaatgtgaaattaaaccaacgctctcttttaggacatgtatgagctgacaagtttcaacccctataaaaacgggtagattgtggaatgtgatttgatataagtagcaaaattagattcttacttttagagagctcaatgagatagattaaagttcattaaagctttatttagtgaaaaaatgatttgaagaaataccaaactatgatatactttttcattgaatgaattatgaaacgatgaaacaagagagttgcacaaagtgacaattcttcatgttactctattgatggttcattacatacatatctattaatctacttattacgaaaccctatttacatggatttttggacttttattaagttatgtgtgctttagcagtttcttatgtaagctttaatgctagtggatgagtgtgagacactcagattttcatacttgtgttttcataataagtattaaaattttcattcatttgtttacataaaaatgagatttatataaatcaacaacaaaataaataagaacttttaaactttattttagctacacaaaaaaaaaaaaaccaaaatattttcctatatatatatg

SEQ ID NO: 11258 - DNA, 3000 bp, Unknown
  misc_feature (1)..( 3000): cDNA_ID_2702050_gDNA_ID_2214486_Annot_ID_133362 3000 nt of promoter + ATG
gaaacatacgttgagattagaacaacaagggggatacatatgaagagatgatatagatatatatgttaatacccttcggatccagaacctgagagtgatgttaaagaatgcaacatcacttgagactgccaaggtgttcattgtgcgcttgaaggaagacaagtctcggttcatgactggttgtacacttgccatgagacgatggtaccatctcactgtttggaggaagacaagtctcggttgacatctttagatctagggtttgcagagggagggtttttctaactttttgatcttatctttgctttgggatggtaaatcggtatatgtggtttctagatatatcgaattaggttatacaaactattgattgactcgtgtaacgaaaaatagttgtacacacaacacatgtcaaaaaggttaataatatgccgactataaaataaaataaaaatataaaaacaacgatgcttgagctgaaaaccgtctataccaacccggaaaagtttaacccctaatcagtttattttggttatcagtagggattggcaaagaaaccaaaccttaccgaaccgaaataaatggtttggttagatccgtgagtttcgattcgattccgcttctgtagatttagttatggaacatgatggaccaaggagatcataggaagcttggggtttgtctgtagtattggttttatttataggatacttgcaaactaagaagagtgtcggtgtattcctactatagaagagtgcttccaagttagttacttttgtgctatatcttgaggactaatttgctcctctgtttgttatacttttttttttttttttggaaactactcgtgtgcgaactttttgttatgtttaagttttgaagtttgaacccttaggaactatttgtatcctcacttctggcaaggtcttattttattgtccaatgttcatgcattgttttcttgtttgcaggtctataaaagacagtacgagttgagtcagaatctggaacaattagtgtctgcattttcattgggatctagagctaagttcataattaaaacccaaaatattcaagaattcaaaaaaaataaaaataaaataagcaagaattctactatttgaactacaagatcaatcatcaaagttcatagatctctataaacattttaaaggacaagattgacggatttttcagatttctgaaattgatctggatttttgttttaatcatccggcctaacgaaccacaaaagaatattaaaaaataaatctcaaaactatagtattaaaaagatcgagtggcatatcgtcatacacggaacgtaacctttggcactatacacggactttcgcagtctttgttttctgtttgtcaactttcatttgagtcttcgtttatactttttcgaccatgttgctaatgtatgcttaagtcgtcattaaatattttggttcctctcatcttgacgtagaaattgtcattctttcacttatttgattctttcgctattactttaatcccacctgcaatttttcgagcaaggcacgattacatttttctttgttttcccatgtacgcacctaacctatgcaccaatatggcttctaatctatgtacacacctaacctacgtattaattgttttggaaaatggtgtcgtacatataatactactagttatacctgtaaatttttaggagtgaaatatatgattgatcacgtaacttagatgataacattgtacaaaaaacataacataaaaaactatgtgtttattatttattatgtattttacaataattgtagtccgtggatgttcgacgtatttatatatttatttaattaattaacatgtgtaaaaatttatgtccgaaagatataatctgaattttgagatgagaaatatatatgattctaaagcaaaatcgaagaggagttaatatgtagaaaatgatattatatatatatatataagattatgttaataaattaaacatagtgaaaatgatctgtatatttggagataaagttaacataaagaaaatggcaacttaacaaattgttttggagaataaccctaagaataacatattacagaaactttttttttatctattctgtaaaatttaaataaagattaaaatcggaatatttgaatattcattttaggtttgtgaaatttacttaatttatctttcttccattgtcatttacgtaatttttaatataattgtttttcatttacgtaagtcacattttcttttattattgcatccactctcgaaacttattaaagacactgtcgtattttaataattttattttagtttttttaatatttttattataaagaaagacacccaataaaatgtccaatgttgatgctctaccttgttaaaataaatttattaaagataattataactatttgccaccacgaaaaaactaaaaaattgcctccaaaaaagttaactccttccatgaccccactatcttttgtttaattttttttaaaagacccaacattactaatattttataaataaaggtataatttgtaaactaaaactacttaattttactaatttaaaaccctaaaaattttgattccaaattttccgttgttcttttattctcctccttggttttttatagacgagaactcattggtaaattattatttttttctttgttcctttgtaactgtttattttaatctttgctttttttatttagaaagtttaacagaaaatttatatattttaattgtaaaaatttctggttttttttgacaaatgacagttttatggacattttaatatattttaaaactgaaaaaaattgattatagtttttgcccccattgaataaattttctagacccaccattgcttggaaaggtcattagttagtaatattttatctaatttgcctctatatatatatatatgttatgtggtatctctagtcattgcaactcacaggcaaagagaaaatg

SEQ ID NO: 11259 - DNA, 3000 bp, Unknown
  misc_feature (1)..( 3000): cDNA_ID_2702070_gDNA_ID_2214486_Annot_ID_133365 3000 nt of promoter + ATG
cttgttatatactagaacctgtttcaagacacatggaagagcatgggctagagtttcttcaatttgctttccggtggtataattgtcttctgattcgtgaggttaaacatcactttgaactcctacgaatatatgccagtatgccatggtttcttaaatccggtttagtcgcagtttttaattgtgaaactgacaaacctttgaacttttctagatcccattcaatctcatcaatcgactatgggacacttatcttgctgaaggagatgcgttgccagacttcctggtgtatatatatgctagctttctcttgacggtaagcaaacactgaatcgaatataacttgcgttggtcttgaaaatgttttcttctataaaccacgagaatcaaatacaagttgtttctgtaaacaatgcagtggtctgatgagctgaagaagctagattttcaagaaatggtaatgttcctgcaacaccttccgacacataactggtcagaccaagagctcgaaatggttttgtcaagagcttacatgtggcatagtatgttcaataattccccaaaccatttggctagctgaaatgacttttcctccatggtgcttgctgctgtttttccctttgttatattatcttcttcttcttgttgtctaaatcagctttcgttttgttttgggttatggtaaatgctaacattcttgtcttgttaattgttattagtttatgtatggtttcacttgttgaatctgtcaccagtttgtgtgtttgtaatatttgtagctttcactaatttggctctctcaatatttttttttttttgggaattcatgaaatttggggagacatagagagctctgaaatggataactcttgaatgtattatccatgccaatccagctcaacccgatccgacccgactcttttgggcgagtaataataggttcttttgtttatgtgttagatagataaaacaatattaatgattaattaacctcaaaattcaaaacacagaatgtggacataagcaacgttgtcaacaaatctactactaaagatgatgtcttttgtcttggattcctaagcataataatatatattttaaagtcaacatcaatcaaaaaatttggtcgattatttgcatcttttattattaactttgggtggtatgattatttttgataaggaatattatttctagtaaattattagttatgtaacgttatagaagcttgagcagtaatgtcactaatatagcaaattttccattcaagtaaaagaaaaatatcgacagattataatgaatatgatgatgatgatgatgatgatgatgagtcatcactttttttaagcccatgcctaattacggtaaaatgaaaaaggtgttttaaggaaataagaaaaaaaaaacacagtgaaggaagggttaagagagaaaggtaaagtaacaagtctctcgagtttcctttttgctttcccttttgtgtggttcatctctcagtcttcttcttctgctataacgctcttctccatcaccgtataatcgagtttcgattgtctccgacgaagagaagctgacacttctggtttcgtcaatttctactgggataaagctctctactacctttttgctcagagaaaatggtttgattttcgaggatgataaaggcttcaggtagcttcacttgttccttgttcttatagatatcgctttctcgtattagtgcttgaaaagtgttgcaaccagttctaattcgagaaatttacatgaatgtttaatcgtagcctctgcgttttcatttgagcttagtaattgtttttgggagaatttgtgagtgtttgagaattgggtattgactctgatttctgggtaaaacagaaattttgaactttttgttggatccgaataaattaggatcttgaatacaaaaaaagcaaatggttgttagatgccaaaaatatttggtggaagaacacaaagatttaatagattctttttttatgtgggggttggattctttactagttggaataatacttaaaaagacccaaatgttcgttggattcaatgataagaggtatagagtgatgtggttggcaagaaaatagagctcttttataacaaagaacatttcactaaactatctaacttcctttttctgcatctaccatacttgtaaatgtccattagcctcattctctcgaatgggttcattggaaaggttactaactacttttgggtttgttcttttcttctgaaggttgttgtagaggtgtttttgccagccttggtgctggtcatggattttatctgactatcgtatgtgcctttgatgaaactaaataatgccccggggagagttagctatgggctctttagagactgtttgttggcttaagggtaagtttagttttcttgcatgttgagtttgaattctaatttgtatggtggatacaaatgagttgaagcctatgtttttttgcggctaacgagaatcatgagagtagtttcacgctctgtttttgggtttccatagttcactgcaatgatgaattatgtttatagacttgttggaatgagtttaatagttttatgttagcaatgttttccccaagcaacagcattacacattcaggtttcgctcataagaaaagttcttgtttcttggagagacattcttctaactaaattccaactctgtgatcgcaataacgtggtttcataaatgatttcctggaatacgaaaatatataaagctgtttgttgatgtgttactttcttctcttatcaggctgcttggtttatcgcttcttgttatttattatctggttatcaagcttccaagatgtagctgcgcatgataagcttaatgagcatagtagcagatccacaacctctgaattggcaaatccacctggtattggagtatctggtcccattcaagtatcaccgtccgtaatccccaaatatgcatcccctgctctaccttggacaccaccaatg

SEQ ID NO: 11260 - DNA, 2080 bp, Unknown; identical to SEQ ID NO: 11255
  misc_feature (1)..( 2080): cDNA_ID_3593271_gDNA_ID_2214486_Annot_ID_183500 3000 nt of promoter + ATG

SEQ ID NO: 11261 - DNA, 3000 bp, Unknown
  misc_feature (1)..( 3000): cDNA_ID_2702066_gDNA_ID_2214486_Annot_ID_133367 3000 nt of promoter + ATG
tattagatcattttttggcgattaaaacgaccaaagacatgtaattcttgtctattaagttaccatcctaacccttttttagatatttatatactctctgggatgaaagtagtgtaccttagctactgatttaggagaatattctccctttagctttggatcaacacactcctctactgtatcttcactaagtttcggtgtagcctgaataatacacagttataagatatgagattaaaacacagtatgatacatatatattgagatggaaaaagagtagctaaaacatacccaagttacaagactttgttggcctcgcggcattgtatggtcaactggtttcctccctgtcaagagctctagaagtacaaccccaaaaccatatacatcactcttatgtgtcaactctccagtcatagcatatctacaaatggcaagtcacatttagctagctcgtacatacttttataacgatgcaacaaaatttaaaagtttacaaactatggaggattactctggagagtaatagccaaagctgcccaaaactcttgtagattgtaaacgagcagcattatcaggagattgatttgaaagattaaaatcagcaatttttgcttgatagtcgtcaaaaagaagtatattgctagatcttatgtctctatgtattacttgaggctgaaccttctcatgaaggtattctaaacctctagctgcctcaacggctatcttcacccttgttatccagtcaagtgttggacctggtagtgcatcttgaactcccttcctacctgtaataacatcacatgacacaatcatggagaaaacaatcctaggccgagaacctcttagttatttaaaacagaaaaaagttttaaaataagaagggcggagaaactcattataccatgcagaatatcgtgcaatgatcccattgttgcaaactcataagcaagaacacgaaggttttcatcaacacaataaccgaccagttgaatgagattctcatgctttagtcttgaaaccatggaaacctaaggagaaagaagcaagagaatgtaaatacaagtttccttaagacaaaggaagggaaaagagattgaaacaagatctataacctggcttaaaaactcggtgtttgtttcatcttcaggtgcaagatcgagtttcttcaaagcaactgcttttccatcatttagagttgcatagtatacccttccataagatccctcaccaatcagagaatttggtccaaaattgtcagtctgttcattaacctcatccactgacaaggaaggaactataatgggaagaatctccttaggctttgcaagatcttgtggtttttgattcttttgatttgctacatatgtgatgacaagaaaaaaaaacattttcttattagaaacgtacaaaagcattcatcaaatgtttcacgtccctgctttaaaatagtcaactcattttaagtggttaaatatgatactttatacaaagcctgaaagctgaagcctatatttatgaaggaaacaataccactcgaatccattattttcccaaaaaatcatcaaatcaaaatcatacatagacagaaaaatcagtaagttaagtgatctcttgaaacttactgttctcatttgaagaatctgaaactccttttttacccgcacaacatatccacttgcgcattcttgttatattcttcaaatatggattttccaaaacttttacctcctgaaaccattcaaaagtattgaaaatagatgcataaaatatacaattttctatcaactcgtgatcacactacagaattctaacaacaaatctagaccaaacccacagtaagtaggacaaagttttaagaaatgaagttgtcattgtcattgcagcgacatcactttgaatataattggtgaaataacgttacagtttcactaggcactacttaggcaggaatgaaagattatatactagcaagatcacatagactaaaaaactaaaatcgttacctaaatgataaatctattcgagtttacgctaaagttttatgtataaaagaaacatatatataatcagaatcactccgaacgaagatcctcttcaaatgggcacatcaaattttttttaaaaattataaagttaagaaagcaaaacctacccccaattttctagttatctacataagtaattaaattgtgagaaccatatatataacctaaatttctagaaaataagtttttaataaatctagaaattattattacacctaactattatatagtataattatattttcacatttaaagttaggtctgattcttaaaatttatagatttactcaaagtatagtgttttaaattttattatttagtgtcattcttatgagttgtattctctcacaattgtcaacacaaatcggaaaaggaaaacaataataagtaagattttacaatggtgttttgttgaagtacaaagaatatcaaatattctatcccaagcaaaaagatttgaaaacaataaataataatcaatatgtaatccgtagataatatcaacttatcatttcatcttcagattttttttctcttttttttttgttacattaaatcaaatacagttttgttatttaaattaacagagtacttatttttgacaaactttcaaaaactcttgattttaattttaattttctaataacactagtttagtacatttgtttggccaaaacattagttcggtattacacgttttttatgccacaagtcatgttagtcaaatataatgtgcttcaataggactttcaaattttgaatattcctatttattaaattcatttctaatatctgtatttagctttccaccaagacaaaaaatcactgtagcgtgattagcacttagctcacaacgagagaacaggcaaaaggaaagaatgagagattctatcgattcataaaggaaaattgtacctctccaattctctgcttccgtcatcgtagatccatg

SEQ ID NO: 11262 - DNA, 3000 bp, Unknown
  misc_feature (1)..( 3000): cDNA_ID_2717198_gDNA_ID_2214486_Annot_ID_183519 3000 nt of promoter + ATG
aggttagtgtaacagtcgaatacttcattcaccaaatttcttagtaaatcttaaaacaactctactgttaaaacagaaaattttccaaattgaataagtaaacgaataatcaaaattttcatttacaatttaaattaagattttttttttttgtagaatatatgaaaatacatgagctagctatttgtagttgtgaggaatttgagatttttgaagtttggctgactcattcaacaactaagtaacattatatcgggtcgcattcaacagctaagtaagaccggccgggtaacttacttaacttcagtagtcgacactttgattattttaactaaagtaacttcgttgttgaatgggtaagtcaaacttccaaataaaagtcatcgtatgtttggaaaagtaaaagtcatcatatattctaaaaacataatatattaaaatcatattattatacggatacacgttttaggtcttttacaaaagaaaaccatctacatggcaaataatataattcaaagatgaatttggatcaaacacattttgaatcaaaagtgttaatttggtttgttaatagacaaataagtcatataaccagcatgtaggacaggggttctcctagtattttacgttaaagggatattatgtgtttataaatgacacatatatatagtagttgtcacatttttttttctttgtgaattaataaccacgtgatgaattctattcatgagaatttctcagctacaaatgaatgacttaaaaatgtggctgcaacaatttaagaagatagattcattgcataaggagctatgtgagaaaaatcattaatagggaatcagtgaggacaagataattggttgcacgcacttttacatagaaaagtcctggaagaaaaatcaaatgtttgacagaaataaaagattatttggggaaatgttttatgaattgtgttggatcaggtccgtcatgccttattaattttttcggtggaaccaaaaaatcatacgatgccttcctgttctacacgaggactggacaacacatgtcaatacacatctaaactataaaagaaaattttgacaaaatatatataatatactgtatatgaaaggcaaaacatagttatctatataatattttttcaacccagtaggtcaaaatgtatttagatcaatttgatattcgtttatttaataatttttatctattaaattttttgataggtctattcaaacaaaatttgattttaaatccgttttcaaaaacttttacaccgaatatttttatatttaaaatataaatatttctaaaatttggttaaaatttaaaactatgaatatacttgtttgatttttaaatattttaaatcatattgtaattttaaatattttaaaaacagacatatattactccgattaacaaaaaatatgtgggtttaatatcatatatataaagtaaaaaatttagacaattattcaaaatcatatcataattaatattaacattaataaaagaaataagttttttaacgggacaaatttgacagaatattacttaataacaattgtaaattataaaatataaatagtttagaaaaaaatacaatttgcaaacttttatatatactaacttaaaaaaaaaatcgtttcacggtgtatcgcgggataaaatctagtttatccagtaaaatattgttagaattgcaaaaaaaaagttttttccaaattatttgcttctattatctttatgaaataatataaaaaatagtgaaacatttaagaatctgaaattagctttaattacaaaaactaacccttgttttcaaaaatttgaaaaaatacttttagtaagtaataagacaatacacatttgataaaatttgagaaatgcaattactaaatagacaatttttctgaaacgttatatattttagaataaaacaagcttattttaacggtaatatatgttaagatgtacacaagtcatggatatacatcgattttactttgaatccttctaagttcatcatcactagtcttacgaataaacttctatacatcactagatatacatacgacatggatatatatatcaatattacgtatgcactcaaaacttctatatacccttaatacgtcacggcaatgtatgtaattctttcgaggtttgaaaaaaaaaaaaaaactttattttattctttctcacttcaaacgtttgatgaatcacgtcgttctttttatatatatataagaaaacgtcgatcttaagacttatgtacgaattatataacaaacttttgcaggatttactgagttaaagtagtttacactatatttacaaagattgttgtgacttctctgatatcaaattaaattaaagttataagtaactttttatgaaagagaataaaagcttacaacaagaaagtagctagcaaaactaattaaatttggctaataatagtttattattcatatcaatagttatttttcaactcttctttaacttgtataactattgatatttattagtataattattattcaatatttgaattctagttcttaaaaagaaagattacgtttaattccaaaaaataaatttaggatattacttttcttagtacacaaaatagaatcaaaaatataactactatcataggtcggctaaaatgatgttcgtggtcatagttaatggaagtgtttttttttggatatactatactgtgtatttttatgaagaaaaatcaatatataataacgacttaaaagaaaaaaaaacaagatatatttccaaaactaaccatataggatcggattattacttttcaaagtacacaaacaacgaataaaattgacgtcctgcactattgacagaaaacgatgggttccaaaactgtcgctaataaactcttccaattaaccctataaatagcatgcagaatatgagttaaaaatcaccaatcaaacactttcttacatgagcaatattcaagaaatg

SEQ ID NO: 11263 - DNA, 3000 bp, Unknown
  misc_feature (1)..( 3000): cDNA_ID_2702058_gDNA_ID_2214486_Annot_ID_183516 3000 nt of promoter + ATG
ctcttagtattttatgaaagtaatatttatttcaataagagttaaaccgcatttaaaaagtaaagtttatggaaaacacgaatgtaaatgtagaacagttttttattggtcaaacttgaatagtaaaacaacaaaaatcaaaatatagtcaaatcaataatctttgaattttgctaagggattgaccgactttcgtactgcttgttctttcgtctgccgatgtgtcgagttagcttagctaccctaagacatttatattttctcttgtttatattggtatgatacattcagatctaatgataaaattgtaccaacaatactgtttttagttacattcttttttaagaaaacatgagagaaatacatcaacaaattttgacaaatgacttctcaaaataatacataagagatatatgatgtgtttatagtgacatatatagtagcatatacaaattgttttgtaaatttatatccacgtcttgaaattatattcatgagaattagtcagtttttaaaatatttattgttctaccagcagccttgcgaaggtatttgctgcacatgcacaaatgacattaaaatgtcttcgcaataaatgatttgacaagattaattcgttccatcagcagctttatgagaaaaatcatggaatcaaatcaacgatgaaattataatggtttggttacatgcattagcctatactatacatgattggtttaataatctaattcatatgttttctaaatttcgaaatatctttttttttttttgaagtaatcagacaatataacccttaaaaaagaagtaataaaacaatataaccttaatcaaaatttgagaatatacagaaattatttagtatatacatataattacatactaaatggatacatgctaagtttaattacaacttatgactcaaagtcaaactttgatgatacccttattatacggcacggcaatctcaaattttcgtggtttgacaaagtaacgatagtatgactttcaaaaataaaataaaaaagtctctttgtttgatcattcggtaaatatttttatcttattttcaacgtttgatgaataacgtcgctagaagaatatagtaattatatttttgcaggatttgttgaataacataattaacactgcatttgcaaatattattgtgacatctttcatctaattgatatcaaattattttattatgaaagcgactgaaagttacatgaacgtagcaaaaataaatttggcttagatattttggaatacatattgtgtcatcatccgaatcattttgacaaaaaataactcttctatatgttttatctatttatgatattttggtaatttccaggtaaaagatattctaaaaacacgagttagttttggaacataattttggaatattttctgtaacttcctcgaaatttcaaaatacaactacaatacagatgacattaattgcaaattatagtaacagaacataactaacttataaactaaactgtagtgataattaaatataataagaatatcaaattcattcatctcttctatatgttttatctatttatgatattttggtaattttcagtacaaaattatttctaaaaacacgagttagtttttgtctttacgaaacataagtttggaatattttatgaaatttcgtcaaaatgtcaaagtacgactacaatacacatgacattaattgcatcgtcgttaactatagtaacagaaaataactaacttataaattaaactgtagtgataattaaaaataatgtatacaaaattccattaatctccaatttccgttttattttttatcaaatggtcaaatttatacaatcttagtgtattactattttctaggtaaacaaaagtacaatccaattcaatattactacattatcaaatgcggcaaaactgaatctgataaaaaatgatgatttttattcataactacaaagggtggttaattattcacaaaccttgtttatgttatactagattttaacccgcggtataccgcgggtacaatttattttttaaattaatatatataaaagtttgtaaattgtatatagttataaaatgtttttattttatagtttacaattgttattaagtaacgtcctgccaaacccgtcccgccaacccgtcctctaaaaaaaactcatttattttattaatgttgatcttatttatgatatgtttatgaattattgtctaaatattttgtaattttgtagtaattaaatgctatcaaagatctctacggtttgatgattataatcatgtagaaaagcaatatcaaaaatgataattttgtagtaattaaataatattaaatattttggaagttttattttagtaattaatcgtgtagttaaggtagagagattttgggaagattgttaaatgtcaaatatttaattagaagattttctttctaattatcaaaaataattattaaatgccagtggcagccgctgtaaataaatcccaactccaggatttatttcacaaagtggctgcaaaaatgtatatatagatatcaattagtaagacttaagaatttaatattctaatacgagttgttaaatagaaagattacgtctctaattccaaaaactatagttattatattatttttctaagtaaacaaaaataaatatcaaaattataactgctatcatgtgagatcatatagaactgtttaaacatgaataacaaaaagaccaaagtgcaaagactagttgtcaaaaaagactggactagatatagttgccaagactaaataattataggattattacttttcaacgtatacaaagatgcaatcacactacataattatatttagctaaataggggctacattcatgcaagttgacaaaaacgatgagttccagtaaaccctataaatagcatgcagaagatgagttaaaaatcacaaatcaaacactttcatacatgagcaatattcaagaaatg

SEQ ID NO: 11264 - DNA, 3000 bp, Unknown
  misc_feature (1)..( 3000): cDNA_ID_2702038_gDNA_ID_2214486_Annot_ID_183515 3000 nt of promoter + ATG
aaacaccgagtttttaagccaggttatagatcttgtttcaatctcttttcccttcctttgtcttaaggaaacttgtatttacattctcttgcttctttctccttaggtttccatggtttcaagactaaagcatgagaatctcattcaactggtcggttattgtgttgatgaaaaccttcgtgttcttgcttatgagtttgcaacaatgggatcattgcacgatattctgcatggtataatgagtttctccgcccttcttattttaaaacttttttctgttttaaataactaagaggttctcggcctaggattgttttctccatgattgtgtcatgtgatgttattacaggtaggaagggagttcaagatgcactaccaggtccaacacttgactggataacaagggtgaagatagccgttgaggcagctagaggtttagaataccttcatgagaaggttcagcctcaagtaatacatagagacataagatctagcaatatacttctttttgacgactatcaagcaaaaattgctgattttaatctttcaaatcaatctcctgataatgctgctcgtttacaatctacaagagttttgggcagctttggctattactctccagagtaatcctccatagtttgtaaacttttaaattttgttgcatcgttataaaagtatgtacgagctagctaaatgtgacttgccatttgtagatatgctatgactggagagttgacacataagagtgatgtatatggttttggggttgtacttctagagctcttgacagggaggaaaccagttgaccatacaatgccgcgaggccaacaaagtcttgtaacttgggtatgttttagctactctttttccatctcaatatatatgtatcatactgtgttttaatctcatatcttataactgtgtattattcaggctacaccgaaacttagtgaagatacagtagaggagtgtgttgatccaaagctaaagggagaatattctcctaaatcagtagctaaggtacactactttcatcccagagagtatataaatatctaaaaaagggttaggatggtaacttaatagacaagaattacatgtctttggtcgttttaatcgccaaaaaatgatctaatatttatgtaatttggtaacgcagctagcagcggtggcagcattgtgtgtgcaatatgaatctaattgtagaccaaaaatgagtacagttgtgaaagctttgcaacaacttcttatagcgacaggctcaataccgcaattctaaattcgtgcgcttttaaaatactatcttatattgtttttggacaacagagttagaatcttcattcatacaaaagagacattttactttgatttggaatatatatatatatatatatatatattaaaactactaagtcttgtgcatgattaggtatataatcattgatggataaataagagatgaggttacatattcaggcttcaaattttttatatttggtgatcaaaatttaaaaaaaaattaggtgagtttggtctttttaaagctaaaaaatattgaaacacaacaaagcaaaaaaatgagtgattgatttcaattataaggtgaaaatagaaagaaaataatacaaaaatattacttttaaaaacattattaatttaagaagaaaaagggcaaatgagaaaagtggactttccttttaggctgttttaataatcgtcttccccgcggtttgcccatctgtctccgtcttcatcatcaagcaaaaaaaaaactcatctttctccactctctctctctctctctctctctctctctctctctctctctctctctctctctctctctctctctctctctctctctctctctctctctctctctctctctctctctctctctctctctctctctctctctctctctctctctctctctctctctctctctctctctctctctctctctctctctctctctctggttcatctacagagttaataatcattaagcgaagaagatccctagaaagattgatcagagaaagtctcagctgaagcacgtttttggaaaacccagatttgacgggtatatatctaatattttctttcaatttggatcaattctcttgattttctacctttatagagcttattgattcgtttccctttgacccaattttgctttctttatttagatttcaaatttcttactcgatttcgttttgtgccccatttgaggatcttcgttgtagacgcgattctcagtggttctgagtgttaattcgagtagaatctcttctgggtaacgtttctcatttgaaattcacagtaaagttttgatctttcattcttttcgtttttttcaatatccagtttatccatagtagttgactattgccaaccttatctgacggcagaattttgtccctttctgatttgtaattttgcagttcgactaatggaatgtggagttgttgattgagaattgcattttttattatgattagagaattaccaactcattgttccaaaagcttgtgcttatcatcattgctatcttgatgcaaatctgaatccagtttctggttttgactttactttgaagcttttttttttcagttatgtgaaaatgttgctgtgatttgttagatggtttcaatatgcctaaacaaatttgtacttgctagttacaatatttgaatcatgtctaggggacagttgctttacttgtttgcattttggaggtagtgatctgaagcattaacttaaattgaagtagcaggttgtgacattgtaacattagatgttaagtaatgccgctgccatggcagtgactatttcatttgttaaaattttgttctacttactttggcattgacatgtagtgtaacgagctaatagaggattgttacttttttctgcatctataatcagttgctttgaatggtttcaggtactaagaagctgtggaggatctatatttgaaagaagagaacaagg

SEQ ID NO: 11265 - DNA, 3000 bp, Unknown; identical to SEQ ID NO: 11261
  misc_feature (1)..( 3000): cDNA_ID_2702066_gDNA_ID_2214486_Annot_ID_183512 3000 nt of promoter + ATG

SEQ ID NO: 11266 - DNA, 3000 bp, Unknown
  misc_feature (1)..( 3000): cDNA_ID_3039345_gDNA_ID_2214486_Annot_ID_183510 3000 nt of promoter + ATG
gcccttcctagtgattttcttgtcagaatatctagatggcggtgtagacagttggtcaatggatgatctatctgctgaaaaagtctcagatgtagaagcggattgctactggtgcttaacaaagctccttgacggtatgcaagatcattacacgtttgctcaacctggaatccagagacttgtgtttaagctgaaggaactggtcaggcgtatcgatggtaggttcttgctagcttgttcctgttaattggatgtgtctttggtgattgtttgagcttatgacatgcacgtcctctccttacagaatcatgttaattatattgagtccgattttcaacttgtttaccatgaagtccttaatttacatcttctgcattttaaggaaatttgaagtttgtgtctttaacaatggttgtgtacttgtgttaagtttggttttaatgtagtcacgcttttgcttatatacgacattttgatgagttgatgtcataaagtgataagaacaagggatgctaatcaacttgtcatgatgattgatgctattgtactgcatttcttagtgcattaattcataattaaccaaccacctattttccattttaggcctgattattgttttataatatagagttaacattgtcacatcttcatctgccttgttatatactagaacctgtttcaagacacatggaagagcatgggctagagtttcttcaatttgctttccggtggtataattgtcttctgattcgtgaggttaaacatcactttgaactcctacgaatatatgccagtatgccatggtttcttaaatccggtttagtcgcagtttttaattgtgaaactgacaaacctttgaacttttctagatcccattcaatctcatcaatcgactatgggacacttatcttgctgaaggagatgcgttgccagacttcctggtgtatatatatgctagctttctcttgacggtaagcaaacactgaatcgaatataacttgcgttggtcttgaaaatgttttcttctataaaccacgagaatcaaatacaagttgtttctgtaaacaatgcagtggtctgatgagctgaagaagctagattttcaagaaatggtaatgttcctgcaacaccttccgacacataactggtcagaccaagagctcgaaatggttttgtcaagagcttacatgtggcatagtatgttcaataattccccaaaccatttggctagctgaaatgacttttcctccatggtgcttgctgctgtttttccctttgttatattatcttcttcttcttgttgtctaaatcagctttcgttttgttttgggttatggtaaatgctaacattcttgtcttgttaattgttattagtttatgtatggtttcacttgttgaatctgtcaccagtttgtgtgtttgtaatatttgtagctttcactaatttggctctctcaatatttttttttttttgggaattcatgaaatttggggagacatagagagctctgaaatggataactcttgaatgtattatccatgccaatccagctcaacccgatccgacccgactcttttgggcgagtaataataggttcttttgtttatgtgttagatagataaaacaatattaatgattaattaacctcaaaattcaaaacacagaatgtggacataagcaacgttgtcaacaaatctactactaaagatgatgtcttttgtcttggattcctaagcataataatatatattttaaagtcaacatcaatcaaaaaatttggtcgattatttgcatcttttattattaactttgggtggtatgattatttttgataaggaatattatttctagtaaattattagttatgtaacgttatagaagcttgagcagtaatgtcactaatatagcaaattttccattcaagtaaaagaaaaatatcgacagattataatgaatatgatgatgatgatgatgatgatgatgagtcatcactttttttaagcccatgcctaattacggtaaaatgaaaaaggtgttttaaggaaataagaaaaaaaaaacacagtgaaggaagggttaagagagaaaggtaaagtaacaagtctctcgagtttcctttttgctttcccttttgtgtggttcatctctcagtcttcttcttctgctataacgctcttctccatcaccgtataatcgagtttcgattgtctccgacgaagagaagctgacacttctggtttcgtcaatttctactgggataaagctctctactacctttttgctcagagaaaatggtttgattttcgaggatgataaaggcttcaggtagcttcacttgttccttgttcttatagatatcgctttctcgtattagtgcttgaaaagtgttgcaaccagttctaattcgagaaatttacatgaatgtttaatcgtagcctctgcgttttcatttgagcttagtaattgtttttgggagaatttgtgagtgtttgagaattgggtattgactctgatttctgggtaaaacagaaattttgaactttttgttggatccgaataaattaggatcttgaatacaaaaaaagcaaatggttgttagatgccaaaaatatttggtggaagaacacaaagatttaatagattctttttttatgtgggggttggattctttactagttggaataatacttaaaaagacccaaatgttcgttggattcaatgataagaggtatagagtgatgtggttggcaagaaaatagagctcttttataacaaagaacatttcactaaactatctaacttcctttttctgcatctaccatacttgtaaatgtccattagcctcattctctcgaatgggttcattggaaaggttactaactacttttgggtttgttcttttcttctgaaggttgttgtagaggtgtttttgccagccttggtgctggtcatggattttatctgactatcgtatgtgcctttgatgaaactaaataatg

SEQ ID NO: 11267 - DNA, 3000 bp, Unknown
  misc_feature (1)..( 3000): cDNA_ID_1026667_gDNA_ID_2214486_Annot_ID_183509 3000 nt of promoter + ATG
ttcgctcataagaaaagttcttgtttcttggagagacattcttctaactaaattccaactctgtgatcgcaataacgtggtttcataaatgatttcctggaatacgaaaatatataaagctgtttgttgatgtgttactttcttctcttatcaggctgcttggtttatcgcttcttgttatttattatctggttatcaagcttccaagatgtagctgcgcatgataagcttaatgagcatagtagcagatccacaacctctgaattggcaaatccacctggtattggagtatctggtcccattcaagtatcaccgtccgtaatccccaaatatgcatcccctgctctaccttggacaccaccaatgtaccctacttttcctgatacatatgagcccaagttaactggcaaatgtcctacagactttcaagcaatttcaagtgttatcgataccgcagcttctgattgttcccaaccattcgctgcacttgttgggaacgtgatatgttgtccgcagtttgttagcttacttcatatattccaaggacagcacaacgtgaagtcgaataagttggttctgcctgatgcagttgctacagattgtttttcagatatcgttagcatcctggtcagcagaagagccaacatgacaatacctgcactttgctctgtaacatcgtcaaatctaactggaggttcctgtccagtaacagatgtcacaacgttcgagaaagttgttaacagtagcaaattactggatgcctgtcgcacagttgatcctctgaaggagtgttgtaggccaatttgccaacctgcaattatggaagctgcgctaattatttcgggacaccaaatgacagttggtgataagatccctttagcaggatcaaataacgtcaacgcaattaacgactgcaaaaatgtggtgttttcatatctttccaggaagcttcccgcagacaaagcaaacgctgcatttagaattttatcgtcctgcaaagttaacaaaggtacttagctgtatcatattatctctcgcatcaatctcccttggatagtcttggaaattattctgactgtacatttgtgtaacagcttgcccgttggaatttaaggagccaacggaagtgatcaaggcttgccgtaatgtggctgctccaagcccttcctgctgtagctcgttgaatgcatacatttctgggatacagaaccaaatgctaataacaaacaagcaggccatagtctgtgcaacagtcatcggttctatgttaaggaaaggtggtgttatgacaaatatctatgagctttgtgatgtcgatctcaaagatttcagtgtccaaggtaagttttgttttagactccttaataactgtatcatcatttcctctaccgtttattgaatatcttcctgacattagctctctttttctgtttctgggtatgccttggacgataagcagcatatggaatgcaacaaggtttgcatcaattcatctcatattccaaagttgtttgatatgtgttgttgtctcgccagaataagttaaaaagtgttaatgatcttttttgggtaacaatgtgattataggttgtcttctgagaagctatcctgcagacttgatatttgataacacatcaggctacagctttacatgtgatttgacagacaacattgctgctccatggccatcttcatcgtcaatgtcttctttgtctctatgtgctcctggtaatcacttctctctctacctgttctcttcttactcattgttggagcttccagaaaactaaaaagtttaaattgcaaaaaaagttttgctttatcttattcaattttattttaaatatgcagagatgtcattacctgccttgccaacatcccagactattaaaaatcacggtaagcctagtttcgttgcaatgtaatctctagtctcatgaacagaactcaaagacttgcattttcaactcgtaattgcagggttttgcaatggtggggttggagcgttgcgtctcattgttttggtatttcttctgtatgttgttgttgtgagacattaaaaagaggtttaggagggttttgtttttggtagtcagtgaggactttggataaaacaatggtaagctcaattttctcttgtgtagatgtatgacaatagggcaagtgttatgtagtagtaatatcttctcaatcttcatgtatagtggcatctctgcttctgtttgttaatgcgtttggttttattcattttcgcctgaagatcaatgaccgaagcttgttggcctctgagagacccttgacaaaacaaaaccaatgaaccttctaaagcctgtagttctatttttcagatatctgatgagactcacaaaccttaaattcaaaattaaactatgaagaagaaacctaaaaaaatggaatcaagcatagttatttaattaagtataattttgagaaatttcagtatatgtcactattgaaaatatcgtaactcataaaaaaaaaatagcaattgaagattttgatatcaaacaaattgggtaaatttttttttgggtattccttcaaattatgaatgatctcaaattagtgtatttttttacaatttatttcttgttattgttttttggagtcagtgaatgtttttgagtttttgagtttttgagtaaagtagagttaaaatcgtaaatatgcatatacttataggatagaaccatcgttcttcttcactctatctgcttcttcgtttcatctccgactctctccgtcctccgcgtttctctttatactcctacacaaggttatatctctcttcatctcctatcgattttactctcgatgcaatgactgttctgtacgaattccccgcgaattcctcctgtggagtttcaaattctggaactcgaagaaatcaagtatttaccaaaaactttcgtaattaattcattttgaatctcatattagagcaagaaggcgccacagaaccaacagctatagataatg

SEQ ID NO: 11268 - DNA, 3000 bp, Unknown; identical to SEQ ID NO: 11258
  misc_feature (1)..( 3000): cDNA_ID_2702050_gDNA_ID_2214486_Annot_ID_183506 3000 nt of promoter + ATG

SEQ ID NO: 11269 - DNA, 3000 bp, Unknown; identical to SEQ ID NO: 11256
  misc_feature (1)..( 3000): cDNA_ID_2706187_gDNA_ID_2214486_Annot_ID_183501 3000 nt of promoter + ATG

SEQ ID NO: 11270 - DNA, 3000 bp, Unknown; identical to SEQ ID NO: 11264
  misc_feature (1)..( 3000): cDNA_ID_2702038_gDNA_ID_2214486_Annot_ID_133369 3000 nt of promoter + ATG

SEQ ID NO: 11271 - DNA, 3000 bp, Unknown; identical to SEQ ID NO: 11263
  misc_feature (1)..( 3000): cDNA_ID_2702058_gDNA_ID_2214486_Annot_ID_133370 3000 nt of promoter + ATG

SEQ ID NO: 11272 - DNA, 3000 bp, Unknown; identical to SEQ ID NO: 11262
  misc_feature (1)..( 3000): cDNA_ID_2717198_gDNA_ID_2214486_Annot_ID_133372 3000 nt of promoter + ATG

SEQ ID NO: 11273 - DNA, 3000 bp, Unknown
  misc_feature (1)..( 3000): cDNA_ID_1807750_gDNA_ID_2214487_Annot_ID_133376 3000 nt of promoter + ATG
aataaagtcaaattaacagttgtcaacctcttggatttttcattctcaaatgtctttgcgttttgtttttatggagtttcttttcatatttttttaaagttgatgataaaaatataaccatcttattatcttaagtctaaaacaacactttgacttcatcaattatctttggtcacatatttgccaattagagccttacgaacattttggaccaattgttatgtgaaatattattgggacactttggaccactttttacatactgtaatcatcgaaaataatcatcaaaatttatactttttaatctcccaactttaaccttatagatagaaaatgatatatttattgcgtttttgtttatatcttgaagtggttagtatttctagctaaagaaattggagatgaaatttgtaagttattcctcatagtgaattgttttgtatatgtagtcgactaaaatcttgagcgatatgatagaaaagaaacaaattatgtataacaatatatatactcttatttccttttacaaatactagtttttgatatattttttacagtgataaaaatgatttaatatattactatattctttaaaatatactactactcagagcatctccatcagtaaaagtaaggaaagtttttcaaaaaaaatatatatatatatatattttaatcaaaacagaaatattaattattatttaatacttgaactaataatacgatgacagctgtccaatttagatgagaatagtttctcaaagtttctcctgcgagaaattcaattctccttctctcttactttttctttcttctctcttacttttttttttttaattattattttttttattaggtatctcattgaaatactcccaatggagatgctctcattgattaagtatgcaaagacctacactcaaaaccaatgtcaaccagctttcgagatcttcccatttactgtgattattcagtagaattaggtacaaaccacagttgtggtggctggctcgagctgctgaatccacataaatttgatcttaactattgggacatttaataatctcatctttaaaagattcattaattttgtttcttgtctgtggtagatggatcaaaaaggagtgtatggtaggtgcaatatcgattttggaaacttcggaccccctcaggccctcggccgaagtcaaatgattctgctaaccattgcttttttgctcatcattatagaccaaccacttcgagaaaccatttgataagaagtataataatcactaatatccaaatacgtcaactaactcatatcaagataaatactatcttttatgaaaaagccaaaaatatttcaaattcatgtacttcattattttgtaataaaatgatactaataatttcatttggatttgtgttatgtttttttaaagtgattatatatatagctactacataaacaaccatacatattgttgtttcactttatagctaattagctatgttatcaatagaagttaaacagtgaaaatgacataatacatagctaattaacacacacaaaatttagaaacatccgcttggactacaacatcccacttttaatttaattagaatcttacttaatgatatgatcataggagtgtttgtggtttagaaaaatggtataatttgaaaaattaaaagatagttgaacggtaagggatagtgatttaaaaatatttattgattggtaagaattttaacaaatttaaatagtttagttgatatatagtcaatctcaattagtaattcatagacagtcatcaaaaccatcataattcttaacacatttatcaatcggtggtggcttgaaagttcaaacttcaaactatcaaatcataactttaaagtttaaacatacacagatggttaagctgtcatagttgatatttaaaggaaaaataccataaaccaaagtggtttaagttttccatcttctaattaatttttcactactttccaacttcttctttttttttgttcaaactacttttcaacttctaaatttagaggagtatatacgagtcacgaaaatgcagatgggtgttatataattatgacatcttataaggaaagtaaaaatattccataataattacaaactcttcgtatcttcaaaaagacgatatacaacgtgatgaaaaaagagagtagaatctgacaaatcttatgtatatttttttaacattaaactgttggtgtaacatttggatttaacaattactgattactagtacaaataaaataaaaataaaaatgcggattacagcctaatatttccagtctctccacgagtcacgacgctgtaatgatgtcccttttaaagtctttacttcttcctcactacagagacacagagcaagcaaaaaccctttaatcattcattcagtcaccaaatctcttgttctgtttttctgtctctctgcttcagtgttcttcgcggcctttaccagtttttcagttctttgacgagcttctttcattggtcctgaactcaggtttttgtatctatcttttgtttcttcgttgaaaactagaacttctttttgctgtgtttcaatggttgtagattggatctggagaatagacaatttagtggttgtggttaatgtcatttcttttagtaaagtttgaacctttttcgattttcatagcattgggtttgttttcactcaagtatttatggtttgctctctaattgaatacacttttcaattgggtacttgattttgttgattttgcttgtgttttgagtcgttgagtacaaagaaccaatccaataatcattagcttgtattcacattcaatttttgtatattaaacaaaagagtttctgtggagtagttgatccttaaacattagctgttttttttattaaccagagtattttggcttcaaatctcagggttagagcagcatttgcatatatacaaggtgttttggtgacaattgatagactctaagatg

SEQ ID NO: 11274 - DNA, 3000 bp, Unknown
  misc_feature (1)..( 3000): cDNA_ID_2702132_gDNA_ID_2214487_Annot_ID_133379 3000 nt of promoter + ATG
attggttgctgaatgttcatcgaaaaatcatacaggatggattgatcgaaaaactaaagatattgaaaggctttgttggtaagcttaggttccctttttcttatctttgagcatttttctgtatgaagattttgtggtttatgttaatatatgcagaagcaagagtagaagcggatcctaagaataagaaagctgcagggattatgctgttgagtctatctccctttctcatggtgacattttcggctatatttgattcacattcttggagtcacatcattgtgttgatcacactcataatttcttcttcttcaaccgttgtctactttgtttactcggtataatccctctagaaaacccaagtaaacccttttggtttcgctttgttatctaaatgacaatttgtggaactctgcagtatcttgatacggctaaccaagagaagagcttagatcacgcgaggtttgagctcatgtcagaagttcataagcacttaaagaggttttcaccgaaacaccttataaaagatggagaactaagcaaagagagcttgaaaaggttttattctctctatatttttgaagcaataatagtttcatttcagccttcttacgtcgtaaatcattgcttaaatcgatagtttgttcaagaaaactgataagaacaaagatgggaagatacaaatatctgaactaaaagacttaaccatagagctttccaactttgggagaatgagatatgacatcaatgagcttgctaaagcttttcttgaggattttgatggagacaacgacggcgaattagaagagaatgaattcgaggaagggattgcgagacttctcaaacaatacaaattcaacgttgaggatcaaagagagaatcagactgtaagtctatgcacatttcaagagaaatgccatttttggatatttctctagctagtttaaaaacaggctttggttttgaaatatggtaatgtgttgcaggaggaaaatggagttcttaagctggaaattaaaccgaagaaaacacttgttactaagttgctatctatggaaacattaatagctacgactgaagtcatcgtagggatcctaattgtactctttcttgcaaaaccatttatgctgaacatccagctcttatccatctcagctggaattccttctttctacatcgtgttcgcgatgatccctttcgctagaaacttaaagaacactctatctacacgcttctgtcgtggcaaagacaagaaaagagtctcgtccaatactttctccgaggtcagtttaacaatcacaattcattaacttgactaacacgttaagaactcaaagtttatgggcattttcattggtttccacagatctacaaagatattacaatgaacaatctcttgggaatgtcggtaatattggcaattgtgtatacaaggggcttgacttggaaatactcggtagaaactcttattatggtgatcgttggcctcataatcggcttaccaatctatataagatcgacttacccgttctggatgtgtgtcttggcctttgctatgtacttcttttctcttctccttatctatatccgtttaaattttctagacaagaactaaggttacacacctttaggtgagacttggagtgaaattatatcattgttatatagaaacttatcatatgttattcgttcgttttggaaagtatttatattcattgttttaagaacacgtggttttcgcatatttcactcggaaaattcaatcgtattggcccatatcactgaccatcccctgcaaacatttatatattatatatgtacccacaatgtaagttgatccggcagcagtatcttttttttttctttgatgtgatcctgcagcatatcgtttgtacgatttatttttttgaatgtaagttaatgcaacttgcactctaagcttagataagtccaaaaatattagaacttgaaggaagtgcacaatagtatttaaatttaggtccgatggggtcaaaatagttcagctccgattttcatagtttcgatgaataaaaaaaagtcacattgtgttttccgatacaaattgtaaaatactccagctatcctcgtgtataacaactgttcatgctccacgtaaaacttatttatattaaagtaaccccccaaccacacagtagaggaggtaacatacctaataatccccaaatactctcgaaattccacaatattgatttaacgcaatgttggaaaaattagcaaatcagatgttttgataagtttgtgataaaaaaaaaaggtcgatagaccagaagaaataaagaattatgaaaacaaagctgcttggatgttatagcttttaaaaggtgttagtaaaatctgatgatttaaaaatacttaactcatgtgatcttggccattggtgcatggaaaagaatcaaaagttgaaccaaaatgtaaatttgcagctaaatatatgcaaattcgaattcaaatagtgacacaatggtcacactaacataaaacactagatatcattttattgattttcaagtgatatatactttcattcttaaatataaaatatgattttatttgcccatttcggccaacagtccatcatctttctttggcagagtggcatgtatttccatgctagtttgtaaattacaatgaacaaataaaataaaaaatgtattgttaatttgactctacaaaaaacatgatatgaatttgttctgaaaacaataatttatataagtacctaattggggtaagtattaaaatattaacatggtgcttgtagatctcagttatatgagcagggaaactttagtaagaatagttgcaatatctaaaagcaatctcgctcttctcttctcttctcttctcttctcttctcttctctcctcttcaacctcaatcacttaacaaaaccctcagtagaaaacttccactaagtttttagtcatcgttggttttcacaataaagcagctcacatg

SEQ ID NO: 11275 - DNA, 3000 bp, Unknown
  misc_feature (1)..( 3000): cDNA_ID_2702124_gDNA_ID_2214487_Annot_ID_133381 3000 nt of promoter + ATG
attatgctatagtgcgctggcatgcctgagaaagataatacaaatttccaattttggtaaaattttgacctcaacgaagcagtcgtgaaagaagaggcgaatggtggctggagctgagatggggacttctttgaaccgctgagaagtgacggaaccgacgagagtttcaagctgaggacatttcttggagtagtaatcggcggagagctctctgtggggccgtggtgccggaggcttagaggttgtgggttgtaccggagaaatcaaaatggttgatgtgaggaagaggaaaaagaatattgaggataacgaaagagatatgacatgcatggtggggttgtgacttgtgagatactgtgagtctggaccaacttataaatagtttacagttttttgtacggttcaaaataatgacaacaaaacaacctaagtcaaatctcatatcagtgacaaacaagttgattttgttataacacaaaatacttttgtgagacaaaaaacaaagagtgacaggaaatttgtgaaacatgggttaagatctcatttttttctgtgtattttagtctaaaatgtggaagcaatcatggcttatattaactttatagatctactgccgacaataaaaaaaaaatctttatagaatctttcgagtagaatgcgtaataatgtgttcctgtgactattacacattttctaaaaggatcaataataatgtgttcatgtaatttgccatgttaaacataactgtggtagaacaaaaatatatatatgtaaatactaaacagtactaggtgaagtccattgaacattggtttagtttagaagtcaggtcgagtaatccggaaattttagactctggaccagcccattattattggttcagaaaaagcgaaattactaaaatccggtttggaccgtcgaaccaagttacccacgaaatctcgagccggcttcgtttccggttagggttctaaatctgagatttccagagaactgtgcatatcttcatagtttctttgaatttcaccgtattcataccataaaaatgagaagaatcgtcggttcaatttcgagtcttgctaaagataagctctcttcatcttcttattcttcgtctagacaaattttcactgcgcgttcatcttcttggcaacgagatgcatcaagtaagctctcagaagcttctttacctggaaaccacataaaatgggcttcgcttggttcagtcagaaattcgagattcgcatctggttttacaccattgcagcaaaaacctttggattcaatcatggatttggccagagccaagactaaatcccctgaagaactcacttcgatctgggacgatgtaatctcaaaatttctctttttatgtgaaattttctgtctttcaattgcatttcgttggatcttactacattttcaatttgtcagtatcatttgggacgaggtcatattgggttaacgatgaaagctcagctttatcgattgttggagcaacgagcctccgagtggtaataacatcattaagccttgttcttgtttgattataatcctttgatcttttttttctttttctaattgatgttgcaaattgcagccgatactttgtcattccattgtggagaggaaatggttacataacaatgtttgctcaaggttctaactttaatcctccattatatatacatctttcatttccttgtgagaaatttatatgaaatggttacataacaatgcttgctccagatttgtggtagcttttaagttcagttaaattagtgagattcattagcaatggatcttcttttacttgcacttattttgtcagaacaaaaattagcgaactactgatcgcaagaatagtttatctgaaagttcagttaacttagtgagattagcagtggaaatgtttaacttagtcaggaaagaaattaacaaactactaatctcaagaacagttcatttacctggtgtgttgatatgtgaggctagatgtaccatttaattcatgttgagcttcattacaacagttatgtaactcggctgaagagttcattatgatcttatataaatggtcagttttattgtggcagttgaagcgcctcacatgatttttactggtctcgaagactacaaagcaagaggaactcaagcggctccttacctgactacaaccttctacactgagctttcagagacaaaagacttggtctttatccgaggcgatgttgtgttcacaagcaaactcactgacgaggaggctaaatggatcatggagacagctcaatcgttttatttgaacgactctcgctacaagctgcttgagcggttcaataaacatactcatgactttgagttcaaggatgtgttacaagctctggatatgcctcttctgtgattatcaggagaaaaaacttttctggcttttgagttcttgagacaacaacaccttgtattagaattttttttgtatggtaataagactatttcatgaccaaactaggtttggttggatacttactgtgttttgcttttataaataaacaattttgagtaaagtagtcattaatttcctttccaaatcgataactgatgtcaaggtgaagaattcgaacaggtattttcctccaaaaacaaacatcgggggtgaaattttgaagaaacgtcaagttcagtggcatttctaaagtttcatatacatgaaccggcgtcgttttataagatttttgtcaaggacaatagattaagctcacggtcttcttcttcaagctaaggaaggtcgtgagaaaagaaaaacacttctcaatctttctacagtcttcttcttccaaaagaacaccatgtacgctctttatcttctttctcccgcctttttcctgtgttacagagatgtgattacatgtgtatatagcttctcttttcctctattgaactatctgaatatattactcatctgcttcgattttttctcgctcttcttcagcttccttcgtaatg

SEQ ID NO: 11276 - DNA, 3000 bp, Unknown
  misc_feature (1)..( 3000): cDNA_ID_2702113_gDNA_ID_2214487_Annot_ID_133385 3000 nt of promoter + ATG
ggatgtgaattacaggtatgaagcttgatctctatttgaattcccgcagctagcttatggaatcccattcttgtccacaaatatcgcagctaaagcatcattatttgcgggaagaagtatcgctttctatacataaatcttggctgtcgcttcactggccatcttcttggtttaaacaattaatggcaagattgaggtggcaaatttgttcgcaaactaacaagttatgactttaatttgtaggatgggactataatacgcggacagaacgaaatttctcacccgaccactgggactacgcagacagttgacaaggtgttctatttgaatatcttacattggtgttttttgatgatcacgagaactaagtttactatatacttgtatcaattaaaaatgtcaattttgccatatgtagaatttattttcttacattgtctttctatgtttctagtagagacattgttctacttccgctctcccatcgaagataaagagagtgttttacatgtcaagtgaaggcaataatctgcttcatgaggttaactactctgcttttatatatacagaatgtcctagatatcttcaatgttatctctaatgattctgattccctttaagaaactctatcgttttagttctctacttcatttctttgttttgcacggtgtatttgacattgcaaatgtttggtgttatgtccattaaacaggtcttcccaccagttaacccaactgtcctagagcagttgagaagcgtggactgtatcgtttacgcaatgggatccctgttcacttccatttgcccatcactggttagcacccgcaataaatatgttgtgcaaaaatggtggattactaaatttgtgataactgttatagacaagtctttctgttcatcaggttttgcttggtgttggggagattatctcttccaggtcatgtcgtaaggtatgctgaagcttgtcaaaaatactaatgatggtaaaaatcaatctgatttcttctctctgtcacaggtacttcttttgaacggtagccaagaccgagaaacaagcaggttcaccgcttcctgctttgtgactgctatcgctgacgctctcaacagaactcatggagatactaatattcggctcaagaatcccgtgagtggttcttcacaatccacactctttcgatgtcttctttatcagacatatatcgatatccaagaacatcatttttgtgtgcagcctggatattacatcaacactctcttggtcccgaaagatggagaaatagcagtagatctcaaacaattgtctgaacaagggatatatgatgttgtcagtatctctttccttcacttgtttccaagtttatgtgcacaacaaacactcactgttacctccactctattgcagagagtcgtggagagtgttggtgacccgaagcacggtatcttgttcaacccgagctcactgataaacacactggccggtttggtggagtaaatagtgattctttaggccagagctagtttcttcttctacgcaattgggaccatgatttttttgttactgtttagtttgatcctttagtgaattgatatgaaaggttatgaatggtcaatgatcatattcttagctaaggaaagacaaacgcctctctttctctcggagttgtatcatatgttttttcttacacgttttacatataactactgtacagatgaatacagttcactttccaatgaaaccaaatgatgacatttctacataactatgtgtgcttttcattcccaaacaagcaaaggcatctttgtttctcactgtgtattaacatgtgtgcttttactaaaaagatgtattaaagcaaagcaaatgatgccagcaacaaacagagcgtgccctgagattggtagggccctaagcccatacaactttgttggccctttcagttaagtttagaaaagaatcacttgttcaataaccaatgttaattgttgaaagatgaatttaaccgaagatttctttacaagtttttgacacagtgatcataattttataatgctcacaagtagcagtacgtgactcttgtaagtcaagtagagagacataaatataccaaaatattaaacttgtatgatgacaatgacgcatccatttgagcccatgcttcattgctcctccattcagtgattgggcagacatataatatgtattgttttagacactttgtttctagtcattcgttgcggaaatgacaaacaaatcaactttttaacagaatttattacaaaaatatgtaaagtacacgccaaaagaaaaaagtgtactactttcataatttaacataaactatgctatttttgactaaaccttaagtgtttacatactacgaggatcctaaccaaaaaggaattcataaagtgtgatctctgaataataaaaagaaaactataaatatatggggtaaatagcttacttggtgagatttcttgaaataaaattggaccaagatcatgaattcgtgtttcgacgggttatagaactttaaattattacataaccaaccaaaaactgaaaaaggttactttagttattacaacaaaacaatcgacgatcaagtaaccccaaacgtggtgtatatcattaaattcttgattaaccactagacaagaggttttcgattttgatttcagtataattgcatatattgaacccaaagaagcaaaccacaaacgaaacaaattgcatataagaaagttcaggaaaaaaaatagtgaagttttttcttccaaatatcacggcgcaagtaatgcaaagtattaacatcaccccaaatggattcaagtcaagttgcattttcttacatacaattggatttcatggttcaatcctaaatctataaatactattccttctattctcacttcatcaccacattacaagtcaacaccattaatcataagcccatattaaaaacataattatttcctctattttccaaaacctaaatg

SEQ ID NO: 11277 - DNA, 3000 bp, Unknown
  misc_feature (1)..( 3000): cDNA_ID_1711228_gDNA_ID_2214487_Annot_ID_183550 3000 nt of promoter + ATG
ccggaggaatgatcagatgggttttgaagataagaaacaaagattgagtttttgtgggttatgttgcttgaggtgggtgagagattatggcagcttaaccgccgaaacgagagagagagggaaaatttggagattacaaaaaggtttttcgttgtaaaaagagaaaagagagactcggagacattgctaacaccgcaagccattccctttttcaatgtcatcattttaactaaaagtgctaagagaaaattacgaaaaagggcttggagcaaaaagaaaggtacccataacctacccatatggagcgaatcatgatccaaattagtcatttgttacttacataatttcccgaaaataaactttagtttttataagaatttgttagtgctaaacataaattatttaaaaagaactataaacatttttagtcatgtgtataacccctacttgtaatactatatttgtatgcttaagtcatctaatgagaacttactctgcttaatcttctactactagctactaaaacaaaaaacttctactacttgtaatattatatcatatacattttgcacaaatatggagtataaaactagaagttaaagtttggatcattgaatgagcatttgaagacttctattataaaatagaaatgcgttacagtttagatagcgttaaagtttgaatcattgaatgagaatttggtcgtttgcgaggaaatagacttgttgagttggctacatatttattggagaacaaaactcccataaatgaggcatcaatacatacgtaacacttgtactcaaactctatagctgtgatttgtttttgtttttgacaccaactatatatgaatgatgatggtacaattcaaagattttcataatgaatctagtaaagcggaagtgtatgtattgccgtaatggtgtgcctctcgcatccttgatctatacaatcaagtttgatgttacaagagttgcataatatcttccatctacacacgctgcgtagtgtgtgcgcgtgtgggtgaatgtattcatacatctatatcttacactacttgaggacttgcacacatgcatgtggatgtgtgacttactccatcctcgtttaggcatatatacacaataataaatcatgcacaagcattttagatctgtgcttctagagttttggatctggctcccattaaccaaagcaatttatcaactcgaattcttttgtcgtttttcttgatactaacatataaatacattttatttataaactacagttcagacatatggatcgaagatccacagtactactccagtactccatacaagctaatacacagtattagaagtaatcaattcttatggtccttggtaggtatagtattattaaataagtgatgcgattagatcaatgcatgacttttagctggtcgtctatttatggatgctacctaaacataaatttaatcacatgtcatttattatttattattactcctaaattgttctgtccattaaatattttataagttgttacttgctactcctatcaaccattaatggtaatctttgacgcagattctatgagctatactattgcattgttttccatcatatattatcaatcacaagtaactcttcacaaaaaatggcggtcaataaagtgacacttacaaaactcaatggtttaaataaaaactacaacattgctgaaaaatatacataaattttaaacacgaaattggttaacaaaacaaaattggcggtcatctcatgtttttttttatatcatagtaaatctcgaaatgtgctttgattaaagatcagaccatcgaatggtgcactagcattctcatataatttgacatataaaatagtataagtaacaatatactaatatagtagtagtatattaatcatttgcataaatataaaacaagaattggtccaatgacccatcgatggcatcaatgccttgttcttggatgaaacgtggcatatacagtacggtgtcggattaagacatgataccataattagatatcgtatttttcgaaaacgtcaatatgttgttagttgattttatgagaggcaggtttttccaataagataatctttcttttatttaatcagaatccaactcattgactttgcaattgctgataatttattcacgatagaagagtattgatctgaagcaattacatagtgataaatctagtagtcattctaaattattaagatataaaatcaccaaactggaaattgcttcttctttttcttgttaacatcaaattggaaatagctataagagaagagtatagctaggaggacccatcacccatccatgatcaggctttaaatataatttcgatcccttcatgctgatggaccacactcttcccatggttttggataatattctagttatagtccatatcacattttacaccaaaaaacaattcttaagatttcaaaaaccattttacatttgagcccatgattattatatgtaaacaaaggttcagaatcatgcaagttaagatcaagtaatatcaccaagctctacgtttattcaacacaacattggaccttaagaaatctttatgatcttgtaaggtgaattatggattcatactaattaactaaaagagagtttgtatacgcgctaagttatcaaatttagagaacacaaacaacaaatgaacaaacacatttgtttggaaatctctaggcccaaaccaaacccattgaaagcccataagctcaacatcactgatctatttcttagtattgggctaatatagtcatatgtcaccaaagtccaaacaaagaaaaatcttcaagccgacaacccgatttccataaccggatagaccggattgtgggtaaggagtttatgcgggttgacccgatttcacaagcgtatctgtcttgtttaatttcgttactcgtcgtcgtcccttaactcgagaaaaattagggttacggattccgattagcaagc

SEQ ID NO: 11278 - DNA, 3000 bp, Unknown
  misc_feature (1)..( 3000): cDNA_ID_3039403_gDNA_ID_2214487_Annot_ID_183548 3000 nt of promoter + ATG
aatttttctcgagttaagggacgacgacgagtaacgaaattaaacaagacagatacgcttgtgaaatcgggtcaacccgcataaactccttacccacaatccggtctatccggttatggaaatcgggttgtcggcttgaagatttttctttgtttggactttggtgacatatgactatattagcccaatactaagaaatagatcagtgatgttgagcttatgggctttcaatgggtttggtttgggcctagagatttccaaacaaatgtgtttgttcatttgttgtttgtgttctctaaatttgataacttagcgcgtatacaaactctcttttagttaattagtatgaatccataattcaccttacaagatcataaagatttcttaaggtccaatgttgtgttgaataaacgtagagcttggtgatattacttgatcttaacttgcatgattctgaacctttgtttacatataataatcatgggctcaaatgtaaaatggtttttgaaatcttaagaattgttttttggtgtaaaatgtgatatggactataactagaatattatccaaaaccatgggaagagtgtggtccatcagcatgaagggatcgaaattatatttaaagcctgatcatggatgggtgatgggtcctcctagctatactcttctcttatagctatttccaatttgatgttaacaagaaaaagaagaagcaatttccagtttggtgattttatatcttaataatttagaatgactactagatttatcactatgtaattgcttcagatcaatactcttctatcgtgaataaattatcagcaattgcaaagtcaatgagttggattctgattaaataaaagaaagattatcttattggaaaaacctgcctctcataaaatcaactaacaacatattgacgttttcgaaaaatacgatatctaattatggtatcatgtcttaatccgacaccgtactgtatatgccacgtttcatccaagaacaaggcattgatgccatcgatgggtcattggaccaattcttgttttatatttatgcaaatgattaatatactactactatattagtatattgttacttatactattttatatgtcaaattatatgagaatgctagtgcaccattcgatggtctgatctttaatcaaagcacatttcgagatttactatgatataaaaaaaaacatgagatgaccgccaattttgttttgttaaccaatttcgtgtttaaaatttatgtatatttttcagcaatgttgtagtttttatttaaaccattgagttttgtaagtgtcactttattgaccgccattttttgtgaagagttacttgtgattgataatatatgatggaaaacaatgcaatagtatagctcatagaatctgcgtcaaagattaccattaatggttgataggagtagcaagtaacaacttataaaatatttaatggacagaacaatttaggagtaataataaataataaatgacatgtgattaaatttatgtttaggtagcatccataaatagacgaccagctaaaagtcatgcattgatctaatcgcatcacttatttaataatactatacctaccaaggaccataagaattgattacttctaatactgtgtattagcttgtatggagtactggagtagtactgtggatcttcgatccatatgtctgaactgtagtttataaataaaatgtatttatatgttagtatcaagaaaaacgacaaaagaattcgagttgataaattgctttggttaatgggagccagatccaaaactctagaagcacagatctaaaatgcttgtgcatgatttattattgtgtatatatgcctaaacgaggatggagtaagtcacacatccacatgcatgtgtgcaagtcctcaagtagtgtaagatatagatgtatgaatacattcacccacacgcgcacacactacgcagcgtgtgtagatggaagatattatgcaactcttgtaacatcaaacttgattgtatagatcaaggatgcgagaggcacaccattacggcaatacatacacttccgctttactagattcattatgaaaatctttgaattgtaccatcatcattcatatatagttggtgtcaaaaacaaaaacaaatcacagctatagagtttgagtacaagtgttacgtatgtattgatgcctcatttatgggagttttgttctccaataaatatgtagccaactcaacaagtctatttcctcgcaaacgaccaaattctcattcaatgattcaaactttaacgctatctaaactgtaacgcatttctattttataatagaagtcttcaaatgctcattcaatgatccaaactttaacttctagttttatactccatatttgtgcaaaatgtatatgatataatattacaagtagtagaagttttttgttttagtagctagtagtagaagattaagcagagtaagttctcattagatgacttaagcatacaaatatagtattacaagtaggggttatacacatgactaaaaatgtttatagttctttttaaataatttatgtttagcactaacaaattcttataaaaactaaagtttattttcgggaaattatgtaagtaacaaatgactaatttggatcatgattcgctccatatgggtaggttatgggtacctttctttttgctccaagccctttttcgtaattttctcttagcacttttagttaaaatgatgacattgaaaaagggaatggcttgcggtgttagcaatgtctccgagtctctcttttctctttttacaacgaaaaacctttttgtaatctccaaattttccctctctctctcgtttcggcggttaagctgccataatctctcacccacctcaagcaacataacccacaaaaactcaatctttgtttcttatcttcaaaacccatctgatcattcctccggaatctttctcaagaacagagcaaatg

SEQ ID NO: 11279 - DNA, 3000 bp, Unknown; identical to SEQ ID NO: 11276
  misc_feature (1)..( 3000): cDNA_ID_2702113_gDNA_ID_2214487_Annot_ID_183540 3000 nt of promoter + ATG

SEQ ID NO: 11280 - DNA, 3000 bp, Unknown
  misc_feature (1)..( 3000): cDNA_ID_3409184_gDNA_ID_2214487_Annot_ID_183539 3000 nt of promoter + ATG
ttttttttagaatcaattatgaaaatgccatttttttggatgacatttgtggatttttgcccttttttgaatagtttgtggattttgccatttttcaagttaccaaaataagatttaacatgcgttttattcattatgtttgggtttagttggttatggttgtttttagagtttagtattttgtgtaaactacgtatttttatcaaaaaaagtccgaaatccatatgtttttaaatcttagaaaatggcatatccgtaagattttagtaaaaatggcaatttcaaaagatctctataaaaaatggaaaaatcaataataatccttctttttgtcatgattggaccggaatgttaataatccaaaaagaaagaaagataggcttaatgagtatatgacaacaacaacaacggccattagttaccgtggtcggagttcaaaatttggtaagtagagttccgagttcgattcctctaacgactgcaccatagaggtgatagagtcatcactttcttctgatatagcttcgttctttttttcttttttgcctttttttttgtaatatatacttttcgagtattgaactgttgttgttttagaaatcggtgaaaagctcggtatgtgattttacaaggatttcatgaatagtttttagtctttttttttataaagctttatatagtttttgtctttacattttaatttcaattttctttttttttgcaaatgataattatatattaaactgtcatgtttttcacatgcagaaaagttactaaaaaaaatatatattattgtaaaatccgtcaaactatttagtttcgtatatatatataccatacgaccatcataatgttctttcgactaagtcaaaattcactatttaaatcaaaatttattacattttggtcatttgtgtttgattgctttaagtcgttaagttgcaggatctaatcttttttttttttttgtcaactttttggttccactgcaattgcaggatataatcattatatttattttcggtcagatcagaatcaaattatttataatgtaataaaaataaaaataattgtgaaataacatccttcttacatgtgaatactcctgtgaaaatattcctaaatatatccctcactattctaaaaacactaatcaacaaaacacaatcaattgatgactacaagtctaaaatagcatcaattacctgtcaatagtgctgtccatatgttataaaaatatttttgttcttcaaaattatatacacacttgatttgaaatatataatttaaatgaacaaatggcgtagaagcatgtgaaaattgattggaaatgatttaagatgtccctcgtgacaagtatagcaatagaatgtcccactaacaccattgattcatccacgggagccccacgaaaacacacctaaaatgataatgtggatgacttgagagatacttttttgcttgcaatagttattaccagaattaatatgacatcaaattgtggcaataatcagcactatataaagtatatatcaaaataagttcttattttccttcttatcatgatctctatcatttggtaggtggttaacagctcgattgtaaacgttacatgtcaaataagctgcatattcccaagaagggccatttttttttccagtcttttaaatatgagaaataatgcatttttgaatattttctctaaattgtttctagattactatttttgttatattatatgttgttttctgattggttacaacttataaatatttgccatttttcatttcacaaaaccatcacaaacagaagagacacaagtacacgtgctttgtgggaatttttttattccttactcttcaagcaaaatcacatttgactcttacatcttcttgagttttcgtacgttatacactcatttggttcatgatcaacaccagtcatgtcttagtcattctgttgaaaaatgtttcgaacacatacccgctcaaaaaaattctatacacagtatgtagaatatcagtcataaattcattacgaaacacttcaggaaaaaaaatgaatttgatcaaaaccaattaaaaagccaaaaaaaagaatactccaatttccaaatgttttaccaaatgaactacttcttgtagtactatgaactagtacaacgactgcttcaacagttttattttcattcttcgccttctaggaatatcgctttttgtttctcttcatctttttataaaatttattaagaatacatcaacaatttctttgtaatctttgccttagagactacaattaattgttactttgtcgttaatttatgattatttagcaacaattttgtcaaaaaataacaacgaagttaccaagggtgtgcaatatatcacaaattgttcggtttgttatagcaataaattttctgtcactaattccctcgttaccggatgcattttagtgatgcagttgtgaacttttgatccatttttagttaaaaaatctctgaaatttggtatgtttgagtgaaggaataaatcctttcattttggtcaaaaccattttgtggaaagtgaaaaggcacgattgcatcaaaaaatagaatttcaacttcggaaatgtattacgagaaccagaaatctaccaaaatagatggtcaagatgattgtccaaaagtatagaaatcatgcagatttagaagatcatcatacagtattttactttagaaatttttacattaaatttatctataaagattaatttattttttatttctatttaggacatttaatttacatgtcctaaacaattgttatttaggaaccgtaaatggacagcctaaatattcttggatttcctaatgaatgatatttttaacaaaaattgaacccatataaggccaagaagctcttcacactactttacctatgtatatataaactcgaatccatcacaaagcctattcaagttaagagaaaagaaaaaaaaaaccgttcttggaagatg

SEQ ID NO: 11281 - DNA, 3000 bp, Unknown; identical to SEQ ID NO: 11275
  misc_feature (1)..( 3000): cDNA_ID_1030987_gDNA_ID_2214487_Annot_ID_183536 3000 nt of promoter + ATG

SEQ ID NO: 11282 - DNA, 3000 bp, Unknown
  misc_feature (1)..( 3000): cDNA_ID_3039422_gDNA_ID_2214487_Annot_ID_183535 3000 nt of promoter + ATG
tgtttgacatgttctgtggcagcagtgtatgttcatccttgtacaaactccatcctgttgacaaaaagctttaatatatgtaccacagtctgcattgtttctcttgagtgatgttaatttcccttcaactccagtatattctgtggtccttggtttgaatgcaaggaaatgcataaaattgttaaaatgatagtattaccataatgagttatacaaacttgatagtgtctgctctgattaccatgtaaacactcaatcttagatttttctgtatcccatatggtgagtataatagtttgaagtatcaggttggacagccaaatttatatgagattatccatgtactgtgtggtattactcctgataataaatattgtttttcccagttttcagatacggaccatattgacaggttgatatcatgcctgcaactggctcttcccttttttgcggtatgaactcagaataagtgctgctagtagctggatagagtccattttataaacttgactggttgtcttactaactttccgttcctctgaacagagaggtgctccaagcagcaggtttcttatctatttgaacaaacatatcatacctgtttttgacaaggtatcgtgaatttcattgctttgttatttcacacttgtgtttcgtatcagcacatgatccctgattccttgtgtgctcttttaggcatctgttatctactctcttagacataattaagaatagcttatgtcactaatggtatgaagtaaaattctaatttattgcaacgtttatttaatccatatttgtaggtatatttgcttgtttctcttttgccttcttgcatgtaaatatccgtatctctacaaaaagggagctttcttggccaccatattaattccaattttttttcttaactagctcccagaagagaggaaacttgatttgctcaaagcacttgctgatatttctccatacacaactgctcaggaagcaaggcagctgcttccttcaatcgttgagcttttaaaggtacctcctttaagtgccagcatgtcatgagtcctttgagaaatagtttgtggacatccttgcttatattgtggatatcctactgcatccttacacttatgaatgcaaaagctttacatgtggtcttatgaagattgttacattctttgtttttagatatacatgcctgctagaaagactggagaggaaatgaacttcacatacgtcgagtgtttgttgtatgcgtttcatcaccttgcccacaaggttgccaacgacttcttattttgtgatttatcccgttctcttttttttcttccttgttttacttatctgattatgttatatatataggttccaaatgctacaaacagcttgtgtgggtacaagattgtgaccggccagccatcagacagattgggggaggacttctcagagttgaacaaagactttactgagaggtattattaattctttcacatgacatccgagtttttgcacgttgaaactttagtagaccgtcatttagagtagaaattttttggtaatgattaagtagaggtaggagggttctagttatgtgttttatgatatcttaaagtttttgttttgtgattcgccaaccattggtgcagattaaccattgttgaggatctaactaaggcaacgatgaagaaattaactcagggaatgactgagcacaacaaagccatgtcggctgctaagacagatgaagagaaagcgagtattgtaagtacattaacctgtgctattttctatttttcctagtgctatttgctttcagtactaatgctcctatgtgaattttttatttcagaaaacaaagaggcagaatactacaactggacttaggacctgtaataacatattggcgatgacaaaggtgaacattccaacatcttgtttttccccctttttgtcctttctttggtcgaagcatatagttatgatgatataaactaaacttggagttaattttgatatgaaacagccattgcatgcaaaagtgccaccttttatcggagacactaatctcaacctgtcttggaaagaagccacaaagccgttagcctcaacaacaacaacaattgggtttgtgcaaagtttactcaatccacaatctttctgttgtcttatatctatttgtaatttgttgtacctttgcaataatatacagaggaaagcggcctgctaatagcaacaatggaagtggtaacaatgttgcagcaaagaagggacgtgggtcgggtactatgcaaaaccagcttgtgaacaaggcctttgaggggatatcatcctatggagctggtagaggcggaaaccgaggttggggaagacgtggaggtggtcgaggaagaggacaaggaagaggtcactggtaataacaagtttccagtagaggattccatgactgtgtttctgtttctgtgtctgtctgtcagtacaagttttgattttggtacttagtagagtttggagacttctcttctcatatcagaatagatcatctgtgtttttctctgttcactaaagatatttcgagcattagaaaaaaagatatttcgagcatttatgaccttagttatacaatctttctagtctatagctacataacatgagaggtccattgcatgtctccttcatcccaagattacttccatggcacgctttagagttagcaatgactctccattagggtgtctcttaatcacaaacacactgtcttgtccaaatgaatggtcaaagctcttagttacgtataaagattacaaggggatatgtttttaaaaacgtaccattcatcatcttaataatttgttcatacgctttatcaaaacataatcctatcagtcttcatcgtactacaattaaccttaaagcctctatgtttactgtatatttaagatcttgtgcgattgtatacagaggaaaattatccgatcaaatccctattagatcttcgatcttacttccatg

SEQ ID NO: 11283 - DNA, 3000 bp, Unknown; identical to SEQ ID NO: 11274
  misc_feature (1)..( 3000): cDNA_ID_3039426_gDNA_ID_2214487_Annot_ID_183534 3000 nt of promoter + ATG

SEQ ID NO: 11284 - DNA, 3000 bp, Unknown
  misc_feature (1)..( 3000): cDNA_ID_3039430_gDNA_ID_2214487_Annot_ID_183533 3000 nt of promoter + ATG
gtttctagttcaactttcttagacggaagactagaacacactagttgtcttcgcaagtatatggtcatattgagttttgaatatcaatcaagtttgttattaaacaatgtttggcgttaattaataatgcattcttcatcatcatccatatactataatgtcgaaaagtgcaatgatggtcacctccttactttacatactacaagaaaagagactaattcttacggtacgtagaatactattatatacatatagtcaaatcttcaaaagtctatgcaaaagtaatattagttgttgatcctaggaggtggcttataagactactcttgcggggagttaatctctttaaagtcaagacaaaagcttacactccttttgaccaaaaaaaaaaaaaaagcttacactccttcgtgatttacggttgaagttcgagatccaaacttaaaggaccaataggaagcttatgtaccgggcggagtctccaaaacacgaagtagcaactcacacatgtgtcaggcgtgtaaacttgtcttgtagtttaggttcttgtttaaaagagatcgatggagggaagtgggaatacacttgtcatttggaaataagggaaaagagaaagtttgtattttgttagcgagaatgagctaaaactataatctttgagaagatttggtaaaacctctcaagagatgtggttttctctctaagtttaaaacttattaaatcgccttaacattcattctattttatgtttttcatatttactttcttctgttgcttgatatttctgttttgttcttgttcttgatatcaaaatctaaatgcatttttgattccgcttaaagttcgagtattttagagttcatcaatctgtacaattaaatttgtaaggcgtagctatcatgttctatacttctattactactaaagatttgagattaatttagatattttatgtaaaatttgacattaaaagatacacttaattattttatgaaacagaaaacaatcataaaatgacacttaattagttaatttgatttgagaggaagaataaactatacctacttataaatactttttttgcttacaaagtatacaatgttcattctctggatgatatctaattctcttgttttttcattttcatcacattaaattcagtcaggttttgatttcctagattagttaaatattgtagaattcaacctcatgactgttccttgttttctctttctcttgctagtctacaataactgtctctcttttattctttttcattttaagaatgaacagcttaatatcatatgttcagtattacctgattggttggccgattgttttatgacataacactatgtaatgagttatacacttatacttatatttaccatgcaatgggttactttactttgtacagttgacaacgtaacaaaagaatccattaacagttgaaaacatacatttcataaacccatttctcaacggatattgtcgaatcactattacagttgatcttataacgtgcgaaacaacacctagatttctgatgattcgttactcaatttaataatgctaaatttcgtaatatttaacctcaattaattttgtagcacagcgttcgaacgctgtctttgaaaacatagggagagcagtgtaatcagtaatgttctctataatcgaatcacaaaatcaatgtcaatagtatactatatgattatagatttctgaaaatattgggcacgtgatttgcgttggatcatcgtagggtatgggccatttacaagtaggaggtcaatttataaattatttgatacagatgacgcaaggatatacatgatgcatcatcattattgtattgtttacatattcaagaacaacaggaaaactaaaatttaacacacaaagataatttttattatgattctcgttttctttatataatagacgcagggattttgtatgggaactatgtgccaatataatgatataatctcatttctgaatagagaacacataacattaaacccaaaaatatctatatgagatgtgatgcatataggttgttttgaaaatttgtttccctagcccctagctagtaaggaaatacataatttagttaaaagttataaacattctaacagaaataaaagagtaaaagacaagaaacttattgactaatatttcacaagtgggttacatattttggctttggcccgcttttgttacgggaccatccatgatccatccatacaagtttcaatttctaaaataatgaatatcccccaaattttccgattaatcataacgttttctgattctcgccagcttcttgaaatagaaaattaaattttctacttataaaattttcataaaggcccctactcttaatataaattaacaaactaacaatttttctaagggtccctactttggctaaattgtagaaattgcattttatgtgtaacgtagatgattcagttttccttatttgtttggtcgatgatgaaatctctttaacattgatctcgaaaaaagaaagagaagacaactttcatttagtaaaattgttgaactgaaaaataaaagagataaatctacaaatatttaataactatggggttatgaaataattatggacttttcatgaaagcgaaacttattaaaaatgatctataaaaaaatattgttggtggaggagaatcacaatatttttccgagagaaaatcacggaaaccgatgtagattctctatctccaggttgttcactttctcattcatataaagaacaagaaagatagagatagagagatctaaagaaagctaaaaacatggagttttttttgaattttctttaaattcccacgacttttctcactacgcaagaagagcctatttcttctcagatcttacctttccttcaatctctcccatttgaatcatcattttgtttctcaaaaacaaaaaaacaaaaaaaatactttttctctgcacttgagaaca

SEQ ID NO: 11285 - DNA, 3000 bp, Unknown; identical to SEQ ID NO: 11273
  misc_feature (1)..( 3000): cDNA_ID_3039434_gDNA_ID_2214487_Annot_ID_183531 3000 nt of promoter + ATG

SEQ ID NO: 11286 - DNA, 3000 bp, Unknown
  misc_feature (1)..( 3000): cDNA_ID_2702109_gDNA_ID_2214487_Annot_ID_133386 3000 nt of promoter + ATG
gaaataaccaaaagtttactaatttcttttatacaatttacaaatctataaatttttcattgttatcacttaaaaattaaaatggataatatacaggcagttgtatgatatcaaaagtatatcggaagtcctagtcttatgtgttattttagaaattaggaaacgaaaaaaagttataaaacctcgttaaaacccaactcgttttttcctgcgctcattgttcctctatctctccaattcctccgaagcaaatcttcttaactaaaacttcctctcgcacgtggtttcgttttcattcgtaagttttcttttagcgattgtgcaattttcgagacattcaatcgtcgttctcgatcgttctaattagggtttccgcgactctttttaggccgcttaaacaatattaaggagattccttttattgactaaaattaagagttagataactgaattttggttttgaaacccttccctgttttcatacggtaccaggtcaggttaaattaaagattatgggaggcgtagaaggtaaccagtggtttgataagtttatggacgaagtcggattggtatttaccaaggttgacgaatcgatacagaaggtaagtactcttgttcttctggtttgatctttatttgatgtttatgccctaaaattcaagagtttatggttctgtctatgttgtgtggctaaaagactaaacctatgttcttttatcatcatcatcatcatcatcatcaacgcaaagtatatgctacgaattgatgtagataatgtattttagttattagtgtatttagtagttaaaacagaattaaggtttccaaggttcttttagatttttttttttcttaaacgatgaagagtataaaaaaaagttttgcataagatctgaaaatagaaagaccaagagatcatagaaagacagcttcagttccatcagatattttattagatttatggaaacctaattgatcacggtctaatccttttgaaaaccagaactattcatgatagttagatctttccataaaacaggcttcgattgtcaaaacttaccgtttacatgacaacttttctttgatttggtttttcttttctatattttcagagtattgaactctggacagagttaaccaaagacatatttgacgaccagcctaaccaagacttgaccggacagccagataatggtggatctggtgatgaacattcctctcaatatcctgtctctgaggtcaaagaaagaccgattcaacactggtatatgtgcctttctgacgtaaaagaaaaaccgcttcaacactggtctatgtgcattgctgaggtcaaagaaaaaccgagccaacactgggctatgcgtggtatgtgttttatatatagtatatattacattatagttattgtaaataccattaaattaaagtagctagaacatcagcacttttttggtttcttgactgacaagtatcatattgattttcttggcagcttcaaaattcccagagagtttcactcaagcacaaggtggtgatgattgttatgaaaattatggtgatggtgctgatggtattgatgatgatgattatgatgaagagaatagtgtaagtttgaagcacttttcccattttcatatcaaagctcattaactagaataagtaaatcaccatggattttgtataacggaattttggtaaatttaattagttgctactttgtttattgtctctgactgaatctttctgatataggaatcgagtttgaagtggaactgtgactatcagctgttaaagagtggctacttgtctttcgatgaagaagaagaagaggataatgacgatgaagaagatgttgacattttctccgaagatagtgatgattcatggaatgaggattttgatgatgaagatgaagaagcggatactacagtttttaaatattccgaaaacatgtcggagcttgatttgggatcagcgacgaattatacccctagttcctacgatcatcgtaatgaaaaagatagtgtaagtttttgtgtagcagtttttttcacatttttatacctatgctcatacaaaaactaggaaaatgatcatctatgaaatgttgttattttaatcagttgctgatttggttattgtatttgtgattagggttcaagtttgacgtggaaaggtggttatcagcagttatataatgttgacacgtcttccgacgaagaagatgaagaatcatgcgatgaggaggatgatgaagctggggaatatcactctgaagaagcgatggagatgtcgcgcgagcagagaatgagcgagctaaggaaagtgcttcatgacgatgaagatgacgtatcacaaggatttgtgaatgtgaggcgagagacaattgcgaagaatacggaatttggtgaggtcgagacccttttaccagatggtgattgggtttatgtgaagagtgcttagggctctgatcttttggcaaaaaatgtgtgtgatttgatcgagtttatactttacatcggctttaatgatatttatttgtgtagttttttgagtgtttcattcgtttttcacaaggcttatgtcactctattaacttggggtttaataccaaatagtgtactttttcttatcattattgtttgtcttctttgccattcgatcatgtgatcttttagattatcttaaggtacctttccagtggaatcatcgacatttggtctatacatgtattttgagctcaaacactaatgcaaaaccacaatcccaccaaaatcgatttaacactagttttggtttattggaccaaaccaagtagaaaaccaacaaaaccaccagtaccgtgattattttcttttctaacgcgtaataaatatcttttatggctttattatgcactctcattgcgaaaaaagaaaaatccaaaggcttggaaaatcgacaaaaacgaaaagggtagtggtgagatgtttcatcattctctgtttcagttcggtaatg

SEQ ID NO: 11287 - DNA, 3000 bp, Unknown; identical to SEQ ID NO: 11277
  misc_feature (1)..( 3000): cDNA_ID_1711228_gDNA_ID_2214487_Annot_ID_133393 3000 nt of promoter + ATG

SEQ ID NO: 11288 - DNA, 527 bp, Unknown
  misc_feature (1)..( 527): cDNA_ID_2717243_gDNA_ID_2214488_Annot_ID_133394 3000 nt of promoter + ATG
attaatttgtgctacttttctcttgaaatgttaatcgttattacagcctttttgaaaaaagttgagtaggtattgtaatagtatactttccacgtatgattgagaaaactcaaggtgaggcagagaggagccggtggggatctctcatactctctctttgtttacagagatccaattatcatatcgagccatgaactgattctgattcgatttggcaataattaacatttatcgtctttaaacgattaaataatataaattacattttaaatgaaaaggaccatgcatccaccaaggtgatactgactgcctaattataaatgtcatatcaaaatttattactatatggtttaacaaaaattcttatctgaattttttttctttttcttatctgaatgctttcattctaattaaagattttaatatatgaatattcgcacgtggatatttgtataagatatgcattaatctccgaggctatgtatagttcagaatttgaagtgaagtttaggagaggaagagagatg

SEQ ID NO: 11289 - DNA, 3000 bp, Unknown
  misc_feature (1)..( 3000): cDNA_ID_2702164_gDNA_ID_2214488_Annot_ID_133395 3000 nt of promoter + ATG
atctagagtaatataaaaaggatatgatcaatccactcttggcttgattttgaaattggaaatccaccaaacttaacaattaaattgtacggcttttaagatatgtattctgtcttgcctaacaattaacatattaaagaagaacaagattaactacttagattcactttttaaaatgtgccgaaaacaccttatatttaaacacgatatttatgcctttatttttgattaccatctcgttccaggggaaggtccaaggatgtatatccggggtaagggcttttgctcaagttgtggctccatttgtatatagtccattgacaggtaagtgaacacagtatcactaagtgaccaatgaacaccattcattaataactatcattaataaaacgttattcatcactaataagttttatagcgttcattggtcaatatcgagaaaataaagttttatttcctttaacaaatatttattttggtttgatatagctctatttctctccgaaaatgcaccattctatttccctggattcagcattctatgcatcgccatctctttggtattctttacatctacaaccatatcatcagttatcacaattatatgtttattattaataatgcatgacataatgacattgctttacatgcacagatgatcggattccttcagagtcttctgataaaagatcatccttctttgcccttagtgaacataacaatcaacaacccttcaaaagcggaagcttgacaagaaatatatcaagaagcaaatgtaactgtaatattgtacaaatttgcttcaaattaaaagttcatttaaaacgaatacatagctagaagctgtaaaaataacttagttttcttacaaagattgtcattgcaaatgaataaaatcacttgtatagtagttgttggcaactaagtacaaccggtcacatcaacatacatcaactaagtaaccaaacaaatataaccgtaaaaacaaacaaccgtaaatattttagagaagagatgcgataaaaagacaaccgtagaaaaataaacgaaaatatttcaacaaaagaattagatgaaaagacacaactgaaaaattaaccgtaaatattttaacaaaatgttgcattgacacaaccgttcataaatgcaaaaaggattgggataaaaagacaaagctttttatatttcaatgaaaagatgtaataaaaaagacaaaacaaaaaaaaacgtaaatattttagtaagaaattgcgataaaaagacacatccgttcgtaagtaaaaagacattacgataaaaagacacaaccgtaataaaaaaacaataaatatattaacaaaaaattgcaacaaaaaaacacaaccgtttagaaatgcaaatgacattacgataaaaagatgcaagtttcggggagaattcgcaaaacttcatgaaaatacgcgataaaaagatataacaaaaaagatcgtaaatatttcaacgaaaatttttcgttaaaaagatacaaccatttagaagtgcttacgaaagaaacgacacaaccgtaaatattgcaacaaaaagttgcgagattaaaagaaacaaccttataatctctttgatcatatgaatggaaaactaaatctttgcacacaaaaaaattcaggattttcatattattttcatgggatttttgtttaaatgggcacatttcagccaaaaaaataatgagagggtacattcttgtgggcttataagaatgagtacttatttggctaagaaaagacaatcttgtcaatactctttcttctttctttttttttttttttttttcttttttttccaaatgcttcatagatctttttctcccttattaattcaatagatccaattaaataggtttgtatataaataaatctatatcctaagggaataatgcttagggaacccaaagatttcaagacgcagattaaattaattttacatttgatcgataaatatattggtcggtggattttgattcggactgaaacttgtcaccagtttaggagtcgaggaaagagatgaaggcagtgtcactggtttttgattagcaaagactgaagatggaaggcgttaacggcggaaatgaggatcgacggtaggatatgttttcgatttgatagaacgatgtctaataatcgctaagtaattcaaaaacagatgttcgatggtgtatgtgtcatgttgtgatcagtttacgaattacgattagggtgaattgagagacaaatcggaactggagattgagggtgaattgtagagacaaattagacggttaaatgcgaataataaaaaagataaaaacgtcaatactgtgagaaaaatacctaattgcagtagcacatgattttgtgcctatttctacaacggcatacacttttgaagtgctttatttgtaactgatccttattttcatgcatgtgagtgatatcaagttgtactttgttgttttgaaatgcctagaaatgacaaaagcgtgtgggaatggacataatcgtttttacaaaattgtgggaatggacatgatccttatttatggtttgtacgcgacggataaatttttatttaattacgtaatcgtctggatttatatatctttaatgcagattgaaatatggcagtaccaaattttttgcatagtcttaacttcaaatcgatcgtagttattacaaaatgtcacataattcgtaatgtgtaattaaaaggtactccctacacaagagatggtgactaatgatcgagtcggccagaaaataccaaaaaagtcctcaaaagtctgatgtgatctcccatgcttcaaccgaatttttggaataaagaatagattggaaaaatatctgccacattgtagtattttcaagtaagctttctttgtttgttcaataatcaaaagcaaaaacaaaaacaaaactctcaacactttttgtgtttattttctgttattttgaatcgaagtcggcaagcataggctaaaaggtg

SEQ ID NO: 11290 - DNA, 3000 bp, Unknown
  misc_feature (1)..( 3000): cDNA_ID_2717235_gDNA_ID_2214488_Annot_ID_133397 3000 nt of promoter + ATG
cgaaccaaatctaactgaacaaaccgaaataaaccgttaccgttttgtctgatatcaatattttaatgtccatgaaaaatggatctaaaaattcggactttttaaagatgagattcggacacaacccgagatcgccacaatttccgcaatttacttgatcaggaaagagagactccgttgatggctaccaccaccgtcgtatgcggcggaggaggagatgttgagggttgcgatggcgagagaagcctggatctgttaccggcggctctcttggagactattatgacgaaactcgatgttgcgtctctctgctcgttggcttctacttgcaaaacacttaagagctgtgtcactcgtgttctcaccttcactcccaacttccacatcttcgtaagtctccacatttctttaagggtttgatttggatttcgatttcaaactgaaactgtataaaaagttttagtctttttggatttcagaatgtttcattgtcaatggaaactgttagaccattgttgtttccgaatcaacaactttctagtctcaagcttgattgtggaaggcttggtaattcagctattgatatattggtacgtccttctttgagggagatttctcttcacaattgtcgggatttcagcggagatctcatctccgaaattggtaggaaatgcaaggatttgaggtatgtgtgtgatgatgcatctgctataatatgaggaatctttctgttgctgtgtctgacggattggtaaacttcaggctcctatgtttgggttcagtagcagagaaagttggtcgaagtattagccgttgtgctttggaggatttacttaatggttgctcccatttagaggtttgaatccttaatagattctcttttgatcttattatctagtgttgattgtctgtgtaatggaatcatgccatatgtgttgtatttggcaggtcttagcactcatgtttgacctctcattgtatctgcgtcctggtgatggtcgcatttttggattggtatctgatagattgactcatctggagctaggacacatcacgtcaaggatgatgactcagctactcacatcaactgaaatctcggggcaagacagcaaccgagttactacatctactgtgctacaaaatgtccagcggttgcgcctctcagtggattgtattactgatgctgtggttaaggcgatatcgaaatctcttccatctttgatagatttggacataagagacgcgcctcttgaggatccaagacaagtatcagacctcacggattttgggcttcatgagatcaatcagaatggtaagctgaagcacctgtctctaatccgtagccaggagtttcaccctacttacttccggcgagttagtgatcaaggaatgctttttcttgctgacaaatgcttgggaatggaaaccatttgtcttggtggcttttgtcgggtaacagatgctggtttcaagactattcttcactcttgcgctagcctctccaagtttagtatatatcatggacctaaattgacggatcttgtcttccatgacatcttagcaactactctttcgcttagtcatgttagcttaagaaggtgccatcttcttactgaccacgcaattcaaaagctggcatcaagtctcaagctggagaatcttgacctcagagggtgcagaaacctgagggatgaaaccttgacagctgtatctcatctgccaaaactgaaggttttacttcttgatggcgctgatattagcgacacagggctttcgtacctaaaagagggagttttggactccctagtttctttatctgtcagagggtgcagaaatttaaccgataagttcatgtctaccttatttgacggatcctcaaaactggcgttgcgggaactcgacttgtctaatcttcctaatctaacggatgctgccatttttgctctagcaaaatctggagccccaatcacaaaactgcaactaagagaatgtagactcataggtgatgcctcagtcatggctcttgcatccacccgggtttacgaagacgaatgtcctggaagtagcctgtgcttgttggatctttacgactgtggtggcatcacgcaactctcattcaaatggctaaagaaaccgtttttcccgaggcttaaatggttagggatcacaggaagtgtaaacagagatatcgtagatgctttggcaaggagacgaccacatttgcaggtctcttgccgtggagaagagcttggaaatgatggggaagacgactgggactctgcagacatacaccaacacatagaagcacaagaagatgagcttgaacagtggattcttggagacgaaggtgatgttgaaatggaggatgcagaagacgagagtgaagaagacgcaagtgaagaagactgataattctgaagctatttgggtaaataccaattctcgtcatctttacttgaggttttaattcttttgatgttctttttttctttcttagttcttatggttattgttgttattagtgttgtgttgttgttgttggtgatgttgttgttctaatcatctcttgtttctttaactctggtcttgattatttgaataaaggatatctagagattgtgttgtgtgtgtttttgtaataattagagtttgataaaagaaaataaaatatttaaggtgaaatagttttggattttaattatcatttttggttcaatttaatatgaattttatttgctatactataaagatttgaatctcttataccagtattgatcatagtaagttaaaaaaacattatcgtaaataatataatagttgtaatttgtttataatctcatgccattatgtacacgtaacgtttattcctaattaacgtaagcttttgtaccatgcatcacaacaatcggcgaagtttttgtttcttttttctaaaaaatcgtaattttgttaagcaaatttttcttcttagatttaataataacaattaattttcaaatg

SEQ ID NO: 11291 - DNA, 3000 bp, Unknown
  misc_feature (1)..( 3000): cDNA_ID_2717227_gDNA_ID_2214488_Annot_ID_133399 3000 nt of promoter + ATG
cgttacgtgtacataatggcatgagattataaacaaattacaactattatattatttacgataatgtttttttaacttactatgatcaatactggtataagagattcaaatctttatagtatagcaaataaaattcatattaaattgaaccaaaaatgataattaaaatccaaaactatttcaccttaaatattttattttcttttatcaaactctaattattacaaaaacacacacaacacaatctctagatatcctttattcaaataatcaagaccagagttaaagaaacaagagatgattagaacaacaacatcaccaacaacaacaacacaacactaataacaacaataaccataagaactaagaaagaaaaaaagaacatcaaaagaattaaaacctcaagtaaagatgacgagaattggtatttacccaaatagcttcagaattatcagtcttcttcacttgcgtcttcttcactctcgtcttctgcatcctccatttcaacatcaccttcgtctccaagaatccactgttcaagctcatcttcttgtgcttctatgtgttggtgtatgtctgcagagtcccagtcgtcttccccatcatttccaagctcttctccacggcaagagacctgcaaatgtggtcgtctccttgccaaagcatctacgatatctctgtttacacttcctgtgatccctaaccatttaagcctcgggaaaaacggtttctttagccatttgaatgagagttgcgtgatgccaccacagtcgtaaagatccaacaagcacaggctacttccaggacattcgtcttcgtaaacccgggtggatgcaagagccatgactgaggcatcacctatgagtctacattctcttagttgcagttttgtgattggggctccagattttgctagagcaaaaatggcagcatccgttagattaggaagattagacaagtcgagttcccgcaacgccagttttgaggatccgtcaaataaggtagacatgaacttatcggttaaatttctgcaccctctgacagataaagaaactagggagtccaaaactccctcttttaggtacgaaagccctgtgtcgctaatatcagcgccatcaagaagtaaaaccttcagttttggcagatgagatacagctgtcaaggtttcatccctcaggtttctgcaccctctgaggtcaagattctccagcttgagacttgatgccagcttttgaattgcgtggtcagtaagaagatggcaccttcttaagctaacatgactaagcgaaagagtagttgctaagatgtcatggaagacaagatccgtcaatttaggtccatgatatatactaaacttggagaggctagcgcaagagtgaagaatagtcttgaaaccagcatctgttacccgacaaaagccaccaagacaaatggtttccattcccaagcatttgtcagcaagaaaaagcattccttgatcactaactcgccggaagtaagtagggtgaaactcctggctacggattagagacaggtgcttcagcttaccattctgattgatctcatgaagcccaaaatccgtgaggtctgatacttgtcttggatcctcaagaggcgcgtctcttatgtccaaatctatcaaagatggaagagatttcgatatcgccttaaccacagcatcagtaatacaatccactgagaggcgcaaccgctggacattttgtagcacagtagatgtagtaactcggttgctgtcttgccccgagatttcagttgatgtgagtagctgagtcatcatccttgacgtgatgtgtcctagctccagatgagtcaatctatcagataccaatccaaaaatgcgaccatcaccaggacgcagatacaatgagaggtcaaacatgagtgctaagacctgccaaatacaacacatatggcatgattccattacacagacaatcaacactagataataagatcaaaagagaatctattaaggattcaaacctctaaatgggagcaaccattaagtaaatcctccaaagcacaacggctaatacttcgaccaactttctctgctactgaacccaaacataggagcctgaagtttaccaatccgtcagacacagcaacagaaagattcctcatattatagcagatgcatcatcacacacatacctcaaatccttgcatttcctaccaatttcggagatgagatctccgctgaaatcccgacaattgtgaagagaaatctccctcaaagaaggacgtaccaatatatcaatagctgaattaccaagccttccacaatcaagcttgagactagaaagttgttgattcggaaacaacaatggtctaacagtttccattgacaatgaaacattctgaaatccaaaaagactaaaactttttatacagtttcagtttgaaatcgaaatccaaatcaaacccttaaagaaatgtggagacttacgaagatgtggaagttgggagtgaaggtgagaacacgagtgacacagctcttaagtgttttgcaagtagaagccaacgagcagagagacgcaacatcgagtttcgtcataatagtctccaagagagccgccggtaacagatccaggcttctctcgccatcgcaaccctcaacatctcctcctccgccgcatacgacggtggtggtagccatcaacggagtctctctttcctgatcaagtaaattgcggaaattgtggcgatctcgggttgtgtccgaatctcatctttaaaaagtccgaatttttagatccatttttcatggacattaaaatattgatatcagacaaaacggtaacggtttatttcggtttgttcagttagatttggttcggttatagttaaatttgattcggtttgataaaattatggctcggctcggtattagattcgggtcgggtcgggtcaaatctcaccgtcgataactgttatcgagttttcatttctgaagttcaaagctattcaatttcatca

SEQ ID NO: 11292 - DNA, 3000 bp, Unknown
  misc_feature (1)..( 3000): cDNA_ID_2702160_gDNA_ID_2214488_Annot_ID_133400 3000 nt of promoter + ATG
attgtcaaggtttgggataacatatatgtatctcgtaagatgacccttctcaaaccgttgagttcttcaagaaactactttcctcagcatttacctcgtattttcgatatgtctaagtttacggttcgtgaattgtgtcgggaagtcaagctctatcatcctgattactactgtgtccctggacacacagctttagagttggagttggggaaaactgttgtcaagtacctaaatgatgacaaattcgtgttgcttacaattcttgaatatggaaagttagctgtgtttaggtcttgggatcgagaatggactgtgatcaatgattacataccttctcgttgtcaagatttgattatgttcgatggacgtttctttgctatcgactacaatgggaggactgtagttgttgactactcttctttcaaattgacattggccgctaatcctttgattggcggcggtgacaagaagtttctgattgaatcttgtggtgaaatgtttctggtggatatagagttttgcctgaatgaaaaaccggaattcacagggggtttctattcgtattttaatgagaccacggtcagttacaaatttaaattctttaaattagtggaaagagagaagagatgggttgaggttgaggatcttggggataagatgtttttccttggtgatgactccaccttttccgcttcaactgctgatattatacctcgctgcgtgggaactggaagcttcgtgttcttctacacgcatgaggaatccttggtggtgatggatgatcgaaacttgggagtgtttgatttcaggagtgggaaaacagagctggtaaacaaactccctgaatatgccaagttgttttggcctccacctccatggattactacttctcatgaggtcagtggtttccaatctctcaaccacccgaatagagtgtatttacatttgcatcttactacttcttttttaccgcttgtctcactaacttatgctcaaatatcttttgtctcagagtgttgaaaattatactggagaaacatcatcacaatcccaatcttgagtttaagaccttggagatgacacttcaacttgaatgacaatgtttatatgtatttttccaactcttgttttttcctaaacaatttgtatattcatctttcaaaagttttcttatgtctaaaccgaagtccgctatacaaagattttgaggaaaactggaaaagtgattttgtgttaaaatcgaattagttacgagaaataagtcccaactaaaacaagaactttatttcgatgaagcctgctttactttaagatggtgttgattggtgaaaaactgtaaagattggctatgcaaatgaagttgtaactgtgaatttaatcacttgaattcacaagttctcagtgaaacagagaagagtgcattaaaattttgtatgatatgacacaaccagtgaaatacagtcaccttgcagtaaaaaaaagctttatcatgtatgtggtgattttttttttaataaccaatcactttaatggttaaaaagttcattttacaatttacaagtttggttataaagtgtatattagatgcttcttattttgggaagtttcgttaatattgctgtgttctgtttactgaataatgttcggcatttgaagacaaaaaaactaaaagaaagtagctttttctgaagtttccgagaaattttcatatgtttgtcatatatattcttcctagccccactagtcgaactcacttgtttttattggtgaattgtttggtcttttggtaacaaagaaaacgatttaaaatctataaattttatatctacatatatctactttacatttattgaaaatacaagaaatattagagtttttttttcttagttgtaccatgaaattgaggtttgagtcgtgttgagttctttaaatggaggtgctccaaattaagaaaatatatattgggagtctctcacttagaaagtagtatgggaaaacatatctattattgaactgcagaatgttgattcaatgattaaagattccaacattaaaaccaccttaaagaaaaataagaagccggtgagataacaacacaaactattggtactacaagatttggctaaaataaaaaacacgttagtacataaccttataaaactaatgtaagaggctaagagttcatgcttttcttttagattacacataatatttaaaagctaaaatgaaatcattttaaagcctgaataattgtttttgtccattcatattattgataaaaaatgatgttacattttatttaattatatatatccacatcagtttttttcttagttttgactacaacaaaaaaaatagttaattttatagaaattttttaaaatatttgttttatgttttaggttgtgtccaacaaagacaaataacttcaagtctttggaggagacttcccaagtcaatctgagattaaacaaaatggtggaagtcccacaatcaaaaaagttatattcatttttcacactaaaatatgatcaaactaattaattacaaaaaaaaaagaagaagaaaaaaagtggagtaaacagaagaaccaagctctggtccaatcctcatatgaccatttctaattctcttaagataaaaccgtgtgggttccatccactttgatcaagacctttcttcttctttcaagtaaacatcacaaacctttaagaaatatgaaagaaaataaaacacattataaaaaatctcacaagacttcaaatttcaatatgttaaatcattcatgcctccacatacagtatttttatttttctctcttgacttagtcttctccatcaaagtattgccccacaaagaaaatctttcacaacatattcggtcctagttgtatataaatgtgtattgattcacctaagtgataaccaccaacaactttttcacttacacagctttaaaaagaaccaaacctttataagtgttttttagacattgggagag

SEQ ID NO: 11293 - DNA, 3000 bp, Unknown
  misc_feature (1)..( 3000): cDNA_ID_2717212_gDNA_ID_2214488_Annot_ID_183573 3000 nt of promoter + ATG
tatttgacaaaacgatgttaaggttgtatcacaagattaacatctcaaaataacaaaaagtggtaaaccaaatagtggtttgaaatcacaaaaagggataggcaaaaagttgtgtgaaataacaatgacactataatggatgaagatgaagtcaccttttaagtgtttgatgtgtaagtgttttgaaaaacaaacaactatcatagtttcatataaaattttaagtgcatttaaagattaaattatgcaatttaacccaaaaataaacaaattctcaaacaatatcaaatctacatttttcaaatgagattcaacatagatatggtcaaactttcaaaacttagaataatcttcaactattatgattataaaagtttaacctctataagaacataatataataataaattcatgcaacgcgtgagtattttttagttcatttaatcacactaataacatgtacaacatactaccatcaacaaaagattgtgtcgtactaaaaaataaaaattataacaccaaggaaagtaaaaaaaaaaaaaaaactaattgacttatattaatggatgaaaacccctaaaccattcacctacttatctcattcgttgttcgcctagttaacaaatttgatattgttcaatcaattacatctgagatatcttaaagagaaaatggtttattagcttgtttagtccattacatgcaaaagtatctaaaactcctgaaagtgaagacgacatcaacaacaactatgtcaaacccatataaagaagaattgtaacctcctagtgtttctcctgatcgataataccaacaacatataatgtcttacaaacaaccttactattagagttcgtacttctacgtacaaccatataatcatcaattttatgctcataaaagcattggttgtggcttttgggactttgaaaccttggacatgccacaacattttgatctcgcaagtctatttaacacagtaaatggagcagtaaagaagctgaaccactcttattcgattagaaaatttcatgctattaggatgccacaaagcattttgaaagcaaatatttgccaaatataactatatttttcaaataagctagatttctagtctttgaacaaaggatgcacaaaacgacatttgttgtgaaatagagggagtaataatttttttttttagctcctttagattcaatgaatcatatggttcgtagagaaattaaagttgaggttttgaagtgaaaatgataaaactttaaatagttaggtgatataaacaaaaaaactaaagcatggttcaactatagtttgatttttcaacctcaaagcttagacagtggtaggagaaaagtgtatcatttcacgaactctcacaaatatatctcctaaccgaatatttaaactgatttcagaattacatacatataaagtaaaagtagcaaatagataaaagagttttaaatagagatattcttttccgtacaacatgattccaaccttaaaataattatgtattctagaatctactagccacataatggacattcatataaaaataagattattaatattaataatttttatattttttttgctgcaacttttttggagggtggataaagtccattcaagtacaaatggtacccgtccattaaagcaaatttgttcattaaaaatcttttggattgggttacgtaaaatgcgactatattgccctagttcttttcatatttggttaagatttaaaactgtaaatctccattcatctttgtttgattttttcaactgttttaaatcatcctataatatataaagttatgaaaaactcaatctttttctccctatattgtgattcaaaattaaaaaaacggacatatattacccaattaatggaaatgatgtgtgttcaatgtcccacatcgactaaaatattcagataatgatttagaataatattatatatatgattaaaataaattcaaattcgaatgtataggaaagcttaccttaacaagcatccaaatttaaaattttgtatatgatttaattcagtctttagttttattgtttagttttaccgagaatattaaaattttctaatatcaataaaaggttttataacattataaacatttgaacaaataaaaataaaataaataacatgggacaaattgtattgtggtatacagttatatggtgagatgaatttttgaatcaacattaataaaatttagaatatcatcaatctgccgctttattatttttaatactaccaatattagaaatatctaaacaacctaattaagataagattgtatataccaaaaatttctctgtgatatacagttacttaataacaatcgtatattataaaatataaatttcttagaaaattttacaatttgcaaacttatgtatataataaatagtcatcaatttttaaactactatttttagaaaacaaatcatgagatgtgttatattacagaacaaagttatatgatggacgggtttgaatcaatatttataaattttttgaaatcattaatatgttgtttcaatacgggttaaattctcagtttattaacaattgttatgtggacttgtgatatatttttacttaataacgattataaactaaaatagaaatattttataactaaatataatttataaaattttatatatacaaattttaaaatataaattgtcttgcagtttacagctaattaaaatttagttgtgatattatatccaattatccatataactacacttttttctccacaattagggcgtgacaaatggcaacacttcaatcaaggaacagaacacaatgtgaaaccagactgttctcatttattttccagcaagtcaaaaagtcaaactcaaaaagtcctctctcggtcaactttcttcttggtccccatcttcacaaatcacaactctttttatttccaaagaccaaaaacctgagaacacaccggcgacctgaaa

SEQ ID NO: 11294 - DNA, 3000 bp, Unknown
  misc_feature (1)..( 3000): cDNA_ID_3039466_gDNA_ID_2214488_Annot_ID_183566 3000 nt of promoter + ATG
gtcttcaccttcacgtttacaattgcatataattttatttaaataatatgttatatcggggacaagttcatatcgaatgagtgatcgaattagatagggaacaaatttagatcgaatggtagacaagataatatgttataactggatttttttattattttacaatataagaaaaaatgaataattcaaatcggtgaagacaataatgctcaactaatctgtagaccaaaatagatggtgaaaagtctaaataaaatttgaaatccttaaatgataacaattttgtggataagatgtgggattcatgataattttgaaagatgatgaaatcggagacaatatatagatacaacaaagaatttatgagaatttatgatgaataaattgggagacaaatttaattgaaagttacatgtagataatttgtgcaggttgtcaggggaagtgggtgagagaccaaaacgtttcgttttgtcttcggaaatataatgatgtatggttaaaacatacggatttcgaagaaatagagattaaatagagaaaaaatggtgaggacagtactgacatttcagatcgaaatgtggtatgatgtgtaagagaggaatgattgtgataaattgcataaagaattgagaataaatagtaaagtttataattttccctatattttctccgtttcaaaaaaagtatcattttaatttttttatcatcaaaataacttaattaaaatctaagttcaattatataaaccatacgtgcgttaacttgtttacatcggctgactcattcatccacaaacatggaaaagtcttgctctttcctaaatttgttaatgactatcataaacggtatcctaaaaactggggcggatcaaaaatatttattagctggggtatatatatattgttgggtttgggtcatattctgcatctttttggacagttgaatttcgtttcttataaaacttcgtttaattggaataaccgtgcgaaaagtaaaagtaaggatgaaagactcgtcgctagagattaaacatattgtaaaaaaaaaaaaaagacacatacatattgtccatttgaagcagcgagatattttgcaaatatgtacaatcgttatcttttattaattaattattattattttagaatattttaagttgtaagaatttaagtttttattataaataaccgttttaggctcttattgtattggattgtttttattaataaattaaagaacttttgataagctttgaaaaaaatattctcaaacgaagtttttaaagtctctgttcattggaatctattgatctccgataacactaaaattccgagttacgattatcctgcttgaaatccattgatactcaaatttactttcatattctatccttaaaagcttccgctaaatcaattggtatcagagcaaaaactacgtcagtgataggatacaaaagtaatattgacgtagcggaagtctaacagatatgttttattacaaacagatttgcatgtctaaatgtttgtcttttataaatatattttctactactaaaagttttttatatgcatcattattagtttgatttgtcttttaaaaaatattatataaacaaatttaaaatattttctttgagtcttagtttatttttagaaaattatgaaattatatattcataattatatttttttaaaatttatatttaaatatatattctctagtatcttgactaaataaaaaaatgaaaatttagttttcgttatatatttaaaatttggaattaatataaaatcaatcattatacattatatcgattaaatctgaaaaatttaattgtaattgttgtttcatatttgttaaattaaataatcaaattattattagtattaatattaattgataaaataataaatatttttattttaatttccttaatttgctaaagtttatgcaattactagctactttattaatggtttctcgattttttgtcttagataatgcctatatatatgaggtctctgtattatttttagagtatttataataaatgattatagatttgaaaagaatgtacaaactaaccttgagtcacagtatcttgtcggaaacatgttggagaacacgtgtaattacgtaaatgtcctttgtaacatgttatttttccgaaatacatgcgataacataatatcctctttttatcttgttattttctcttattacatagtatttgtaaaaaccacatagtattttttgtaaaaaacattctattcagtttaatatctcattttatcatgatattttgtagtaatacaagttttttattaagatcacacgtgatttctttaaaaatatattcttattttttagtaatacatggtttttattaaaatcacatataatttttgttttttaagattctgttcatgtaaaagaatttcataataatgttttttcttaaaaattcataacgttttttgaaatagcatatttttaaactaaatattacatgtgaaattttaatgttacatgctattttgaaaaattacacggatgtgtttcgtttactgttcatcttacaacaaatgaagggtagctttgttatttcctttcttccgacaacgtgggtccatggttattttgtaacaaaaaactttctctctactagtttcttaatttgtatgttttatttggttatctactaatattacccttatttttatatgcaagtatatattaatttatacataaaaaaaatagtatatgtcaatgtatacatgtttactaagtccaatcaaccattatttactttgcttcttcgtcttttccgatttttgtcaaaggtgctttcgttctcctttgatgtcaacttctaatatctagagaaaattcaatttaccaattgagattcaacttcctcttctctgcaggaaaaaaaaaaaaaaacttcctcttctttacctaaaggccaaaatcattatcggtggcacaaaggcgatg

SEQ ID NO: 11295 - DNA, 3000 bp, Unknown; identical to SEQ ID NO: 11292
  misc_feature (1)..( 3000): cDNA_ID_2702160_gDNA_ID_2214488_Annot_ID_183564 3000 nt of promoter + ATG

SEQ ID NO: 11296 - DNA, 3000 bp, Unknown
  misc_feature (1)..( 3000): cDNA_ID_3039473_gDNA_ID_2214488_Annot_ID_183563 3000 nt of promoter + ATG
gaatgatgttcgtcggagattccaactcatgttatctccaaaacaatttgcgacacttacggtaagaacaaatttactttgtaaattcatctttggttatcacagtaaatcaatcttttgaaattctagaatttctgaacttgaatttgacgatgacagagctgtaccattaattagtcgtcacactaatccaaattgcttaaccggtaccaaattatttaaccgaagtccggtattcggcgatgcggtctagtgtgttcggatgagtcataacgaatggataatgagtgatggtggataaggatttacggcaaagaaaaacagaggcaaattcgttaccagtttaaaaatggcggctttgatccagaccatccatggtggtaaacccaacttgtaaactctcttgtgttcttattgattctttcgatttcgctatctagtggtttaaaagttttccccttttttctgattactgttgtatagacaagaaactagaattgttgaaaacgaattccggtttaggttcttattgggtaaggtagaatccctaattgcacagtttctctcttaagttcacatctcgtgttaaagtacaattttttattcagtttctcagtgtagcattagtttctctaattgattggaattgaattgggcattttggcattaaacgtatgtaatttagcaattggttctcagtttctgattcaattcatcgatatgggttgatttcttggtctgtacttggttattcatattgagcactatacaatgcaggtgtggttgttaccagaaccttgactcttgtttatccttctacctttacgtccagacacaaagctctgaaccagatgacaagtagcagtaacagcggcttgcgacggttcctgttcactccgcctcagcggctaagccaaggtatctgttactggggagcagagctaagcaacaatgtgtcatggacttacaaaacgaaaatggttgttcgatccaaggccggagcagtgcctctgatgaagcatggcgaccggtttctctcctctctctcgtctccagccttagctggtgatccgtcagcgataaaccgacacattaagaagtttgtggctgcttcacccaaatcagttgctctcaatgtcctctctcatctcctctctgatcaaacttcccatcctcatctctccttctttgctctgtctgtgagtctttgcttttttttcctgtttctctcaataaaatattgatgaaggtaaatgactttatattggttgttgttttcttctccagttgtattcggaaattactgaagcgtcgtggtttgattggaatcctaaactcattgctgaacttattgctttgctcaataaacaagaaagatttgatgaatcagaaacgctactttctactgcggtttcgagactgaagtcaaatgaaagagactttactctcttcctctgcaatttggttgaatcaaattctaaacaagggtctatacaaggtttcagtgaagcatcttttcgtttgagagagataatccaaagatcatcatcagtttatgtcaaaactcaagcttacaagtctatggtttctggattatgtaacatggaccagcctcatgatgcggaaagagttatcgaggagatgagaatggaaaaaataaagccgggattgtttgaatataagtctgttctatacggctatggaagattaggattgtttgacgatatgaacagagtagtacacagaatgggaacagaaggtcacaaaatcgacacagtttgttcaaatatggttctctcttcctatggagctcatgatgcattgccccaaatgggttcttggttacagaagttgaagggttttaatgttcctttctccataaggacgtataactcggtcttgaattcttgtcctaccatcatatcaatgttgaaagacttggatagctgtccggtttctctttctgaactgcgtacttttctgaatgaggacgaagcacttctggtccatgaattgactcagtcatcagttttagatgaagcaattgagtggaacgcggtagagggtaagttggatttacatggtatgcacttgagctcatcgtatttgatattgctgcaatggatggatgagaccagacttagatttagcgaagaaaagtgtgtaattcctgcagagattgtagttgtttctggatctggaaagcatagcaatgtaagaggagagtcaccggtgaaagcgctggttaaaaagataatggtgcgtactggaagcccgatgagaattgaccggaagaatgttggtagttttattgccaagggaaaaactgttaaagaatggctctgcaaatgaagatttataactgtatattttgatcacaatttgcttaagattgatcaggaataagttttgcttggaatccaaatcaactcttggtgtcaaattttccaccagaactaatcaggtgagtcgaaattttctctttacactcttaaaattacctgcgtggtagtaaaattctgaatagctggttttagaataagagaaatctgaacaaaaatcatttcagttttcaagtatgtatgttaaaccctagagctctgtgaaattttaacaatagtttgtttgtttctgtttctggtgtatctttagctatattccatgaagtttctagtcttgaataatgtgtatagtttatttcaagcaatggctctggagctttagtttgtttaaaagtgcatctgctctagtcctttgatttggatagcaaataagtgaaagttcttgtccctataaggtttcttcagattaatggtattgatttctcttttgtcttcttaagatttttattcaagagagaatcttggatgtctgcttttctcattcaaaaatttgtcttcaaaaagtgatttttcatgcttgaccttgtccacctttgaactctattaaagtcaaccgatcaaatttgaagaaaaaaaaaagcttttcgtttcacccatg

SEQ ID NO: 11297 - DNA, 3000 bp, Unknown; identical to SEQ ID NO: 11291
  misc_feature (1)..( 3000): cDNA_ID_3039477_gDNA_ID_2214488_Annot_ID_183562 3000 nt of promoter + ATG

SEQ ID NO: 11298 - DNA, 3000 bp, Unknown; identical to SEQ ID NO: 11290
  misc_feature (1)..( 3000): cDNA_ID_3039481_gDNA_ID_2214488_Annot_ID_183560 3000 nt of promoter + ATG

SEQ ID NO: 11299 - DNA, 3000 bp, Unknown; identical to SEQ ID NO: 11289
  misc_feature (1)..( 3000): cDNA_ID_3039489_gDNA_ID_2214488_Annot_ID_183558 3000 nt of promoter + ATG

SEQ ID NO: 11300 - DNA, 3000 bp, Unknown
  misc_feature (1)..( 3000): cDNA_ID_2717223_gDNA_ID_2214488_Annot_ID_133401 3000 nt of promoter + ATG
ttctcctttgatgtcaacttctaatatctagagaaaattcaatttaccaattgagattcaacttcctcttctctgcaggaaaaaaaaaaaaaaacttcctcttctttacctaaaggccaaaatcattatcggtggcacaaaggcgatgacatacatggtgtacataagcttccacaaaggtgaagatagaatccggtactccttcctcagccacttatctgcctctcttcgccggaaaggtctgatctcttcatcgtcgtttgtccatcattcttccaatgagattaagatagagaaaacaaaattcaaggcttttttggtggttatctcttggaagtacgtgttatccgcagaatgcctcgatgagcttgcagagattgctgatcaaaatgtggtggtccccgtgttttactgcataactcaatcggacgttaagcatcagtgccgattggacattttgagagatacgtttccattggaggattactcagccgagagggtatcccggtggatatatgctctgaacaaaacgaccaaatcatataaattaaggtaacagtataaagattgcagacgctcaatttgttttgctaacttagagataccatcataccataccatgcagtcttccataacggatattttttaaaaagaaatatgaatttatgaacggatcatgttatttatactagttgtgtgtgctagatcactataaaaacaggtctataaatcagttgtgaaatccaatcaccagtgtttgatggttggatttctacagtcttattttgtttttgtaaagaccaagttctttccaatcgtgctttgccttttttgtttttactaaagttaaagcctaggaaaaagaccggtatgacttaaattttctactgcctaatacttttttttgctacaagtgctgtagattctgtttttttgtttttctctcctctaactttgtatactgcatccactagttcatgtctgtcaatttaataaattttaggtaatgaccatcctaatgcaaatgataattaatttgaaaatttatttataagttaaaagattatgtgtagggtaaaagaataacatggcataggcttgatgtatacaacatacccaatttatttgataattaagttaagagtttgtcctattattagttgacctcttctttaatataatcatataggattaggtctagaccccaaacccttgttgcaataagacttgaaaactctaattaatatggcatatgcttgacttggggattcggttcggttcattcatttatgtttgtttttctttggttttagagtttagcatctatgtagaaaccgaaacaattttggttcgattctagtgttttttgttcttaagtttaggacctatttacatatttttagtatttttgatattttgccgagtattttttggtatttcagatatttaatttggttattcgataaataaatagctagaatgtttggatcaataatcacatgttgggcaacaaaaatattttagttaggtttagatttagaatttaggaaccaattaagtgtataataattttggttcggttcttttttgttcggtttttatgtttcgagtattttgccaaggcctaggcttgacgtatacaacatactgtatgtctgtatctaatctttatattattaaaaaagaagtacatttgtacttttttccaaaatcgttcacttaataaattaccattaaaattatatgtcgaaagtgtttaattggaatgagaaatgataaatttggaattaaaacaattgaaagtgtcttatttcctttcattaatttagaaatatttcaaacctaacatcttgtttaatcatattttctaggacatttgaatcaatagatagtaataaataaaatactagatttttgtaaatgttgtgattcaaattttttaaaacaaacataatttacccaatcaatgaagaaacaaaagtgtgaattgaacgttccacatcggttaaatatattgtgtggtggttcaaagaaaattttataaaagaaattaaaaagattcgaaatctaatgagtagaaagcttgatttaatagatatccaaatgtctataatttttagttgctttaattagttttctttgaatcatataatttctcaaaaaaaaataatatcataagaatgttttttatataaagaaatctttgattttgttaagatttacatcataaacatatatatagaaagaaaccgaaatgtagtcaattgtttactaattacaagtttgaaagaacattttattgaacaaatagtaaagaaaaaagttaatcagaaacaataaataagaactttagaaaaatatataaatttgcactggttcataagttaaccaaattacaatataattaactattaatttgttgttcaaaaaaaaaaatttaactattaattaaaaacttttgtaatttagtgtaaaataacataagtaatatcttcaatatataaagatgtttctaataaattaaatatactcattcgatttgagaataatattttcaaaagagaaattatatagattcttataaatatataaattatatattttatgaaagttttgtaaaagtaaaagtaaatatgggttaatttgcaaacttttataaataaaaggtggtaattcaaaaataaaaatcgaatctattaatatttatttttagaggaaaacatagagaaataaattgaaattaaaacaacttatttataaagttcctctatgtagaagcaaaaatacatataagcctgcatattttagtttttttatcacattgacatcgtgcatggcatcttaacataatatgagtcgatgtaatggaattttgttcaagtagaaattggtcgttgtccctcattattatacacatgtttaagtttaattaagacacatatgttatcaccggaatgtctaactatataattgtgttggtctcaactctcaaggaggatg

SEQ ID NO: 11301 - DNA, 3000 bp, Unknown
  misc_feature (1)..( 3000): cDNA_ID_2717219_gDNA_ID_2214488_Annot_ID_133402 3000 nt of promoter + ATG
gaaaactaaattttcatttttttatttagtcaagatactagagaatatatatttaaatataaattttaaaaaaatataattatgaatatataatttcataattttctaaaaataaactaagactcaaagaaaatattttaaatttgtttatataatattttttaaaagacaaatcaaactaataatgatgcatataaaaaacttttagtagtagaaaatatatttataaaagacaaacatttagacatgcaaatctgtttgtaataaaacatatctgttagacttccgctacgtcaatattacttttgtatcctatcactgacgtagtttttgctctgataccaattgatttagcggaagcttttaaggatagaatatgaaagtaaatttgagtatcaatggatttcaagcaggataatcgtaactcggaattttagtgttatcggagatcaatagattccaatgaacagagactttaaaaacttcgtttgagaatatttttttcaaagcttatcaaaagttctttaatttattaataaaaacaatccaatacaataagagcctaaaacggttatttataataaaaacttaaattcttacaacttaaaatattctaaaataataataattaattaataaaagataacgattgtacatatttgcaaaatatctcgctgcttcaaatggacaatatgtatgtgtcttttttttttttttacaatatgtttaatctctagcgacgagtctttcatccttacttttacttttcgcacggttattccaattaaacgaagttttataagaaacgaaattcaactgtccaaaaagatgcagaatatgacccaaacccaacaatatatatataccccagctaataaatatttttgatccgccccagtttttaggataccgtttatgatagtcattaacaaatttaggaaagagcaagacttttccatgtttgtggatgaatgagtcagccgatgtaaacaagttaacgcacgtatggtttatataattgaacttagattttaattaagttattttgatgataaaaaaattaaaatgatactttttttgaaacggagaaaatatagggaaaattataaactttactatttattctcaattctttatgcaatttatcacaatcattcctctcttacacatcataccacatttcgatctgaaatgtcagtactgtcctcaccattttttctctatttaatctctatttcttcgaaatccgtatgttttaaccatacatcattatatttccgaagacaaaacgaaacgttttggtctctcacccacttcccctgacaacctgcacaaattatctacatgtaactttcaattaaatttgtctcccaatttattcatcataaattctcataaattctttgttgtatctatatattgtctccgatttcatcatctttcaaaattatcatgaatcccacatcttatccacaaaattgttatcatttaaggatttcaaattttatttagacttttcaccatctattttggtctacagattagttgagcattattgtcttcaccgatttgaattattcattttttcttatattgtaaaataataaaaaaatccagttataacatattatcttgtctaccattcgatctaaatttgttccctatctaattcgatcactcattcgatatgaacttgtccccgatataacatattatttaaataaaattatatgcaattgtaaacgtgaaggtgaagacaataacgttcaactaatctgtggaccaaaatagatggcaaaaaatcttaataaaattcaaaatctttaaatgagaacaattgatggacaagatgtgggattcacaataatggagcaagatgatgaaatcgaggataagacatagacgcaacagagaatttctattctgggacaagatctggagacaaaaacaaaagtctgtcaccaattgtcttttatctgatacattagtctatcaccatcaagggcaatttcgtccacaaatgtgcatgtgacaatgaaatgtggtagattttgtaagaggaggaaactttttgtggtaaagattgtaagaaaactccaaaaaagtggtagattttacaagattctcgaatatatatatatgctcacgcatacatttaaagagtcacaaaaacaatttagttgttattataaaaatattatcctctattttgttattgttacttaaagagtcataaatagaattgacgttattttctaattttgagcttcataagtagtggtgatagttagtttgtttcaaagattttcttggcagaatggttgagttcttgttttcaagtttgaatctgtatttataagggaggtcggtttcatgtcgaggaagatcataaaccaatggtccaaagattgcattaaagataaattaaaaaaaaaaaagagagaaaaaggggaaaactaagaagttgtgaccttctctttcttatgctcgaagagacaattagtttcctgacataattgtataagcaagtggggcatgctctacggaaggttgacgcagttctcttcttacttgtgatttcttttgctcttaatttaaaatgaaggtctatgttgaaatggtccatatgttattatattatacatgactttttaagttgaataagtttacaaattgatttgcatcgtctatcaaaaaaagattccaatcatgaaagaaagtcccactttgagaagatattccatggaggcctcacggcaacctcaagtgttcatcaacttccggggaagtgaactacggtatacctttgtctactatctcaggacggccttggtaaaaaacgggatcaacgtttttacagacaacatggagccgaaaggccgtaaccagaaaattttattcaagagaatcgaagagtcgaagatcgcactggcgattttctcctcaaggtatacggagtcaagttggtgtctggaagagctggtaaagatgaaagaatgc

SEQ ID NO: 11302 - DNA, 3000 bp, Unknown; identical to SEQ ID NO: 11293
  misc_feature (1)..( 3000): cDNA_ID_2717212_gDNA_ID_2214488_Annot_ID_133407 3000 nt of promoter + ATG

SEQ ID NO: 11303 - DNA, 3000 bp, Unknown
  misc_feature (1)..( 3000): cDNA_ID_2717204_gDNA_ID_2214488_Annot_ID_133409 3000 nt of promoter + ATG
aacctgaaattttggatcttttgagttgaaagtttgtgactttagtagttttattggatatatctaaatgggtttggattggatgatggtttagatgaaataaacgaaaaaatttgattgaaaagtctttgacttttagtagtttcattggacaaaccaaatctaattaggtttgagtttttattactaattggtgattggctttgaagaaaagttatgaactttgaactttattttgcagcttgtagctcttctgtgaggaaggactcgttggatgctcctctgcttctgtctaacaactcatacgtcttcactgcaaacaattgcgtcaagtgtacttgtgacgctttgaagaattggacgttaagtgattgataatctcgttgtgtttgtcccataggataagcttgttcttttttcttctttttctagattctgatggttttggttttgtatcttgtgatcagtttaagctgtcaatcatcatctgagattaagccttcgaactggcaaacctgcccaccattttcacaatgtgatggagctttgcttaacgcctcttgcagacaacctcgtgattgcgtctatgctggttactccaaccaaaccatcttcaccacagcttccccagcttgtccaggtttgtttgatccaagtttctgcgcatttggttatagtgtagtgtaattaagtgacttaataacctggttactctctgatatgaacagattctgctggtcctgataactatgcatcaacgctcagctcaagcttcaatttcgtgattgtgttgattcagtgtgctctgctttgtctctgccttctctagtaatgttttgttgtgtgtttatgagtgtgtatctaagtacagttcggattaaaataaagacattgtttcacctgaagcatcacgtccttgtaccatttttatattggaaacatttcagcttttgacacattttgttaccaactaaacaatacaaaactttgacatgaagttaaacataattttcattattcaaaaaataatgctctgaggcagttttcactttgcactttgcatattacatgaacaaaaagaagaaaaacaaaacaaaaaaccatatgttatttttctcgaaatctgaaatcccaattcgagttatctcgaaagaatgtgggaactagaagtattttccagtaagcgtgaatcataccgacgtgtgactgatgctttacacaagcgaagttggaattgtcaagtcaatccaaatttgcaatgacagcgtcaacgacctcttgagtggtactgtttccaccaagatcttcagtccgacaattcccttcagcgataacacgcttcacagcggtttcaagcctgtcagcaaaagaagggaactgaaggtgtctaagcatcatggctgatgacagcaacaaagccacagggtttgcattcttttgctcttccgttgtatccttccccacgtttcccgctgatgcaccttgctcaaagaccgcatactccgccccaacatttcctacagaaaatttcatagcataagcaagagaatctacttctctatagtgcttgtacattagatcaaggtaaaatgaattttattattacctccaggcatgactccagtacctccagcaataccagcagcagtgtttgccactagattaccatagagattaggcgtcacctgcaaagcagatacaagtaaataaaccaaaatagaaggaagctagcccaagcatcaacaagtgctgaaaaacatttaccatgacatcgaattgctctggtctagccacaagttgcatacaacaattatcaacaatgatttcattgtaagcaatgcttggatacttcttagcaacctcttgacaagactccaagaacaaaccatcagccaatttcatgatattagccttgtgcactgctgtaactttcttcctgttgttcaagtaggcatactcaaacgcatactttgcaatacgctctgaacagaactttgtaatcacctaccaaaacattagcatcagagacatctttgatataacatgaacatctccaactttcacatctactaccaaatcactatgaatcaaatcacatttgtaaccaaaacaatcaacaaaaactgagaaattgcaccttaaggctctcaacaacaccaggaacaacttcatgttcaagacctgcatattcaccttcagtgttctctctaatcacaacaatatcaacattctcatgacgagaagctaaaccaggcaaattgaaacagttgaccaaagaagcaaagagatcaagctcctttctcagattaacattgagagagctcacaccaccaccgacgggagtcttaagaccacctttcaaacaaactttgttcttcttaatcgattccaacaatccttcaggtaaactcttcatatctccatgaacttcgaacggttcgaagtaaaccggagcgtgcatcgcttccatcacttgttgaaccgcgtttgttaccaacggaccaactccgtctccggggattaacgtcactggtcttggttttccgtcaccgggtctgggcatgtaagtcacggatcgggtctggattttggaaccggaagcgatgctacgaagattcttcagtagagaaaacgattggcgagacatcttcttctgcaattttgatcggaatcagattcttctgaaaatgatcgtcagaggaagaagatgaagaagagttgcgactttttggaacgaagaaagaacaagaaaagcgtttacttttagtctataacttttattgtttacataatagccccaaatgtttaaccgttattaatgtttagcccgtttataatttgaattgtacattaagaccaaattgggtaaaaccatgttctgttattaacataatagtcctcgatttcttaacattatacgttttagtccgtatgtaatttagtattttgcttataagaccaatttggaaaaattgaatttttgagttctgtagtagttct

SEQ ID NO: 11304 - DNA, 2490 bp, Unknown
  misc_feature (1)..( 2490): cDNA_ID_1807075_gDNA_ID_2214489_Annot_ID_133410 3000 nt of promoter + ATG
tacatctacaaccataacaagcacacaacaataatataatagcattaccaataaatcaagtggttatgtatgtatttaacaacaataagtggagtaaatgaaaatcaaacaaggagatgggcagctggatttccaagacaagattgaaattcttggttgcttgtgtatgaatgtaaagtagacatgcttattatgttattattatgtatcagtattgccttgagttaaccatatatttacgttcttaaaccagaaagaaaaaaacagattattattattattatttgagcattgtcattatgagagacatggtttatttcccaagacaaatcacaaacctccatgtgagtttccaccactattgtgtctctgtcctaaaacaaaatgtgtatcgcattaaattagttttcgcccctttttgttatttttagaatacaaattaccaacttgcttattcaatcttagaggtgatgactagctaaagaagggacaccactaacgtgccacttgtgtagagatattcaattgtatattatatagtatgcaatatgaattttgttttgttttttatataatttatattttttccgccaatattattttatttatatgaagtcttaacttattaaacgtttgcacaaaaaagaaaaaataaacttcttattacgtctcatacacagggttcggaccttattagtggcatttgcgcagagttactattatcgatcacttaaaaacatatataggaaaagtatatcggtaatggagctctagatgtagaaatttcgtaatgaaattatgaaatctcaattaagatgaacatggcatggcatacctagcctagttgtatcgatgttatgtttggatttatatgcttatggcagaaagtaacaaatacagaaatacaataatgctactacatggttataatatatggtctcttttgttaagacaacgaccaacacaactacaccacaagataatcatcgattagtacattattaaatcttaactattattgctaaaatctagggatagttgaaatataaaactatacgatgcactattacatacattctccattaatcatttggtaatgatgaagtgctccaattatatactacctttctttattttgttatgttccttaacatctctattactaaagattttcggagattatgaaatattgtgaggcatatatgatatattcatacaaattactctacacgtttttgaaaattgataggtttaaacatgattgtaccagggaagacatggtcaaacagaaagctattagctttgatgagggacctcttaacaaaaaatttgttggtagagccaaaatgattgaactgacaaattttcatagagtttggtgaattgaataactccatatgaccaattctgttttgtaagacaacgaaaattatgtttttcgaatatctttgtgttatcgtacagaggagcgagtcaccagaaagcacaaacacaacgattttgtatcaattacatcgatacgcaatacaaatatttggaatatgtcatacatatgtattgggcctttatctcatgtctcatcaaacctcgtatctatcataaacttacgattcacagacccacttactacttattctggcccattaaagttcttctttttttgtcggttctagcccattaaagttcagcaacccttattattcattttttagtctttctatttctaattattcaattttatccaaataatgaatgaataaagttaaacaccgacactgttatatatatatatatatataacaatacaccgccacgtgagaactacgaatgggaatttcgcattacatgtttcgttaacaatataaactggaggaaaaaaacacatcgaaaggaaaaaaattcaatgtaagaaaaagtgagggaaaggcaaatcaaagacgtgttctacactaaaaggaaaagtatgaggaaaaactaacaataaattaaacaaaatttggtattttattacgtaatagtagtattaattaattaaaagaattgacattgacctaacaaaaattcttaaaacaaaaagaaagaaaaatttgtttgaacaataatggaatgactttgtttgtttggagaacaagctaagctgacgtgtctaataactcaacacgtcagctaacagacatatataaacaagtgtatatagagttaacgttatccaatcatagacgaaaagaaaaaggttcctttttttgactttgtatccgtagatcatcttcttcttcttcttccagagttttatccttatccgttccatcaaattctctctctgtaagttttctgttgatttctctgttacatactctgttttgatttctctagatttagaattcatttttttcccgaaaagacgcggaatttcgatttgggtgttgaaaacaaaattagggttttgtgtctcaatttctttgattgtgtatattctcagaagcaaagatg

SEQ ID NO: 11305 - DNA, 3000 bp, Unknown
  misc_feature (1)..( 3000): cDNA_ID_3039566_gDNA_ID_2214489_Annot_ID_133413 3000 nt of promoter + ATG
caccaatttccatttcatctttatatcaatgtccaaagacagtataccactaagtgtccccatgctaatcacatcattatcgataatcactattagactcttaataattatttacgttatcagcttactgtataattgagactatcacaagaaaagtgtaaagtgacaaaaagtaacaagattagaaaatggtaaatgaaagggaacaatatctacaaagaaaataaaagcttgaaaatcctaagaactatttccataattgtcttcaattgcggcaatgacggccccatggaaatacccgagaacttgaccccgatgcgatccgggtcttgacccgttcgaaatctgaatacagacaaggaatagtgatacctccttcgtggcaaaatccgtactctttttcggcttctcgaagcagctcaccgaacaaaggatggttaaagtaaacgatgggtaccaaaactctatgacagtcgccgtctttttgacccacgtagatagctaagtgtccccttggaaccgggtcggctttcttatgatcaacgggtatgtatgcggatcttctcgtagacctgcgtctgaaactttgcttgagacgttggccccaacttttgagtttggctaatggtctcatcagcatgcaagcttgctgggtcgagtgtatccggttgtatcctgaacgttggatccgggttttgcgaaagatccatcttgagactcgtctcccgattctaaaccctatgatcttcctcatcttcttatagctaactttaaaaaacagtttttgtcacaaaactacactttttgagagatctgagaggaaatagagattaagagagtgagacgagacatggactaacgagtcaaataaagagtgattcatttgaacgagaataaataaatatatcaatcttttttacattttcttgattttctctataagaaagaaaaaaaaaaagacaatttctagggaaaacacaaattcgaaaatgatgtgaacggacaaagaagaaatgctttcgatgtatataaagtataaacgttaaagaagaagagatcaagagaagaatgagtgaaagacaagaggtctttaaaggagtttatatggagtctaaataaatgaacggttagatgaagactaaggtctatgaccgttggattagattaaaactgccatatttctcttgcttggcagatagtccaaacccgaagaatctacattaaatatgacacgtcccattaacctttagcctacatttatcattatcactgaaacgttttgatgggttatcaatcacaaattcacaatacgaaaaaaaacagtagtgtcaaactattatggtattttagcgtgtaattcgttacgcagatattattatctatggttgattttgaatctgaaaatatgatctatcgaagaaaggcctgaaattattttattatctgaatatgttttgtcggagcttacatgcttagcatgtttgaacttcgaagatgaagacaactatgccaccacacgtgtgctggccaagtgggacaaagttttgaacctattcggtaacactcacacgagatcaaatccccaccatctcattttataatgtcgtttatttatttgttagtgatcatctactgttttttaataaggttagtgccctagtgatcatctacttgtctgtgattttgtaaaaaatatatatagaattaaaattatattacgagaacaaaatgtgtacggtgtgtcctctagttgcgttacttgtgtacgttgatgatggttgatatatatacatattcatatcaggacaaaaaagcttttaaaaagaccaataaagatagatctagttttgagtaattggaggattcactaagctttttggagctaaaatggtgaatttcccacgaatcaaatctgagaagagaagctttctatattttgagttactttacacaattacacgttcatttgtaaattaagatcgtgtttgtgctgcatccaaaaaattcttggaattttaaagtaatgaaatataactaaacaaaatgaccactaaaaaataaaataaaaagcacatgagagatgagtgattatactctgataaattagctaacaaaattatgtatatataaaaaaggttttatgcagtgtaaattgtacttacacacttaatcaaagcaaaacaaaaatattaaaccgacaataatacgtaaaccaaaaaaccaatattccttaaaatcaatttgtgtttccaaccgacaagttctttgtatatatggttaatcatattttgttgtagtccgtatcctagctaaaagacgtttaaacgttcataatggatatgacccacccagctggtgaagatattcgtttttcgtgatcatatatatatgtttctttttgcccatccctgtttctattaacccaagttaaattagctatatatgagcaaaaactatgagttgaagttaagcacaatttccgaatcacaaaaaaaaaacaaattgatttggacctttcgataataggaatcagaaagaagtttgttccaaacacttctcttatataaatcccaactcatcagcttcgtgtttccgtacagtgcgtacatatacgaacgtgtcactcggcttttaacgtcaacttaatcgagagcccaattcaggcttactataagccttaataagcccaatattaaaagtccctgattattgtgagcccaatattaaaagtccatgactatggtgagcccaataataaaagtccatgactatggtgagcccaataataaaagtccttgattaaaaggcccatcaccagtggagcgaagaagcggaggagggaagagggatgcgatcctctcgtcatcgctggttccatcagtttcagtgagaatcagatcgtcgttgtactgagagctccggcattggttcacggcggagctggagagttatctaagaacggagaggttactgatctgaattgttgaagatcggaaaatg

SEQ ID NO: 11306 - DNA, 3000 bp, Unknown
  misc_feature (1)..( 3000): cDNA_ID_2717251_gDNA_ID_2214489_Annot_ID_133415 3000 nt of promoter + ATG
tagttttttcctgaatatgaaatttctatggataatccatgagaagactgattaacttccagagtcaaatcatatcgttttatcgatcgttacttcatcttcaaagcttttattcaaaaacaattaatttcgttacctataaaataaggaacgtgttaatactattttgtggccgtgcttaaaaagtcaacttagaccaaatgataatgttggtaatctactcatggattgagacctctctacggcttctggtagtttttgaaacctcgtttcttccgtcgacgttacgtgtaacgcagtcttgctttgaacgaggacgtttcaaaaacccatagctagaatatgatacttataccaattaagtaaacattcaaacaaagtctaatctctttacaacacaattcttttttggattttgattttaaccataaaccaaaaagagagagtctgattaagtgagcacaaaagtgaaaattttacattattgtgtaagagatttttttttttaaaagaaaaaatattcttgggcatgctattgaggaccgcccaataatgaccacaacaatctgtgatgttttatatttagctcgcataaaaactgtctttgtagtctcgaccaagcggtcgtacatgtgtttagtatttatttattataatagtaaaaaatgtattaaaaataaacatgaactaattaacctataaaatgtaactgaaaattattaaaaaccatattgatttcctttgactacttctttttatgccaataacttcacatatgatcactttaaaaccataacactcaccaatctttttgtttatctaaagttaaggcggattgtttagctctatactatagattatgatttttcgaagttacttttattaaaaacaaatctccaaattgggtgatgtgtaattgtttttaaaaaaaaacttgccaatctatttcaaactgaaatcaatatatgatcatccacaatttgtgtagtggatcctattcaaaattaacacgttcttaaattggtccgaccgatccaatcccaagttcgatcttatgataaggttttgttgagataaatgagtaggaaagtctatcatctcaaaacgtctttaaaatattacaatatataaaaatgtaacaaaacatataataataaatcatggaatcaaaccaattatctactcattactaattttgttcacaaactccaaattctctaagtgtcacggtattaggtaggttcgtattggattattataagtaactagattagaaaaatataagaaaaataaaatcaatatgatctgactatgacgatgatgccgcctttctcattactggtttttaattcgtactcgtgacagtgtgtgttttttctcttacttgatagtattacgttaattagttatgagttctcaattcaaacgttggcggggtacatttctagtattagaaacatatatagctttgcattgcatgtaaccaattcttcaacctcttaataatcagattctggacgggataagatcatttgtatcttttgcgtttaaatattagatgatctacctaccatcgtcttacgtattctcgatttttttattttaaaagagaccaaacatatatataataataaaatggtttggatctattatctatatatgtttccttaacaacttaattagtttaaggcttaagcacagttgacaaacatctaaaattttgtccaccagcccggagatttcatagttccattctacccaccaaaacaagagccctttcaatatatatagggctattcaaacatgaactttaaccccacaaatttttttatctattattattgaaagaaataactatgattcgttagatatcatgattctataattagttggacgatactaatgatattttttcgtaattagataaataggtaattttgtgtggatagttcatttggtgaacaaagttctcttgcatacaaacttttcactgggaaaaacagtgtatattttatcaaagtattatcaactataattggttccagatctctaaagattattataagatcaaaaaccttttctgtagtttttgtgtatgaaaaaaagattaatagtttagctagaaaacctttaggaaatcatcttttatgtagtcaatctgattatgtacacaagaagtcaataaactacccaaaaaaaaaagttcaccaatttcaaaatacttctatagttatatttcacctagaaatagcatcatgaaccaattatcaaaataagaataaacagaatctttattaaaaaaaagtaccccggccctttatactgtcttttgtgcaaattgatgatggtcgtatacagtgtgcgctacggcaaggagacgattatattgattaaaaaaacttctgcatacagtattgcgaagttaacgtcgacgtttgatatgtctttgtggatagcgattacatgtttaagtcaattgagtttaagtcccatagacgcgtttatgccagtaagattattaaatttgagaaagaaaaaatataaagggtagactagttacgatttatgcgtattcgtaaacctattattttcttgctatcacatttaatctgtgtccaatactttgtaccaagattagattgtagactgatttttttctggttattactgaatatcacactaaaatttgtttcgtggtcaaatcaaagcgtattagtatacacgtcaaaaagatagcacaaacaagaaaattaaaattcaaaattgagaatatatgacggcatgatcgttaccaatccattggttggtataaacatatatacttttcttttttgcttcaactacaatgaaattacatattaatatatttgattattaatttaaattaaaaaacataagtccccacatctatataaacacatcgattcaagactcaaatctcatcaatcaaaatcttcaaacacaaacttctcgtttctcaaaacatttggtcttatgatg

SEQ ID NO: 11307 - DNA, 3000 bp, Unknown
  misc_feature (1)..( 3000): cDNA_ID_1830995_gDNA_ID_2214489_Annot_ID_133418 3000 nt of promoter + ATG
cctcactatgcaagtatcctttgttactttagaatttcgtgagatggtatgttgttgtcttgttagtctattccagtgtaaacgtccttaacctcaaaatcaggaaacaaagcagttggagtgatgaaagcaggtcagactttcacaatcgagccaatgatcaacgcaggtgagttcaatgttaaatgtccttaacctgcattcgttaaatgttttaaatttgttactccatacttgagttatctatttacaaccataagggcattgtcatgataggggggtggagggatcgaacatggcctgatggatggactgcagttaccgcagatggaaaacgcagcgctcagtttgagcataccctattggtaacggagactggtgttgaggttttaacagcgaggcttccttcatcgcctgacgtatatccttggcttaccaagtgattaagtgtttggttcctttttggttgtgattcgtaaacttgggaataatagtgtcatctttttgccattatagaccatttgatgttgttaccttgttgtctttgtttatgtaattttattattactatctgaaactgaatcttaaagacagagtcatactgtttcaaacctatttttatcaccatgagaacttttttgctaaaaacgtctgaaactgaaatactgacaacaaacgaaataaaaaaagttttgaggtcgcttggctaggatatatcacaagagacttgctagttgctactgtcatcgaataacgatcgacctaaagatgttgagacgaagaagatattaattccatttttttttaacaatagatgatacatataggcttgcttataacaaagagaaaataaaagttgcacaacaaagtgggaagaagcattaagagagttcctgagatccttcactcaaggaccttcacaccagaaacataaactcggctttgaatgacactgccaccaatccaaaacccaggcataaccataagaccaactcttgggttctcttctttttcatccacaactatgttcttcacaacactttccatgtatgaatcagagaactcactaccctttttcacttggaagatctttgcagctggatcaaaagagtaagcaagcctatgcaagatccatatcgactttatggaatgttaacaatccacagaacaaacatatcaaacaaagcgactgtgacattttctttggaatgcaaagccttaagtggtacctttcctgtataatgtaactgcggcttgctatggctatccacagatgtctttggataaagttttggaagacgaggttgttgaagatacaggggaatcacaagtctttaacttgcttaatccagaatttgtagactttgatacttgtttagatcctatcacaaacgaacttccaacttccggtgactgaaaaaaagatgcaagtacaaaactttatcaaataataacatagctagcaacatgtatactatttgagtttttttagagtttctaagccaatcagaaggctctatttcgtacccactcgcagaaagagcgcgttgagcgagtgagagcgattctgtgggtaaacccctttccaattcatgactttttttatcgacgcacatctctccaaattctctatcgcgtgactcttttagtttttttccacaaaaccaaatgaaaccgaaccgaaatcagttttaatttcaaaaccaatgcaaaccaaaccgaatcagcaaatagtgtgaagcaacaattctggacagaaattttctcaacatcccaacaacgggaaaaagagaaaacaccacaactcaaaatcacaaaaaaaatatccaagaaaatcacaaaagcctttgacccttaaattgcactacaactcaaaaatcacagtaaactttcaaattgcaaaaatctcagaatcaaagccaaagaagattcctgaagatttctacttccatggcatccaatagatgaagaagaacatgaaaaacgaccgaaagagcttagctttactagttttagtaaaatttctcggcaacaaagtgacacataaaaaaagataccaaaaagaattgtagattccataagaacaaggacgatttgcaataattaaggtttatacagattagacttaccagttgaaatctgaaagcatgaatctcgttgtgagctcttcgtgtttgcctcgtccttttattatctttcttattttctcttctttgtgtgatttcaactcaccaacttttatattttactctgctgcttcgagatcaacgcattaaaagtaatggggtacatttagaatatttagattttaaggggttgaagttgtaattttgaagaagtggaagatcaataaaaaataatagaagaacagagacgacgaaacctgccggagaactgaggagagaaaaaaatccgtcgaaaatgggaatttgaattcgtcttctgttgatcatcgcttcacttctgcttccaggtcttcatcggaaccaatctcactttcactctctaatttctaatttgaaaatcgatcttatcaattgtgtgtgtgtgttttgttgcagagcttttactcagaagaagcttgatgatctcaaatctctctttgtttccctcgcttccaagtctcacagcaatgaccaatacgtctcgtaccctgttttccaggttttgacaaaaaaaaaaattgtgttctgttctcatctggtttttgtggttgatagttttgaattaagccttacacgatgtgtgtcggaatagtgtccaaatctcttgtttttctcaaactcgcaaaaactcaccaaaggaaactcaacaatttcactcgggagtgttgttcttcacttgtgttttttttgttggtatcaacgtgactgaaaagcatgggccatagaatgcgatgctatacagtatgtagagggagtaagactggcccgtgaatgcacataatgggccttaaactggcccatcaatgctttactctcctctctagctagcgaggag

SEQ ID NO: 11308 - DNA, 3000 bp, Unknown
  misc_feature (1)..( 3000): cDNA_ID_3039512_gDNA_ID_2214489_Annot_ID_183611 3000 nt of promoter + ATG
atactgtagatgattacataatatcaatacttttatatttatatgtattggtctttatatattgttttctactatacgaaatgtcaggtttgaatcattgttgagtaagatacatattgtattggtcactacaccaatccacaaacaatttatggtatataaaacattttcgataacaaaatagatagcattactgaatacactgaccaccacatataaaactcgacactattgatcaatttagatgaagaaaacgagaaacaatctccagtgttttatttaggccaaacaaatatctaagagtaaaaagaagcccaaatctctaattttttggtgtaatataaacaacaagacaattaaatggaatggcctcttttcttcttccagctatgtccgaaaaagaacacatggccccaatccaacccaactcacttcttataaacaacacacatttcaaaaatataaaggcaaaattaactctagtcaaatactctaacctaaccatgatcaaaatttaaccgtggttaacaatcatccttctcttttaacttcatctctcttctcactcagtcttctccacttcctctgctccacactgacacttgaaaaaactcaaaaccgtctcatcatggcggcgtcacagacattctcactcctcgccttcactttctccctcctcgcctttgcttccaccgtgagtagccacaacatcactcaaatcctcgctgattctccagattactcttccttcaacagctacctttctcagacgaagctcgccgacgagatcaacagccgcacgacgattacagttctcgtccttaacaatggcgcaatgtctgctctcgccggaaaacatccactctccgttattaaaagcgctttaagcctcctcgtcctcctcgattactacgatccacaaaaactccacaagatctccaaaggcacaactctctccaccacactttaccaaaccaccggaaacgctcccggaaacctaggattcgtcaacatcaccgatcttaaaggaggcaaagtcggatttggctccgccgcttcaggttccaaactcgattcatcttacaccaaatccgttaaacaaatcccttacaacatctcaatcctcgagattgatgctccgatcatcgctcccggagttttaaccgctcctgctccttccgcctccttgtcaaacatcaccggattactcgaaaaagccggttgcaaaacctttgctaatttgcttgtctcaagtggagtactcaagacttacgaatccgccgttgaaaaaggcttgacggtttttgcaccgtccgatgaagcttttaaagctgaaggtgtaccagatctgacgaagctcacacaagctgaggtagtctcgctcttagagtatcacgccctcgctgagtataaacctaaaggctcattgaagactaacaagaacaatatctccacgttagccactaacggcgccggaaaattcgatctaacgacctctacctccggcgacgaagttattctccacaccggcgttgctccgtcgagactcgcggacactgtgctcgacgcgactccggttgtgatattcactgtggataatgtccttctccctgctgagctattcggaaaatctaaatctccatctccggcaccggcgcctgagccagttaccgcaccgacaccatctccagcggatgcaccttcacccaccgcagcttcaccaccggcacctccgacggacgagtcaccggaaagtgctccttcagactcgccaacaggttcagcgaacagtaagtcagctaacgcagcggttggcgtgagcacaccgtcgttgttcaccgcattggtcacgatcgccgccatagccgtctccgtgtctctctgctcttaaaacctttcgtaattacgcaggctgccactccctttgtttatttttaatttaattatcttttcaatttttatttttgtggttatgtgttgttgagtttgaaaacatgggattagtgagtgaggttttatttaaatcgtttgttaatcacattttcattattgctttcagtgttgatctgatagtatcttgttgagatctttggctttcacttatttaacttcttttccatttttggataaagtgctttttcttctaataattttggtaccgacaaataatgcatcaaactagaagtttactgtttacctttatcagttgatggtaattaaaattcttaaaaactccttaaaattttaaattattatcgctacttggaactactttataactttcttttgtccaagaactactttatgattataacatcaaatattaaggcttagaatttcatgttttctctcgtgtagtgaatttgattcaaagatgctttaatatttttttgaagaaattttagctggtaattcctgggcccaatttcttattatttgaactcaaactttgttttgaaagcaaattgattccttatttatcttcgccggctaaatgctaagttttcccgcgaagcaacgaacaaagcaacattcccacttttagcctttaacttgctttatttattattattaaaacgatgagaataatttaaatttgtagattatattaaacgatgccgttttctcacatgtgcaaaacaaattaaacaaatgaatgggtctacattgtcgagggttgggagaggtggcccatttatatttattaagagagcgaaaagcccgatctctttcatctcttgacaccgacacttctttaaacaatggaaacgtttttttttatcccgagaacacaaaccctatcgttcttaactctagaaaacaacactcagttcttatctccattcaacgaacgacggagcgtttaaacatcagtcttcctcgagaagctttaccaacagagaggttcacacagcacaaaaccccttcactcactggcgtatttgacagttagggtttcaaaatccccgccatatttcttctataatcggagtgttaatg

SEQ ID NO: 11309 - DNA, 3000 bp, Unknown
  misc_feature (1)..( 3000): cDNA_ID_3039525_gDNA_ID_2214489_Annot_ID_183605 3000 nt of promoter + ATG
tactatacttttggcttctagtggtgtcgaatgtattaattataataccatgcatgttctaggcatagattaagggatattattaggattgtgtgattaatatataattaatatgaatgagagaaaataaaacgcgtgaatgagatggaatggaatagaaagcgtaggcgtggcacatgatcatgcaactatcttaattttgtgtctccacaaagctaccgtttttctcgggactttgctttgttgatgttgcgaactctcttcctttttcttttctttttttatataattgatttaactttttggatcggccattcactgataaattttatcattataattaatttgctaatgcaaggaaattccgttatcgattgatgtttattgttcgcagttcaagattgcttttcaatcaccagtatgaatttgtcatctgagcgatgtagcaaacaaacattaggtgagtttgatcttatagacgtatttaccatttgaaaatgatactatataagtgttctaattattaatgttaaatacttatttccatttcttccatagagatatatgtgtgtattgttaattttgtatgattaattagttaagagttcaacttccaacaaccacaaaaaaaacaaaaataaacaaaaagtaacaaatgaagaaaaaacaaaaaaaaaactctaatcaattatgtgatttgatagttttcgttttcccccctgtatagcaaaaaaagaagcagagagggaaagaatttgttttttgttgtaatccgttaaatacttatccgaaacagtatttgaatattccatcaattttgtaagaatctggatcaaaatgtggtattacgtttagttttttttaaaacatatttaacgtttgtgtaattgatatcgtgacttcaccaacttttagagaagcatgagagagatccaaaattccacgtttaaaaataaaagcaaaaataattaatttgttttagagtatagtatatttcttatggacattggtgatttgagacttcgatatttatatattctattaattatagaaaacacatctcgatgactatacaacagtaacaatacaatagtgttagggggggatcaatgatccctacgttcctaagtctagatcgtagatggctattctaaaactcacaatttttatatcgattacagctacccccaaaaaaaaaaaaaaaaacgactacagctataatatattacaaacattactactttattagtgaatgcgcgtgatgcatgacatttaaatgaattctaaataattttcttttgggtttggttcacaattcacatcacgcttctatggtccatatatttttttcctaaaatgccatttaaaagaaacaaaacagtattaattaaaagaaattaatacaagattgttaatggcttatttgccaaaaaataatataaggattattaatgacctcataatacagacaaattaagttccgagtagcctttgttttacggatgatgattattttacaaaatgaatacttattgttttatgttttctacatgtacaattaaaaagagtttaatgttgtactgatataatattgttttccagttgaaattcagtaactattctagttgataaattttatgatgaacacaaaatttgaattcatatataaaaaaatacttatacattgtagaacgtaaccaactaagttggacgttaggtgtttggtattcgtcacataatatattaaaatttgaaactctcagcaaagctacaagtctcttataaaaatgtcattttttggataaagtagtaaatgtagttttacaaaagggatggtgtcctactggtaatatatacagtataaggggagaaaacaaactgttatcaaagatggatgcagtcaaacttccagcttatattttcggttaactgaaagttctaagtccgattcatctagttctgtctctaaaagtgtgttgccagtagtgctttcgtgtcttttctcaactttacatgattgtaacacttcatagcttcctcctccttaccttgctcgaaccaatactctacgaatgcgctactaattcataatgcaaaaggaaggaattggaatcggaatcggattcagatccatggaaggtaaacacgttctcagaccattccacgactccctaaaccagcttgcccatcatgcggatctcaaatgaaatctgtgcacaccaaatctccgtttttccttagtatacgtcttccaccaaactgtcactctcctttctccgccagggtttgccaccgaaacaagataattacaagacagtccttcaagtcccccaaccttggtactccacgcccacggcctagaatcatcactgcaaagtagtttgagtttcccattggaaaccgttgcttggaagtctttgcaatctatgagtaccatgcaaacattcggacacaagttaagcttgtccatcagaagattgtcataaacttttccactaattaggatgccacaatcatgaaaaactaattcaccaactataaaattgttggtcggtaattgagttttcagttaaaggttgtaagtttgtgttgtttcactcaagaggcacaagtagaaagagacacaagtatgaagtgacagaactaattgagttgttgtgtctatttgttttctatataaacaccttgtatcgtcatgtaaagattaacaagtttcagtttcaataaaacaaagttttgttcttgtcttcttcacaagagaagagatatgtctctcttactctgtttttcttctttctctcaataaaccaacatggtatcagagccgatggttgtccttggttgtctctacaaaaataagatgtgttctgctgcgaaaagaaaaagagagatggagacaacaaatctatggtgagatgaagaggaagaagaagagggaagaagaagaaataagaggtggtaactacagagagtaccatcagttttcacaaacacattcac

SEQ ID NO: 11310 - DNA, 3000 bp, Unknown
  misc_feature (1)..( 3000): cDNA_ID_3039528_gDNA_ID_2214489_Annot_ID_183604 3000 nt of promoter + ATG
tgacgatacaaggtgtttatatagaaaacaaatagacacaacaactcaattagttctgtcacttcatacttgtgtctctttctacttgtgcctcttgagtgaaacaacacaaacttacaacctttaactgaaaactcaattaccgaccaacaattttatagttggtgaattagtttttcatgattgtggcatcctaattagtggaaaagtttatgacaatcttctgatggacaagcttaacttgtgtccgaatgtttgcatggtactcatagattgcaaagacttccaagcaacggtttccaatgggaaactcaaactactttgcagtgatgattctaggccgtgggcgtggagtaccaaggttgggggacttgaaggactgtcttgtaattatcttgtttcggtggcaaaccctggcggagaaaggagagtgacagtttggtggaagacgtatactaaggaaaaacggagatttggtgtgcacagatttcatttgagatccgcatgatgggcaagctggtttagggagtcgtggaatggtctgagaacgtgtttaccttccatggatctgaatccgattccgattccaattccttccttttgcattatgaattagtagcgcattcgtagagtattggttcgagcaaggtaaggaggaggaagctatgaagtgttacaatcatgtaaagttgagaaaagacacgaaagcactactggcaacacacttttagagacagaactagatgaatcggacttagaactttcagttaaccgaaaatataagctggaagtttgactgcatccatctttgataacagtttgttttctccccttatactgtatatattaccagtaggacaccatcccttttgtaaaactacatttactactttatccaaaaaatgacatttttataagagacttgtagctttgctgagagtttcaaattttaatatattatgtgacgaataccaaacacctaacgtccaacttagttggttacgttctacaatgtataagtatttttttatatatgaattcaaattttgtgttcatcataaaatttatcaactagaatagttactgaatttcaactggaaaacaatattatatcagtacaacattaaactctttttaattgtacatgtagaaaacataaaacaataagtattcattttgtaaaataatcatcatccgtaaaacaaaggctactcggaacttaatttgtctgtattatgaggtcattaataatccttatattattttttggcaaataagccattaacaatcttgtattaatttcttttaattaatactgttttgtttcttttaaatggcattttaggaaaaaaatatatggaccatagaagcgtgatgtgaattgtgaaccaaacccaaaagaaaattatttagaattcatttaaatgtcatgcatcacgcgcattcactaataaagtagtaatgtttgtaatatattatagctgtagtcgtttttttttttttttttgggggtagctgtaatcgatataaaaattgtgagttttagaatagccatctacgatctagacttaggaacgtagggatcattgatccccccctaacactattgtattgttactgttgtatagtcatcgagatgtgttttctataattaatagaatatataaatatcgaagtctcaaatcaccaatgtccataagaaatatactatactctaaaacaaattaattatttttgcttttatttttaaacgtggaattttggatctctctcatgcttctctaaaagttggtgaagtcacgatatcaattacacaaacgttaaatatgttttaaaaaaaactaaacgtaataccacattttgatccagattcttacaaaattgatggaatattcaaatactgtttcggataagtatttaacggattacaacaaaaaacaaattctttccctctctgcttctttttttgctatacaggggggaaaacgaaaactatcaaatcacataattgattagagttttttttttgttttttcttcatttgttactttttgtttatttttgttttttttgtggttgttggaagttgaactcttaactaattaatcatacaaaattaacaatacacacatatatctctatggaagaaatggaaataagtatttaacattaataattagaacacttatatagtatcattttcaaatggtaaatacgtctataagatcaaactcacctaatgtttgtttgctacatcgctcagatgacaaattcatactggtgattgaaaagcaatcttgaactgcgaacaataaacatcaatcgataacggaatttccttgcattagcaaattaattataatgataaaatttatcagtgaatggccgatccaaaaagttaaatcaattatataaaaaaagaaaagaaaaaggaagagagttcgcaacatcaacaaagcaaagtcccgagaaaaacggtagctttgtggagacacaaaattaagatagttgcatgatcatgtgccacgcctacgctttctattccattccatctcattcacgcgttttattttctctcattcatattaattatatattaatcacacaatcctaataatatcccttaatctatgcctagaacatgcatggtattataattaatacattcgacaccactagaagccaaaagtatagtagtaaaaaaaagaagaagaagctggtttgtacgtaagaatgaaaataacggaatccaataacaatgtttgtaataaacggacaaagaatgtgaattattcacataaatgatctgtaaaatgtgagcatttgattataacggatataataaaacaaaaattgtaataaagagagaagagggcaaaacggggaacatgtcacgcggataggtgtgagagagtaaatgacgtaggttccgttatttaagaacccttctagagaggttcccacacaccagaagagagagaaagagacagagagaaaatg

SEQ ID NO: 11311 - DNA, 3000 bp, Unknown
  misc_feature (1)..( 3000): cDNA_ID_3039532_gDNA_ID_2214489_Annot_ID_183603 3000 nt of promoter + ATG
ttgagttcggtgggaagaatgggttagaggttgtgacgctcgttattcctctcgtcgtcggaccttttatatcttcgtcgttgccttcctccgtcttcatatctctcgccatgctctttggtacttaattctcatatctaataagttttttattttatttttctccatgattaaactaaagctgaaaattaataattttaaaaacttaaccactttgattacgtatacgttatatataggtattaatttttaaaactaaccaaaccttttatttctcaaataaagtaaagtaaattcatagtactagcctactagctagcttgtactctagtagtagttaaatggtttatggttggttcaccaagtatcttgggagatcatagctcgaattttctcaaaaaaaaaatttttgaacaaatgctcgaattttctcatttatacttttgttttaaatgaaaaaaatattctgctcaggcttagtagatttatgtttggacatagtggctattgaaaatgttagaattcgaaccaaaatatgtatattttatacgaaaaaacagaactaaaatcctaattactatacgtaactaataaaactcttttcttttgcttataacctacgtgcgtggaatttttgagttatttagaacgaattttgtgtgtgttaaactcgtgtaaacatgtgctaataatattcacaaatagtgttttgagtaataatcactattcactatagtaatattacgtttttttatgaaggaaattacaaggagaagtatttgtttgatacttacaatatggtgcatattgatgatgtggcaagggcgatgatatttctattagaaaagccagttgcaaaaggtagatatatttgttcgtcggtggagatgaagatcgatgaggtctttgagtttttgtctacgaaatttcctcagtttcagctaccttcaatagagtatgtcattttttactagtataattaatttcacgtgtaaatattctattgtttttttccaagagtttttattatgttctttttttgtgtgggtacgtaaagtttgaataaatataaagtagagaagaggatgggtctttcatcgaagaagctgaaaagtgccgggttcgaattcaagtatggagccgaggaaatattcagtggagctataaggagctgtcaagcaaggggatttctttaaattcttatgggatttttgtgttaaaatttgtatatgaattgaaaatatgttttttctttattggccatttccgttttgtaacatgttctagttacttgttgacgaaaaaaaaagaaagtgttttgattcagatttacaaagaaggtttgcttaaaaaaaaaggtttgccaaaaaaggaagagaaggttttagaaaaatgaaaagaataacgcccaccgtggggctcgaacccacgaccacaaggttaagagccttgcgctctaccaactgagctagacgggctttttgatttaactttcaatctactagatattctccacatatattttacatgtactttcagtattttaaaattcgcgaatcaaaacaagatttgaagtgaaatgtttagaaaagtgggtttatgcaaaacaattaatcatgtgctacatcaggcccttatgataaaaactaaataaatttccacctcgaacgaatatcatacattggaaaataatatagcatggttctgttttctgaacataagattcaaatagtattcaaatcaaaacaactagctgctactctcttactttttggtcttcaagtccaaaatccttaactaggcccagtaagcttgtccgtcatgacatgacaattttaacgtattgaaaaagaacgcttgcttacttctatcagcagcataattaactggatcaaaagagtaagcaagcctatgcaagatccatatcgactttatggaatgttaacaatccacagaacaaacatatcaaacaaagtgactgtgacattttctttggaatgcaaagccttaagtggtacctttcctgtataatgtaactgcggcttgctatggttatccacagatgtctttggataaagttttggaagacgaggttgttgaagatacaggggaatcacaagtctttaacttgcttaatccagaatttgtagactttgatacttgtttagatcctatcacaaacgaacttccaacttccggtgactgaaaaaaagatgcaagtacaaaactttatcaaataataacatagctagcaacatgtatactatttgagtttttttagagtttctaagccaatcagaaggctctatttcgtacccactcgcagaaagagcgcgttgagcgagtgagagcgattctgtgggtaaacccctttccaattcatgactttttttatcgacgcacatctctccaaattctccatcgcgtgactcttttagtttttttccacaaaactaaatgaaaccgaaccgaaatcagttttaatttcaaaaccaatgcaaaccaaaccgaatcagcaaatagtgtaaagcaacaattctggacagaaattttatcaacatctcaacaacgggaaaaagagaaaacaccacaactcaaaatcacaaatcatagaaaaatatccaaaaaaaatcacagtaacctttgattaaactttcaaattgcaaaaatctcagaatcaaagccaagaagaatcttgaataacaatctactgcttcaattaaacatgaaaaacattagaaaaagcttagttttactagttttagtaaaatttctcggcaacaaaatcaaaacagagatgaacacataaaaaaaaaactaaaacagaactgcatattcgataagaacaaagactatttgcaataattaaggtttatacatattagactcaccggttgaaatctaaaagcatgaagagctagctcttcgtgtttgcctccctttattatctttcttattttctcaactttgtgtgatttcaactcacaactaaaagtaatg

SEQ ID NO: 11312 - DNA, 3000 bp, Unknown
  misc_feature (1)..( 3000): cDNA_ID_2717255_gDNA_ID_2214489_Annot_ID_183602 3000 nt of promoter + ATG
acaagtgactctccttttccatgtcactaaatatttcaagagcttccatgtgatacttgttttgaacataaccagccatcatagaattatatgccacaacatctctatgaggcatttggtcaaacagagtcttagcgtgatgaacaaaacctaactttgcatacccatcaatcatggtagcccaagtaactacatctcttctcggcatcacatcgaataaacccttagcatcttcgattcttccgtgttttacatatccatctatcattgagttccacgaaatcaagtccttctcaggcatatcagcaaacagtttagacgctatgtcaactccatctgatgtctgagcataaccacttatcatagagttccaagatatcaaattcttcatctccataggcatcaaatcgaacaattcacgcgcggatacaatcaatccacatttgacatacccatcaatcatggaattataagaaacagagtctctcttcggcattctatcaaacatctggcgtgataaacctaaacaaccacatttcagatacaagccaatcaaacaattctgtagaaacaaatccgaccaaagtccagtttttttcaaaaacccatgaatctgcattcctccttttacaaaacctaacctcgaacacgctttaagaacaagtgacagtgagaatttgtccacggaaaccccattctcgagcatcaaacagagcaagagcagagcttgtctcggatcctttccatgagagtgagacttgatcacggcgttccataaaaatggatcctccacctctccaaatgaaaacgaacatacgtgatactcgtggaagacacaacgcgcgaaatcggcgagatacggacgtcgagaagaggcaaaagccagaacaatcctcgtagtgagatttgagtttttgatgattcccgtcttaatcaatcgcccgtggatttggttcacgtcatctgaagttttgcagcttccaaggacatgaatggtggatgaaatcgaacactccatggttgacttgaagacaagcatcagttattacgttcttctgttggagatgaaccggattgggtttattatcatcgttttaacggctatgtggaagtcgctgagcggatgagttaaacgccgtcgtttttgtatctgcctataaaagggctcttaaattaaggcccaataataaatattataagcccaatctcaatatctgtccaaagattttccaaacagcagtgaaactgaaacatttacccaaaacaaaatggaattaactattaagtcagactaacgttcgaatttaggcttatacagttatacttcaacacaaactagtagatcttaaattttaagttgattacattatgaccaacatgatctataggaaataatatatgtatagaaaagagaaaaactgatagtgataaataggatattgataagcaagtagttgataagcattgacttcctccataagtcatagtcaggatggagtggtacgacatatcgtacatttttctcatttatcaaattggttatagttatatattttatataattttaatgtatagttgccatttaaatatcgtgcgtctttaatataaaacgaaagcgctaatttgtcgtttactcaatcgttaatctaattaaatcatgtcaacgttagcttaagagtactttggtaggtatttggttcttctactatttcagcggccatggtacaggcatgtctcggcctaccaatgggtgttatttccttacacatttttgggctacactcatgcacaaatacatctctattgtatgcagttcgagtaaatttatctgtttagttattttttcgtgtaatctgatcaataaacaggttataagatgagaaatcaaatatatttgttaataaaaattttatacgaatattttacataaataatcggctaagttacttttactattttaaaagtctatgtgtgtgtctgattggcgaatataaacgagttattaaaaataaaggtaggaatgttgtacttttggttcatttaaaaaaaaaaaaatcattttcgctctatcttgaattttgattttaaactacgaaatgtatataaagatacatttttagtttttttaataaagatataaagatatattttcattgattaaactactaatatatacatccaacattcttatattatatatacttatatatgtaatttatagatattttgtcgcatatctgttagctttatatgttacgtgcagaataaacaaaactaggcggcgttaaattatgtttgtataggcttggtgtttcttatataacctttgattatagattcgttggttggcactatgaaagcgagtgtcaaagaaaaaagatagtatatgaatcgcgtcattaagttgaaataacaaaggctttaatcaaaagattgaaaatttagaaaagaaaaggaaaaaatcaaagattgaagctgaccatctcatgtaattattcaagttgtctcactaagtccacaatgtcagcaatcaaaaattatcctttgatctactacaggtatttttcacacgctagctacccttctgacgaaactgaaataagtaacaaaataaaaacattcaactgctatctattataacaaaaccaaatgattcaaatatgtaattcatgtctagataaattttactgtgtatatttatggatattggtttgcataggttgtgaaaagagcgtgggctaacgcaaatcgacgacataaattctcgaatttttattaggatggaattataaattagattttattgattgtaacaaagtgttttttataaaaaagaagatggtgaggctaaataaggagtaataaatggaagcaatgagaccaattgacacgttgttattagtgtaagcaaatgtcaacgcttcgtttgtccatttataaaacctaactacttcttcttcttcttcttcccaaatcatcaaactccatttcactttcact

SEQ ID NO: 11313 - DNA, 3000 bp, Unknown
  misc_feature (1)..( 3000): cDNA_ID_2717263_gDNA_ID_2214489_Annot_ID_183600 3000 nt of promoter + ATG
tgtaattttttctctaagaaatgtgatacatttgatgtataatattttatactaaatcgtattgattgaggtggaacattatggtctatcattagaaaccaatgaatcgagtgacgaactatacggaaatggcatacagttgtcaactatatgaagagttgaaattatttacacaataatcaaatacttatcttattttcatatgatgcttgacacaagcatataagtttttcacaaaagaatttgattaacaattattgttcttcacaaatttttgtatatttgtaatcatgagcttatatactgtcttctgttttctatcatggacactacttcgttttgtcttcccgtgttaggtgagacagaagaatttatttttttatatatttgaattctctgaatttgaaatatgatcttttcagctggtggaattttttgaagtggcgagcttatcattttctgaatatgacaaaaaaaagtcttatttactgtagttataaatagtttaactaattaacacaaatgcgaatcgaaaatttgatatatgtgacgacgaaacaactaaactagtacagtataatcatataattaaagatttgatgcatttgaaaatgtacgcgtttgatagcatatcataattaatttgcacgcctatatgacatatagcgtttggaccaattttagatgtaataaatcaaagaacacatcgaacacacataagttcgattttcaacgtctaaatttacgagaagcaaaacaaaattatgtataataataaaaagactaatattaccactcacaattagacacgatatatagcaaaacaagatacatagttttgctcaaaaacaaaacatggatgataatcagtaaaatgcggtgcctaccaagtaccaacatacaattataatgattattgataaatttttgaagtttttgtaacaatatacgaaacatcgtactcatgcattcaaacaaaaatgggacaggctgggttagataacgtgtgagggatggatttctctagagacgaagccaaatataaggcgtgactttaaatgatatcacactactgtttcatcttataacaaatcaaaagagatgaactagtgatgtaattctataaaatttaccacttagatgtactgtgtatcggctaattaattggtcataaactattactttcaaatgagttctacgtactattactatagtttaaaagtaaagtaaaatcatattcaatcaacttaggaactcaaattaatattgtctaattaacacaatgtcatcatcatatagagatttgactgcactaattaagttatcatggacactttctttctgaaaattctcattttctcactcaaataataatttcattctataaatagataatgaaatacacacacatctatcatccaccaaaaatatcatccaccactacccacgaagtaagaaaattacagagaaaacggaatatcttttaagtagaccttagccttttgctttattctcttgctttatgtctttcttgtttctgtaaattcacatgttacacttagaggagagcgaggtgttggtccattttaccttttgctatgatcagatatagaagatagcaaaaacattaactcaagacaagttcacatgtttgtaaaattttacgtaaatttgtttattaattgtgttagaaaaatgttcacatgttgctactattgacttgcctccatcatcttctttgtcccatttgatgtactcttagccccatgcctcttggatgccttttttaccttttaatttgttcttatataatataaaatattagctacccttttttttgttattcatggaacaattatttgcatcaaatatagtaatttaatggaataatatcaagaagatcccatttatctttgtaccttattctccatgtgaacatataaagcttgttatcaggttatttgtacatgtaatatctaagggtgtttactgatgatgatcggataaactcgaggtttgatttagtcaaatatagttcttttctaactaaaatcccaacctcacaattttgatgtttttcagtaaatatggtcattaataagttatgaattcgctaattaatagaaatttataagaaaacatatatccaacatttatggatatatgaaaagttaaaaacaaatgatataaaaagtacaattttatagctggtgcactgaaaaagaaacaacttttcttaccattaaatccagggagaatggtatcattttcaattttgaaaaaaagctaagattcgcctaactattattgttttcctctgaaaagactttaaaagtaatctttaccgtataaagtacagaaaatgaaatgaactcgtggacttcaatgttttcaattttcatgagtcttttgttttccttcaatttccaaataaacttatatatatatactaatcaatcaaaaacaatccactcaaaatgtgaaactatacatgtagaatacttgatgtaacatgaacaaacaatcaaaatattgtagttaaaaaaatttactgttgattttgatcagtaatatgtgtaattaaaaagtgataaaaagtcaagtggtttaaaattatcataagagtaacatatggactatggttcaaatactttcattgcaataacaattatgtatagttagctactatatgaatgtcttaatacattgcaataacttacattggagattagtctatatacatttatatattaaaaaattagagttgtgatctatatagttctctatgttatcattttacattttcatagttgaactaactttttattattattatgttcacgatatctatacttttgtggtttaagcttttcttagtattaacaatcaagaactactattttataaatacaatggacaagattttttcttcaaaaccacaagagagagtcattttcattttcttcctcatctctctctctctcttctctccaaccaaac

SEQ ID NO: 11314 - DNA, 3000 bp, Unknown
  misc_feature (1)..( 3000): cDNA_ID_3039536_gDNA_ID_2214489_Annot_ID_183598 3000 nt of promoter + ATG
tctgtctcacctaacacgggaagacaaaacgaagtagtgtccatgatagaaaacagaagacagtatataagctcatgattacaaatatacaaaaatttgtgaagaacaataattgttaatcaaattcttttgtgaaaaacttatatgcttgtgtcaagcatcatatgaaaataagataagtatttgattattgtgtaaataatttcaactcttcatatagttgacaactgtatgccatttccgtatagttcgtcactcgattcattggtttctaatgatagaccataatgttccacctcaatcaatacgatttagtataaaatattatacatcaaatgtatcacatttcttagagaaaaaattacaaggtcttttcatgtgctttatttatttatattgaattgactaggaaacagtataagaaaaaaatgatatgaaatgtctgcatcacagaaaccgagttttgttggagaccacaagaaaccaagcaagtcgaagacaaagattgaagtataaagttttaaaagcatacactaattaactagtgctattatattcattctatgcctaaaagtaaatgttgcaaacatatcacgtgaccaagacaaatgtgcactttaaattaattaacaataatctcatcgacaatacatatctttacaagttttctcttttgttttcacggttctcactcttatattcttgcgtttctctatatatttttttttttggataccatgtttgtaccattcttttccttgaaattcggtcattatgatacaatcaaagaataataatacattaaagatttaaaggtactgataactgcagcttaaaagactaaatccaactttaagcatatgcataattacaacttttcagacgaaacctgcaaaggaaaagatctttcattgctcttaatattcctttcgtatagttgggccttgaacgctttttttttttttttaacatggaggggtttggggccttgggctttagggccttaaattatttaagaaccataaaacgctttttattaacagttgatttatttctgcacttctcatgtctttgggcaaaggaaacaacataatcttgaaagttttcataaattgtcatatgtgcaattgaaaacactgagacaacattacataatcaaggttcagaagaatcctcacaatcattgtcataggatcctgtcaatcttcgcatgatgttgaattatatgaatcagaaaggtatggattgccgatcaggccaagactcgatcttctggaagtaatcgacaggcaatacaccatcaatgccttcagtcaaaatcactttgttgtctgatatgtagaacgcaatcccatctgggtgcaccaataaagtggaattttaatattgaatctttcaagggcatatcactattttttcagacaagttattaagttctcataccttcaagagctttcttgatgtcgaggaagatgataacatttacatttcttctcatgccttagccaaattatgtcgatatggaaaatcagataaatatgcatatgaaataatgtctgaccaacaacaataggattaatcaaatattaccactaatcacttcaccatctgttggtaatccacaagagaagtgaacatgcattctattcatacgctttaagcccgatgctaagatggattccaaattcttcctataagttccatgtacacacactgccattacagaaattcaaatgaactcgagtaacacataacaataacataattttacaagtatgtgtcctagtagtacctggagcttcttctggtgacagtattggtttaagtaacttctctgactcaaccgtctgcgcacaaagacataagctaaagctattgatcaaaactaggagaacaaaaatccaatcatagtgctactgtgtctcaacgaagaagaaaacagccaaatgctaaggattcattgttcaagttctattaccgtgatcgaatggccttggttagcgcgaatcaagagctctccattctcatcgatgagactaaaccgttgcttattgtcccttctcacagcctgcaagttaacgaaaaccatacacaaactcatctcaaaaacgtctccaatcgaaaatgctcgttgacaaaaacaagtgaaaaaaatgaaactaacctctctaatttcatcaatcgtgtgtgactttaactgaatatttgcagaagttttcaaattcaggttaagtaaatcttcaactttaacaaaaccatcacctctcatgttcaatctcagctcagtagccatatgtcgcaatattctcgtcctgattatcaatccattatagattcaaaattcaagctaattctctaacatctagaatccagtattgatcgattacacttacaagagtcgtccaagtgcatcgattctatcctttccgcctccaccgtcgccacgaccctgaggtctccgtcgatcgttatctctctcatatcctcctcctctaccaccgctaaatccatcaaaatcaaacaccaaaccttacatgaaaaaacgagggaaaatcaaaagggattttgacttttcgaataatttgaaaaattagaattcaccttcgactggactgagcgaaggaagagacattagattttctagaagaattgggatttgaagcatccatgaaagcagaagaaacaggagacgatttcgagaagaagacagagctgctcaaagtcagaggaagaggaagtcgatgacgacagagacgcagcaacattatgtattcgccaacttaggaatcgatatacattatgtactgggcctttctattataaagcccactcagataagtgaatgacgagacggcatgatattcgatgacagttcaaataaacgtcacgtagtttgggttcttcccggtttagtttttttcaggcggtcagtagtcagtcctcctccgcggattcgtttgatcggcgattgcgttgaaggttgaaaatacgatattaatg

SEQ ID NO: 11315 - DNA, 3000 bp, Unknown
  misc_feature (1)..( 3000): cDNA_ID_3039543_gDNA_ID_2214489_Annot_ID_183595 3000 nt of promoter + ATG
ggttgggagaaggcacttcctgtaagtagaactttctggtaatctataacgttttatcagtattcttcatatataaggctcttattttaggcaacttaaaattttcatttagacatatacaccagactctccgggtgatgccaccagaaacctgtctcagcaatgtcttaacgcacttgcgaaagctgtgcctggttttcttggtgggagtgctgaccttgcatcttccaacatgacaatgcttaaagcattcggcaacttccaaaaagccacacctgaagaaagaaaccttagatttggtgtcagggaacatggtatgggagctatctgcaacggcattgcccttcacagccccggttttatcccttactgcgcaactttctttgtgtttactgactatatgagagctgcaatgagaatctcggctttgtctgaagctggtgttatatacgttatgacccatgactccattggtcttggagaagatggaccaacccaccaacccatcgaacacttatccagtttccgtgccatgcccaatattatgatgttccgtccagctgatgggaacgaaacagccggtgcatacaaaatcgctgtcacaaaacgtaagacaccttctgtcttagccttatctagacaaaagctgcctcaacttccaggaacatctattgagagcgtcgagaaaggtggatacaccatttctgacaactcaaccggtaacaaacccgatgtgatcttgatcggaactggatcagagctagagattgctgctcaagctgcagagaagttaagggaacaaggcaaaagtgtgagagttgtttcctttgtatgttgggagcttttcgacgagcaatcagatgcatacaaggaaagtgttttgccatctgatgtatcagctagagttagtatcgaagctggatcgacttttggatggggaaagatcgtcggaggaaaagggaaatcgattggaattgatacgtttggagcaagtgcaccagcaggaaagctttataaagagtttggtatcaccattgaagctatggttgaagcagccaagtcacttatttaaaaaagtatcttacaggtactaccgaggtttgcatttgaagtaagagacattccataagcattatcttctttgtccaaataaaaatatactccttccaatctttttataaatgatgtttaaagctttcattttggtttttaaataaatgatgttttaaattttcaatgcaaaattatttttattggttgattaaataaatgatgttttaggcttttatttatatttttattgttttcttgtaattaacatagttttgatctttgtaaacaacaactctattgtacttttattcttgattagttgattttatttcgcaaagacatgtaatccttacatgttaattgcaatcgtctcaactagtcttacatctactttgtagtctaattggttgacacaaaaggaatttacggaattctgtctagaatctttccatttttgcttacaaatatggcacaaccggaaattcccttacttatttatggaaaaacaaaagtgtcatgtgttatatatattggtccctttttatgtttgtagggctatcactaccaatccacaatggaagattcacaaccgtgtacatcacgtaacctagatcatgccgaaaactccacagcaagcattcctcttaaactcatcttcgaaatactatcgaggctttcgacgaaatttatcatcagattccgatccgtgtcgatgctgtgacgctctatcatcgatagtaaagatttcgtcgacgcctttctgaatcctcttttttcaatgaagactctttttttagtccgctttatggaataatacttatgttttaacgtaatgaatctttatatctatttgtatttttcagttacacttttgtttggacgttttgttttcaaagaacttctcaagttttcttttccttttttcttcttgtagtttgccttgctcgttggtgaatacactacattaattgagggcacttgcgattatgatgttctcccgcgtgaaagagcattgacctctcttttattcaaaacatcacataacagagagtctgtgaggtttgggacatcgcattctcaaatctcaatataagtggttttggtcgaatgctagaaaagggtgacttgtatgttgtgtcgccgctagtgttcgtacatacagtttatgatctaacgtatctataacatattattaatagatattattttgttttaattttgcacattgtttataaattaagtgcaaaaatttttagctccaagagatcgcctttgctaatcaataaaattgaacgcatttaataaaattgtaagagcaaactcgcactgatacgtagaataaatttgttgcttttgccttcacgacaccattacctatagttaatactccaaaagaaatagcagattcaacatacaacgtgcaagaccaaaaaacaaatgactcgtaatctccagagaatcataattcataacatgggagattgtccacaaaaaacataaattccctttcatgtctttttgttagaaaacccatttcttaaggcccaacaaaaaacataatcccctttcatgtctttttgttagaaaccccatttatctttcttgaggcccaatttgaaaacccacattttctttcacctaacccaccaaagcctttgcacatgttgacgtgaacaccaaactaacacgtgtcatactgccagtggttatgataaatgctcataccataccagagtcatagagtttttggttggtgaaagatttgacggatgccttcttctcatttctcaccaactccctccaaacccaacaaaagtgtttatattagcaaagccgccaaagtgtaaacgaaagtttataaatttcatttctgtgatcttacgtaattggaggaagatcaaaattttcaatccccattcttcgattgcttcaattgaagtttctccg

SEQ ID NO: 11316 - DNA, 3000 bp, Unknown
  misc_feature (1)..( 3000): cDNA_ID_2706252_gDNA_ID_2214489_Annot_ID_183594 3000 nt of promoter + ATG
tcaagaagatgtggagaagaccaatcgattgtcacagagtctgttctgctaaggagttttcaaatggatttgaagaaaaatggcaggcttcattgttttaaggttgttggtctcaaatccatttgtatctttgcccattttgggctttaaatgaaaagttgttcgacgaaaaaaaaagggaaaaaaattaaaaaaacgtaaaaaaagttgcaaatatggatcgaactcacgacattagtaaaatttagatgtcgttgaaccactagactactgagaattatacgatttttaatccaatagtttttaaatattgattcaacgatagggagttaaaagactttcatcgttatatatgtggcgccaacaatgatttcatttgggcggcgtaaatcgccggcgattgaagaaacttcactcgcgacttcagtcatggaggcatggaggttaccgttatcgccttcgattagaggaaaactgatatcggccggttatacttgtctgtcttcgattgcttccgtctcttcttctgatctcgctcgaggtaaatttctgctttaccctaatcttagaagattagaatctgttgctcgtttttctctgattagcacagacagtacacctcaattgattagtccttgggttgataattagggttctatttagtctcttgtttaaggcttatttctggaataattctatatatgtgtgtgtgtgtgttttgagtcatctttgatatcgttggtgtgtgagtagatgcaaatatcacagaggaggaagcatttgagattttgaagctggctaatcaaagttgttgcaatggaagccgttcactcataaatggtaacttgatgaactcctccttggagctatgttggtggtttttctccttcttaaatggttcactcaaggattctctttatgaaattttgtgactaaacaaaggagcaaagaacgcttgggatatgcttcacgaggaggagtctttgccgcgtattactacatcttgctctgatcttgataacattttgggcggtggaattagctgtagggatgttacagagattggtatgtcatctccattatcattctttctctggtccaatttgagatcattaagtgatttagtggtttgcttattttctcaaaggtggggtaccagggattggcaagactcagattgggtaaatccgcttcactgctttcctctactttctcatcatcatcagagtgtttcctcttctgttaacttcgatctggtttcaggatccagctctctgtgaatgttcagattccacgtgagtgtggtggtcttggagggaaagctatatatatcggtatgtttcttttagtagtgatgactaatgccttggttgatcacttacttggttgttaatgctttttgtatgctacagatacagaaggtagcttcatggtggagcgtgctttacagatagcagaagcttgtgtagaggacatggaagaatacacaggatacatgcataaacattttcaagcaaatcaagtacaaatgaaaccagaagatatcttagagaacatattctacttccgtgtctgcagttacaccgagcaaatcgcattggtcaatcatcttgaaaagttcatctctgaaaacaaagatgtaggtataataattttgaagttccatcccgttgatttgctgctacaagtgtatattgtgacataattcggcggctcactaagactctctttaatctttcatggttgcaggttaaagttgtaatcgtagacagtatcacctttcatttccgtcaggactatgatgacttagcccagaggacacgagtgctcagcgaaatggctttaaagttcatgaagcttgccaaaaagttctcacttgcggtaagaagaaatgatctaattcacaatacaatccttgactagcttaagtggaggttcctaatcaactcttatgatccaatctcaggtcgtgttactaaaccaggtgaccacaaagtttagtgaaggctcgtttcaactagcgcttgctttaggtgagccaaactcaaatctaccatctcagtttgctattatcatcatcatcattcatttgttatgatacttaaatggtcaacttgtgctgttttcaggcgatagctggtctcattcgtgcaccaaccgagtcattctgtattggaatggtgatgagcgttacgcatatatcgataagtccccttcacttccttcagcttcggcttcatacactgtaaccagtagaggtctaagaaactcatcctcgagtagcaagcgagtcaagatgatgtaatgacacaccacgacacagtcacaaggacatgagtaagctttctccggtttagttttggttcagttcttgattccattaaactgcatgagtttttttcggcccaattgtttcataaagcccaaatgggcaaatattcggtacaaaagaaggtcataagaaggcccactaattgcaaacataacaagaaaaaatgagcaaaataaagacacgtgctatgcaacgtgggatgttgagagaaaaaaaggtttcgtcagctacgccgtcaccgactgggtcaataccggagttggtgaattggtgactaaaatgtatttcctaaatctaaagcaattttgcccccaaaaaaaaaaaaaatctaaagtaattaggttcttcaccaacccttgtcataaccatggcttttgcttaacacaccaaccatgccgcattgtcaatctattttttacttaaattaaattattattttaataattagcgtaaaaagcaatgattagttgaaaattaaacaaaagaattagattcgaaaaattgttaaagccatagagcatcacagccgtcaagattgtgtcctttctgaatccaacggtcagatcgagatctcattggtttattaatagcaacagtctcctaaaataggtttgcagagaagctttctcttctattttctctctctcagttaaccagagagagcatca

SEQ ID NO: 11317 - DNA, 3000 bp, Unknown
  misc_feature (1)..( 3000): cDNA_ID_3039547_gDNA_ID_2214489_Annot_ID_183593 3000 nt of promoter + ATG
agttttgtctgagaaagcctttcacttttaaaaatttctatcctttatatgattcgttaagtttcacctgttctgatctcggaattggcaacattaaggcagaattgcttgtccaatatggaggcgtcgctcctaaacaggctgaagaagcacactcccgagttatcgataaggtaatatagactattcatcgttacaaagcattgcatgactcgataactctcaagtatctagattcagtctttgttcacaattggtccagattcttcattttgccctgagatgtgcatatttttaggccggtggggtttaatgctaacggcacacaaaaatgttgattcatcggttgcaggttgtgcaagacgcgcttgataaagccaatttgaccgagaaggatctctctgctgttgctgttaccattggacctggtttgagcctctgtctacgtggtaagttggagaaataagaatccactcattgtactttggaatgatgagtgttgttagagtacttagacacaagtgtttattttgagttatacagttggtgtgcgcaaggctagaagagttgctggtaacttcagtctcccaatcgttggggtgcatcacatggaggctcatgctctcgttgctaggtattgcttaatctgctcgcgttatggttttgttcccattttttgagatttgtgactggctcatcagcgtctgatttgtctatgtagattagtggaacaagaattaagcttccctttcatggcattgcttatatcaggtattgcaaaatcagttaagtttaatgtaagtgagaaactatcatcttagtgaagttattcttaagcaaaatcagtttcaccgtagggattaggtttctatctaaactgaaacgccccttttctttttttctatttaggagggcacaatcttctagttcttgcgcataagcttggtcagtacacacaacttgggactacagtagatgatgctataggtgaggcatttgacaagacagctaaatggctcggcctcgatatgcacaggagtggtggaccagctgttgaagaacttgctctggagggtgatgcaaagtctgttaagtttaatgtaagtgacaaactagttgctggttggttagatatcttttttcatgttctactcaatgttcacatcatttctgtgatattgtttaccatgtttatcaggttccaatgaaatatcataaagattgcaacttttcttatgctggtttgaagacacaagtgaggctagccattgaagccaaagaaatgtaaaatagtgagatcttataatcagcttcggaaattgtttatcagcgttgtgtcacatatgctgaagctttgtgttacaaaaatattggtcgtttgctggatgtgcagtgatgctaaatgtcccgtctcttctgcaacaaacgaagacagaagaaaccgtgctgatattgccgcttctttccaggtacaaatttatctccggttttaatgttctagtgaaatgctgatttctaaacattttcagtttgtatgaaccagcgagtagctgtcttgcatctggaagaaaaatgtgagcgagcaatagactgggcattagaactagagccttctattaaacatatggtgaggtttagaacaagaaaaagaaacctctgttttgcttgacaaatgcttctagactaatattgactaagcttcaggtaatctctggtggtgttgcttcaaacaagtatgtacgactccgacttaataacattgtcgaaaacaaaaacctgaaacttgtttgccctcctcctagcctctgcacagacaatggtaaatagagtttgaaattctcctactgatcaaattagagacacagagaatagaaactaacaagtattcattagtctcaccaggagtaatggtggcttggactggtctcgagcattttcgtgtaggaagatatgatccacctccacctgcaactgaacctgaggattatgtggtactttttcttaacaaaactcggtacttgtaaagattctattgtttgaaaaactgataacttggagattgatgttttgttggttatgaatttagtatgatcttcgaccgaggtggcctcttggcgaggagtatgcgaaaggaagaagcgaagctcgttctatgagaactgcacggatccatccgtcacttacttcaatcattagagcagattctcttcaacaacaaacacaaacgtagcaagaagattgtctcctgtaacttaaaaccagatatccaaatccttgtattcttttcactgaggaacaaacgcttttccggttaatttaatttcgttcaatcattggtcccggttaacctaaaccgtgtctggttcattatactttttagtttattcctagttccaacattaaatggcgccaacattgaggagaaaaaaagaagcttgcagagatcaatttttctctaaagattcagtggccgtgaggaattctttcagcttcaacatatgctctaatcttctcaggcagggagtaatgatgcctttgctcgtccatggaaagtcatgggacgtcttttatcgataaatcggttgtggagcggagtgttctgtagcttcgaggcggtcagagatggatttccggtcaagaagatgtggagaagaccaatcgattgtcacagagtctgttctgctaaggagttttcaaatggatttgaagaaaaatggcaggcttcattgttttaaggttgttggtctcaaatccatttgtatctttgcccattttgggctttaaatgaaaagttgttcgacgaaaaaaaaagggaaaaaaattaaaaaaacgtaaaaaaagttgcaaatatggatcgaactcacgacattagtaaaatttagatgtcgttgaaccactagactactgagaattatacgatttttaatccaatagtttttaaatattgattcaacgatagggagttaaaagactttcatcgttatatatgtggcgccaaca

SEQ ID NO: 11318 - DNA, 3000 bp, Unknown; identical to SEQ ID NO: 11307
  misc_feature (1)..( 3000): cDNA_ID_3039555_gDNA_ID_2214489_Annot_ID_183590 3000 nt of promoter + ATG

SEQ ID NO: 11319 - DNA, 3000 bp, Unknown; identical to SEQ ID NO: 11306
  misc_feature (1)..( 3000): cDNA_ID_2717251_gDNA_ID_2214489_Annot_ID_183586 3000 nt of promoter + ATG

SEQ ID NO: 11320 - DNA, 3000 bp, Unknown
  misc_feature (1)..( 3000): cDNA_ID_3039566_gDNA_ID_2214489_Annot_ID_183583 3000 nt of promoter + ATG
tcatcagcatgcaagcttgctgggtcgagtgtatccggttgtatcctgaacgttggatccgggttttgcgaaagatccatcttgagactcgtctcccgattctaaaccctatgatcttcctcatcttcttatagctaactttaaaaaacagtttttgtcacaaaactacactttttgagagatctgagaggaaatagagattaagagagtgagacgagacatggactaacgagtcaaataaagagtgattcatttgaacgagaataaataaatatatcaatcttttttacattttcttgattttctctataagaaagaaaaaaaaaaagacaatttctagggaaaacacaaattcgaaaatgatgtgaacggacaaagaagaaatgctttcgatgtatataaagtataaacgttaaagaagaagagatcaagagaagaatgagtgaaagacaagaggtctttaaaggagtttatatggagtctaaataaatgaacggttagatgaagactaaggtctatgaccgttggattagattaaaactgccatatttctcttgcttggcagatagtccaaacccgaagaatctacattaaatatgacacgtcccattaacctttagcctacatttatcattatcactgaaacgttttgatgggttatcaatcacaaattcacaatacgaaaaaaaacagtagtgtcaaactattatggtattttagcgtgtaattcgttacgcagatattattatctatggttgattttgaatctgaaaatatgatctatcgaagaaaggcctgaaattattttattatctgaatatgttttgtcggagcttacatgcttagcatgtttgaacttcgaagatgaagacaactatgccaccacacgtgtgctggccaagtgggacaaagttttgaacctattcggtaacactcacacgagatcaaatccccaccatctcattttataatgtcgtttatttatttgttagtgatcatctactgttttttaataaggttagtgccctagtgatcatctacttgtctgtgattttgtaaaaaatatatatagaattaaaattatattacgagaacaaaatgtgtacggtgtgtcctctagttgcgttacttgtgtacgttgatgatggttgatatatatacatattcatatcaggacaaaaaagcttttaaaaagaccaataaagatagatctagttttgagtaattggaggattcactaagctttttggagctaaaatggtgaatttcccacgaatcaaatctgagaagagaagctttctatattttgagttactttacacaattacacgttcatttgtaaattaagatcgtgtttgtgctgcatccaaaaaattcttggaattttaaagtaatgaaatataactaaacaaaatgaccactaaaaaataaaataaaaagcacatgagagatgagtgattatactctgataaattagctaacaaaattatgtatatataaaaaaggttttatgcagtgtaaattgtacttacacacttaatcaaagcaaaacaaaaatattaaaccgacaataatacgtaaaccaaaaaaccaatattccttaaaatcaatttgtgtttccaaccgacaagttctttgtatatatggttaatcatattttgttgtagtccgtatcctagctaaaagacgtttaaacgttcataatggatatgacccacccagctggtgaagatattcgtttttcgtgatcatatatatatgtttctttttgcccatccctgtttctattaacccaagttaaattagctatatatgagcaaaaactatgagttgaagttaagcacaatttccgaatcacaaaaaaaaaacaaattgatttggacctttcgataataggaatcagaaagaagtttgttccaaacacttctcttatataaatcccaactcatcagcttcgtgtttccgtacagtgcgtacatatacgaacgtgtcactcggcttttaacgtcaacttaatcgagagcccaattcaggcttactataagccttaataagcccaatattaaaagtccctgattattgtgagcccaatattaaaagtccatgactatggtgagcccaataataaaagtccatgactatggtgagcccaataataaaagtccttgattaaaaggcccatcaccagtggagcgaagaagcggaggagggaagagggatgcgatcctctcgtcatcgctggttccatcagtttcagtgagaatcagatcgtcgttgtactgagagctccggcattggttcacggcggagctggagagttatctaagaacggagaggttactgatctgaattgttgaagatcggaaaatgacagaatcgagtctggatctgcaggaatctggttgggaagaacttaggcgggaagctcgtaaaattgaaggagatctagacgttaagctctcttcttacgctaagctaggcgccaggtttactcaaggcggttcgttcttcttcctttccgcttgatcatgctatctgtgtctttctttgttatttccattgctttgaatgttgctgttatgtctactatctgaatgtgggggttagtagtctgtaatgtgatatagatctaggaatcaatgttggatatgatctcttcaccgaattgaatttgatcgccattgtttgctcagtctatgttatgcttccccaatgcttaattcatgtgtggtgtttggtagagtaaagttaaaattggtaatgtttctctcagattcctgtcaaaattatttttctgtgaatgactaaggtaagaagaatttttgtgtgttaagcttactgttttgcattagctttcagtttttaagaattgcattgttgtatgtatcagatactgatcttgttatgaattatgagaaagtattgaaatgtgttttggtttcagggtatgttgacactgggtctccaaccgttggatcggggagatcatggaagtctatg

SEQ ID NO: 11321 - DNA, 2490 bp, Unknown; identical to SEQ ID NO: 11304
  misc_feature (1)..( 2490): cDNA_ID_1807075_gDNA_ID_2214489_Annot_ID_183580 3000 nt of promoter + ATG

SEQ ID NO: 11322 - DNA, 3000 bp, Unknown; identical to SEQ ID NO: 11317
  misc_feature (1)..( 3000): cDNA_ID_2717275_gDNA_ID_2214489_Annot_ID_133421 3000 nt of promoter + ATG

SEQ ID NO: 11323 - DNA, 3000 bp, Unknown; identical to SEQ ID NO: 11316
  misc_feature (1)..( 3000): cDNA_ID_2706252_gDNA_ID_2214489_Annot_ID_133422 3000 nt of promoter + ATG

SEQ ID NO: 11324 - DNA, 3000 bp, Unknown; identical to SEQ ID NO: 11315
  misc_feature (1)..( 3000): cDNA_ID_3039543_gDNA_ID_2214489_Annot_ID_133423 3000 nt of promoter + ATG

SEQ ID NO: 11325 - DNA, 3000 bp, Unknown; identical to SEQ ID NO: 11313
  misc_feature (1)..( 3000): cDNA_ID_2717263_gDNA_ID_2214489_Annot_ID_133427 3000 nt of promoter + ATG

SEQ ID NO: 11326 - DNA, 3000 bp, Unknown; identical to SEQ ID NO: 11312
  misc_feature (1)..( 3000): cDNA_ID_2717255_gDNA_ID_2214489_Annot_ID_133429 3000 nt of promoter + ATG

SEQ ID NO: 11327 - DNA, 3000 bp, Unknown
  misc_feature (1)..( 3000): cDNA_ID_2706256_gDNA_ID_2214489_Annot_ID_133430 3000 nt of promoter + ATG
ttgttgacgaaaaaaaaagaaagtgttttgattcagatttacaaagaaggtttgcttaaaaaaaaaggtttgccaaaaaaggaagagaaggttttagaaaaatgaaaagaataacgcccaccgtggggctcgaacccacgaccacaaggttaagagccttgcgctctaccaactgagctagacgggctttttgatttaactttcaatctactagatattctccacatatattttacatgtactttcagtattttaaaattcgcgaatcaaaacaagatttgaagtgaaatgtttagaaaagtgggtttatgcaaaacaattaatcatgtgctacatcaggcccttatgataaaaactaaataaatttccacctcgaacgaatatcatacattggaaaataatatagcatggttctgttttctgaacataagattcaaatagtattcaaatcaaaacaactagctgctactctcttactttttggtcttcaagtccaaaatccttaactaggcccagtaagcttgtccgtcatgacatgacaattttaacgtattgaaaaagaacgcttgcttacttctatcagcagcataattaactggatcaaaagagtaagcaagcctatgcaagatccatatcgactttatggaatgttaacaatccacagaacaaacatatcaaacaaagtgactgtgacattttctttggaatgcaaagccttaagtggtacctttcctgtataatgtaactgcggcttgctatggttatccacagatgtctttggataaagttttggaagacgaggttgttgaagatacaggggaatcacaagtctttaacttgcttaatccagaatttgtagactttgatacttgtttagatcctatcacaaacgaacttccaacttccggtgactgaaaaaaagatgcaagtacaaaactttatcaaataataacatagctagcaacatgtatactatttgagtttttttagagtttctaagccaatcagaaggctctatttcgtacccactcgcagaaagagcgcgttgagcgagtgagagcgattctgtgggtaaacccctttccaattcatgactttttttatcgacgcacatctctccaaattctccatcgcgtgactcttttagtttttttccacaaaactaaatgaaaccgaaccgaaatcagttttaatttcaaaaccaatgcaaaccaaaccgaatcagcaaatagtgtaaagcaacaattctggacagaaattttatcaacatctcaacaacgggaaaaagagaaaacaccacaactcaaaatcacaaatcatagaaaaatatccaaaaaaaatcacagtaacctttgattaaactttcaaattgcaaaaatctcagaatcaaagccaagaagaatcttgaataacaatctactgcttcaattaaacatgaaaaacattagaaaaagcttagttttactagttttagtaaaatttctcggcaacaaaatcaaaacagagatgaacacataaaaaaaaaactaaaacagaactgcatattcgataagaacaaagactatttgcaataattaaggtttatacatattagactcaccggttgaaatctaaaagcatgaagagctagctcttcgtgtttgcctccctttattatctttcttattttctcaactttgtgtgatttcaactcacaactaaaagtaatggggtacattaagaatatttagattttaaggggttgaagttgtaattttgaagaagtggaagatcaatagaaaataatagaagaacagagacgacgaaacctgccggggaactgaggagagaaaaaaccccggcgaaaaagggaaattcgaattcgtcttctgttgatcatcgcttcacttctgcttccaggtcttcatcggaaccaatctcactttcactctctaatttctaaattgaaaatcgatcttatcaattgtgtgtttgtgttttgttgcagagcttttactcagaagaagctcgatgatctcaaatctctctttgtttccctcgcttccaagtctcacagcaatgaccaatacgtctcgtaccctgttttccaggttttgaccaaaaaaaaaaattgtgttctgttctcatctggtttttgtggttgataattttgaattaagccttacacgatgtgtcggatttcgattttcacaggagtattttggtctgagtggttctttaggagaaaggatctttgatatggttactcaacacaggaaagatgataaaatgacttttgaagatcttgttattgctaaaatgacttttgaagatcttgttattgctaaggtacacacttaagtcttttcatcctcttaatcattggtttcttcttctgagcttttgaagatcttaaaatgcagagttcaattttgtaatctccatatgaaaagtgattgtagttataaatgtagaaccagtctcacgttgaatagaatccttcctcaggttaagtcactgatttttctgaaaagtctattcctttttgttaaaaccctggtttcaatgcttgccattggaatttttgtggtaaaataaagaaaattcgcaaggatgaagaatgatgaagaagcttctaggttatggtaacatgacacgtgtatcaatctcagacgtccttttttgttataattgaggttatataaaatcagagtgatgttattttgtcttttgaattaagagtactctgcctctggaatttctgggttcttctcggattctctcaaaggtactctcttttcttagctcttgttcgaactcttcgattatcttatagaacgataggttatatactctatttgaaaatcatctattagagatagagatttggtgaagtttgtattcaatttaggttcttcatagagatttttgcttgatgagtatagagaagagtttctgagatcatgatactatagtttatgcaaaaagattgcagaggtaaaaagaggaattaggaaaatg

SEQ ID NO: 11328 - DNA, 3000 bp, Unknown
  misc_feature (1)..( 3000): cDNA_ID_3039528_gDNA_ID_2214489_Annot_ID_133431 3000 nt of promoter + ATG
ttgcttcttggctcatcatgcgtctccttcaacgtggctactccgttcgggccacggttcgaaccaactcaggttcgagttaattaacttcactttctctttacttatacactttgaatcatcatcactgattaagcaaatgccaataaaattattgttgtcatatatggctgattggtccgttttaacataaagtacataaatagaaagatagattatagttttttttttatatatagagagagataacatttaaagttgatttttggatcgacaattaaaaatatatatatttttatggatgtgaaaaatttattgtacttggctggaattatctgtcagtttgtaggatcttgaagcttcatagctatgtaaatatgtcatgtttccatgcatcttctatagaaagtcaaccatatattttatgatcaataactaataagtaatcacggaccataagatataaatgaagttaataattcataagtttgtttattttatgcatattacagaagggaataagaaagatataagctacctaaccgagctaccatttgcatcggagaggcttcaaatattcaccgccgatctcaacgaaccggagagcttcaaaccggcaatcgaaggatgcaaagccgtattccacgtggcacatcctatggacccaaacagcaacgaaacagaagagaccgttacgaaacgtactgtgcaaggtctcatggggatactaaagtcgtgtttggacgctaaaaccgtgaaacgttttttctacacgtcaagcgccgtgactgttttctatagcggtggaaacggcggtggaggaggcgaagtagacgagagcgtttggagcgacgtcgaggtgtttaggaatcaaaaggagaagagggtgagtagctcttacgtcgtgtcgaaaatggcggcggagacggcggcgcttgagttcggtgggaagaatgggttagaggttgtgacgctcgttattcctctcgtcgtcggaccttttatatcttcgtcgttgccttcctccgtcttcatatctctcgccatgctctttggtacttaattctcatatctaataagttttttattttatttttctccatgattaaactaaagctgaaaattaataattttaaaaacttaaccactttgattacgtatacgttatatataggtattaatttttaaaactaaccaaaccttttatttctcaaataaagtaaagtaaattcatagtactagcctactagctagcttgtactctagtagtagttaaatggtttatggttggttcaccaagtatcttgggagatcatagctcgaattttctcaaaaaaaaaatttttgaacaaatgctcgaattttctcatttatacttttgttttaaatgaaaaaaatattctgctcaggcttagtagatttatgtttggacatagtggctattgaaaatgttagaattcgaaccaaaatatgtatattttatacgaaaaaacagaactaaaatcctaattactatacgtaactaataaaactcttttcttttgcttataacctacgtgcgtggaatttttgagttatttagaacgaattttgtgtgtgttaaactcgtgtaaacatgtgctaataatattcacaaatagtgttttgagtaataatcactattcactatagtaatattacgtttttttatgaaggaaattacaaggagaagtatttgtttgatacttacaatatggtgcatattgatgatgtggcaagggcgatgatatttctattagaaaagccagttgcaaaaggtagatatatttgttcgtcggtggagatgaagatcgatgaggtctttgagtttttgtctacgaaatttcctcagtttcagctaccttcaatagagtatgtcattttttactagtataattaatttcacgtgtaaatattctattgtttttttccaagagtttttattatgttctttttttgtgtgggtacgtaaagtttgaataaatataaagtagagaagaggatgggtctttcatcgaagaagctgaaaagtgccgggttcgaattcaagtatggagccgaggaaatattcagtggagctataaggagctgtcaagcaaggggatttctttaaattcttatgggatttttgtgttaaaatttgtatatgaattgaaaatatgttttttctttattggccatttccgttttgtaacatgttctagttacttgttgacgaaaaaaaaagaaagtgttttgattcagatttacaaagaaggtttgcttaaaaaaaaaggtttgccaaaaaaggaagagaaggttttagaaaaatgaaaagaataacgcccaccgtggggctcgaacccacgaccacaaggttaagagccttgcgctctaccaactgagctagacgggctttttgatttaactttcaatctactagatattctccacatatattttacatgtactttcagtattttaaaattcgcgaatcaaaacaagatttgaagtgaaatgtttagaaaagtgggtttatgcaaaacaattaatcatgtgctacatcaggcccttatgataaaaactaaataaatttccacctcgaacgaatatcatacattggaaaataatatagcatggttctgttttctgaacataagattcaaatagtattcaaatcaaaacaactagctgctactctcttactttttggtcttcaagtccaaaatccttaactaggcccagtaagcttgtccgtcatgacatgacaattttaacgtattgaaaaagaacgcttgcttacttctatcagcagcataattaactggatcaaaagagtaagcaagcctatgcaagatccatatcgactttatggaatgttaacaatccacagaacaaacatatcaaacaaagtgactgtgacattttctttggaatgcaaagccttaagtggtacctttcctgtataatgtaactgcggcttgctatggttatccacagatg

SEQ ID NO: 11329 - DNA, 3000 bp, Unknown; identical to SEQ ID NO: 11310
  misc_feature (1)..( 3000): cDNA_ID_1807433_gDNA_ID_2214489_Annot_ID_133432 3000 nt of promoter + ATG

SEQ ID NO: 11330 - DNA, 3000 bp, Unknown
  misc_feature (1)..( 3000): cDNA_ID_1831917_gDNA_ID_2214490_Annot_ID_133442 3000 nt of promoter + ATG
ttagattattaagcttatattgaagggttttatatttctttcttgcgtacatttctctttcgttttctctaatgatttaagttagattagagaggtcaataacgtatgcagttaaccttttccatttcccgttattgtggaaacctcagtttgactacatactccgaccactttttagtgatatttaacacaaaaagaacttttgaaaaactaatttatcggtgtgactttttttgttcgcttgtgcatttttttccaacactggtccataagtttaccatgtaacatatattagtatttagagttagtatatttctacaaatatgtgcacagctagctagcattacttggacccttaaaggtgacatgtattggatataggaaatcaggacccctttagcaaaaaaaaaaaaaagaaaaaaaaaagaaaatcaggaccatcttaaaactatttgttcctctctatataatggtttataatcataattaagatttaaagtacaaattatagttattaaaaaggttagttctcacagataataacagaaaatattttaagttaccaattttagcacataatatctaaagtttttaaaatactatgaatttaatatcaaaaatcttatataagtatttgatggacgctttacgcgataataatagaatcatgatttcaaattgtgattaattttttacgtaattcggtgaagataagtaattcttgtataaatttcactaatgttaattttaaaagtttatggaagatatgatataattgttcataaaacttgttataatgctattataagatatttttcttaaaaagacaagtaaattactttgttcgtcgaacacaaactaacttacgcttgatcaagctgtattctacaaaagttatacattattaatttatcattacaaaaattggaaaaaggttactttaacaattcaaaaatatatcgaaatccaaaaagatttatcaactccttttaaatttcacgttttacgtgaatcatgtgatataatcatatgcatacaaatgtcatctgagagatttcagccgacttttgaacaaggaccaaaacagcctacgccatgcggagaccacgaaaatagatattttattataaataaatggatttttttggacgtaatgaaacgagaagtggatcagaagattaattacataatcttttctatttataaatttaaactatttctttctaattcattaacaattttgatacatcaggacaatggtaacttatgttactataagacaatggtaatatctcaatagaagtttttttttgtaaaatcgcaatatatacatgaattaataatgacatatgatggtcatttggacataatataaaaatataaatatttggcaaaataaataagtaaatgaaggggagaggaatgtgtgagtgtgtgtgggtgtggatgcctttatgcctcctacatctcaacattgagcaaaattgcggctgcccaacaaccacccaaaagagaattagtcaaaattattaaaatcaatgcatgtcctaatctctctcacccaactctcaccttcatttcaactcccatgcatctttttggtcaattaatttattaatattataaatatattttttcaatgaattttgaaaagactgtgttgcatattaaaataatgcgttgtactattaagagtcaaattagaaaatgtacttttaactccaaattaatttacaacatcttagattatgttattttttttttttcaagtcttcacgtacgtggtgtggtttggagtaacgcgaagttggtccaaaagcagagagactctttatattaaaactagaaaactattaagaagacgcaatagtattatgcacgttcacatttcttggtattcttttacattttgttgtttctctggtcataaactaaattgactaattagccatcaatcattttttcttcagtgtttttttcaacaatggacttttgttataaaactatctgtttagtggttgttgctcgattttatccaattctgtcacagaactgagaaataacattaaagtaaataatcttctatactgaaccggtaagatataaaaatttatcaattttatccaattaacatcgaagtcccacgacgtatggtgtgaacagtataagataaaattaaatacttttagaggtagtcgtacgtgagtacgtgtataagacaacacagctgataactccccaatttccgaccaatgcattgtacagtattatgtattcattcgtgtgtgtacttttccccataaaataaacgatttagatttaactatataagaatagaaagactagagaaaaaataagagaagaataagaccaatgcaatgtatcatgagttgtccatttatttccccatccaaaattcacgtatattctttacacacaaaaaaaaataaaaaaaattcagttacattagtttatgtaatttttttaataaatactgtatattattaagaaaaagcttttaaaacgagagagctaaatcattgtaaaacgttttagttttggataccaatgtgttagtaaaaagcccaccaagcccaatagattttatttttgccaaaaaaaaaatcaaagaagaacgaagccttccttctccgccgtaacctccgccagtgaaaccctaaactcctctttccgatatttcactgttcatcaatcgctctgcgtcactcttcctagcaagctcctttaattttcctctcaatccaatcgtgattttgcatacccatcaggtttcaggttagtacgtagtcttaggagaaattaggtaatcagatcgatatcgctatttgttcatacctagattagtcagaatctgtaatcgaaattcgattaggatggtgtagttcaacgaattcatagatacagaatcacttcttcgtagttatggaaagctctttgtttaaaacctcttccgatttttgtatcagaaaaactgaaata

SEQ ID NO: 11331 - DNA, 3000 bp, Unknown
  misc_feature (1)..( 3000): cDNA_ID_2706219_gDNA_ID_2214490_Annot_ID_133443 3000 nt of promoter + ATG
tgcttttggaaaaagagaaggctcagattcaagccccacctataaagataccatatagttagcaccccacattcacacccattaattccacattgtatccaactaatacacccacataaaatttaatatcaataatcattacctacgggattggtattttgtatatggtttgccatttgaaaaagacacttacagaatttggtaactatgatataacttcaaacgaatattgatatcattaatcaatggttgacaaaaaaaaaaagattatgattaaataatagtcatacaaaactgcatgcgttttaaaatctttctataaatgcattcacatttcagctcaacaaccttaaaaaatttatgtctaaagattgatgattctaaagaaaccatcatttctagttttgtacatagatttacttagaaccaatgaacttaaaaaagatggctagttatatcaaaattacgttcacaactaattacaattaatctttaatagtattacataggagttacattttgaataaactcatgggaatattttttttctccatgaacattgtcagagacaagatttgtcttaagagttagaactacaggatttgatcgatactatatatatttctaaggacactaaaattcgtcttaagcgattccaaaaacaagaaaatgagaaaggaaagtaaaaaaaaaagggacgagacactgcatgtgttttggaccgtttggttagagtgataaaagataaatctgtcccaaacatagatcccctcaatccacgcgcagtctcacctgatccgtattcaccaattcaccctcgtctcgaaagccttatttccgtctatgaaggttatttccgtctattttccgacaactatctctgttgcttataatctttgttttcctttgttcttttgctcggagaattttcaacttcattatagttagtgaagatttttatacattattagcagtgtttaatcttcccaaaattctaatataaaattatcgtcgcagcttttatttactttacagacaaataaagtatcactcacgaagcccaccatgattagagcgtcgaggtccaacattgttttcttaatcaaactatactattcttattgctgaaattaagacaaatattatactatgaattaatacaattttttttttatgactcgcaaaacactgtgtccactaatcattgctttcaagcacataatgtaaactgttcctatataattattggcataaaaagagagcagacaaattagtggaattggagagacaagattaattaaacaagtgatcttatcttttcaagaaactcaattcattgccatatgtgtcattgtatcaatacacttctccctaaatgattcgtttgataaaaatttataactttatcaccaagtctatattcattttaaaacccatgcaactctcatcataatgaattctagagtgatgagtgtacgtatttgtaatactcttcttacattctctattgcacttacaccactcattatttttctttctgtttcacttgttgttcaagttgcatttagatttcaaagaacacatgttcaaatgaagacaaaatcttgagtataggaaaaacaaaaggcaaagaaaaaagaaaagaaaagtgatgggaaatgggtagaaaaataacaaaaaaagctaatcaatattatgcgctggtgggtcaaaaaagtgttatttcacaaatccacaaggctttgattctttgtctctttctttcactattcattttttctatattttattacacaacaaaaggaatagtttcttcatcttctctctcacaacaacaacaacaacaaaatatgtatttcatttttgttttaaatgtgatcaactattgtttgatactactataccccttgtggccttgtccatctaataaatttatcagcatacgtctaatcaaagattgtggaatcaagctaacaaaatgaataaagacatcgatcttaacgacataaaagataaacggaatctctcaaagaaaaaacctttgatctaaaagcataaacaagaagaagaaacgtctcaaacaaattttgtaaattgtaggttaaacaaggaacacatgtaggtcctactttaattactggaccctacatactctgggccccactctctatttgccattttttgttttttaattttagctttctccgttaccgtcagtagtcgcagcagcaggagctagatagcgcccacacacacacataaagcaaaagcctttgagctctctcaccattcccaaatcccaaagactctctcatttgagggttttttgtgtttatcttcctaatctctgctccaattcgattttcacagagaaagtttcttccttttggaacatttttccggtgttgaaatctctctctgtatcggctacattgtaccggaaaaacctctcgatctcgggaatctcgccgataatcctctctttgttaccggttagtgacgatttcgaaatctctttcctttgtcgttttctatttgggatttctcgattgattctgttgaatgataaagtttaataatccctatgaatgttttctttaatcactccagaaagtgaactcctgttttctcgacaaggtttctgcaaaatctcagatcgaacaatggataataatcttaggacacacacatagagacaaacacaaaccacacactcgtgttcttattctttgtcttgaaaaccataagtaagaattagtcctgtggcttattcccaaatcacgtgttactgttgttgttgttgttgttgtgtttatatatatatatatatttgccgacaagatttctaaatatggtcccgaaattgttagtgggttttgttagtatctttctagtgagcttgtgttaattgaggttggagattgatttagtttacgttatttgcttttgtagggaaagagagatttgtgtttggtgttaaaaatcgcatgaatgctggaa

SEQ ID NO: 11332 - DNA, 3000 bp, Unknown
  misc_feature (1)..( 3000): cDNA_ID_1442899_gDNA_ID_2214490_Annot_ID_133446 3000 nt of promoter + ATG
acatcatcatcatcatcttgtttgcaactataataattcatattttagttaaatatatagccttggttattgtagtcaaatcaaatccgaaccggaatcaatttcggtttggttttggttcaatgttcatgctaagaaaacagagcaaaacactatgttgcagcctgctggtgaattctgttataagtttataaccaacagaaggctaaagaatcattgaaagatccatgcaaacaaatctaaacacaaagtttgttattgcaatgtgtacgtctctcatggactgtaatgcgagtaaatgctcaaaattggagctcaatatcatgaagggatatacttacttcttcttgccttctttccttttagaccacaaaaacaattcatatttttcccaaagcaaaagaacagtggttacttttagaacatgttaaaacaaataaataatggagatgtaaattgttttcataatatgatttgtctaacatgtaagaactttcagagtttcaatcaagtctctaggcttgtggaaactagatttgttcgtctacaaagaaaccttatcatgtacacaacaagcaacacgattgctacagctcaaaacagacaaaaacagtaaacgattcagctataaacacatatttttatcttcacttgaatattagtgcaccaatagagccttctgcttcattctcgtctctaataatcatttctcctcaaaatcgacatcaatgatttgggacttaggtggctttttagagtttcccttgctattattattgttgttgttgttgttgccatcttttgagaagaaatcgccttgtggttgccacactatgttcccacatccctcacatctgatgatttggttcttgtaccctataaactgcctcttacatgctgggcattctccctgtgcagacccaaacgtgttataacaaagctttgaaacacattttgtttcataaaccaaattgaagaatgcagagaaagaacagagttttattagctataccttgatgacaaagttgttggcgactgcaccaatgagaagagggccagcaattggaagaacccaagtggcgattattataactcggaacagccatccagagagagcaaaccaaaggaagaaaatagtctggaaacgaaaatcaaagcatatccaacattagaattctaaactcagccagtaagattcactcaaaaccatcaaaggtactcaatgaaccccatgggatgatattacatagatacaggatcacattcacaagaagactcacagcaaaacttccaccaagcggtgtattcaagaatgcactgaattgcttcctgtactgtaatgtaaaacaacaaggaaaaataaaattcatcaatggccaaaatcacagaacatataactctacaaaaccaaccagttactttccacttatacatgagaatgattcaatatatcacagtgtatacataactaagaagtagcttcttcgatcgaaatagtgaaatgaagtattattaccttagggaaatttctactgaaatcggcagagacagtcctaacacgaggagtaatcccaaactcacgatcaatctcacgagcacggtcagcggctgagctagcagcggagctaaagcggcgagaaacagcgtattggcgatcaattcgctcagcggttttcttagcctcaaaaacgaattgctcgaatccatcgttagcgcttctccacgcgtctctccatgctttacctgacttaacgttatcagccaaacggtcaaagtcgccgcgttggaaagctttcacctgtaagaaagaagaggcggcgcgtgggtgtggataaggtgtggtgatggtgaatctaggtgatgtggaaggccacatagaaaccggacaagggaggataaatcccaattctctgtgaactccaaggaaggagaaaccacaagtcttagaagatgaattgagaaaatagaattatcagctcgaagatcctgggctcgtttgagaaaattgttctttttgattggttaaacttgtaaggctataaagagacaaattgaaaacctaaatcacttaaccggttaacaagacattaaaccggaaataaattaaataaaaccaaattacatatcatgttggtttcttctcttgcaacagatgggttccatgcttctatgtgtgtcttttgtatattttacatatttgatttctaagatttttaatgactaaactcattcagtaatctgatacaaaaccatgaacatgaaaattatcgattgacaataaaagttttatctaaaactcttcaaataacaatatatatgcaattaaaagttttcttatatgaaaacaaaattaaatggacttgcatatttatttacaacttttttacatattatatgaaaggatcgagatactatataatataataaggaatccaaaattgaatatttgggccgtaattaccgcattaatgggcagacaaaacataacaactaatgggccggaatcaatgttaggttatgggcctcaaattagaaatttatgttaacgtttcataaaccctaagagatttcttagaagtagtcatcttcttctctttagacctttttttctgcaggggggctctaaagcaaaacccttttcctgaaatcgccgtcgcaaattagaagaatcacctacaggtttgccgcttaatctcaaagtcctaatcccatctcgttcgtttggtgttctctttgttatgattttttcatatttgttgaaatctagactaatttttgagtagtataattgaatatctgttcattgaaaccgtgtaattagagaaaaattgaaactttgtcttctgcttcttagctcttactataagtaagcgactttatttctgggaaagtatcctctttttttgtttgtttgttgtcaattttgtggtctgagtttcagttttacatgtcttaactttgcaacagtcttttgtagggttttcaagacgaggcaatatg

SEQ ID NO: 11333 - DNA, 3000 bp, Unknown; identical to SEQ ID NO: 11331
  misc_feature (1)..( 3000): cDNA_ID_2706219_gDNA_ID_2214490_Annot_ID_183631 3000 nt of promoter + ATG

SEQ ID NO: 11334 - DNA, 3000 bp, Unknown; identical to SEQ ID NO: 11332
  misc_feature (1)..( 3000): cDNA_ID_1442899_gDNA_ID_2214490_Annot_ID_183634 3000 nt of promoter + ATG

SEQ ID NO: 11335 - DNA, 3000 bp, Unknown
  misc_feature (1)..( 3000): cDNA_ID_3039588_gDNA_ID_2214490_Annot_ID_183638 3000 nt of promoter + ATG
atttgtcgtttgatgataagaatcgagaatctatctctgtagctggtggtgttgaagctttggtatgcttccagtttgtttagtatgattacactgttcctctgcatatataaggggaattgatcacttttgttgattattttaggtggcgctcgcacagtcttgttcaaatgcatcgacaggtcttcaagaaagagctgctggtgcactttggggattatcggtgtcagaagcaaacaggtgctaaatacatctgaatctaagtttaatgcgttctgtttatagattgtcacgtgatatgtttaagatcaatgcagaagcaacataaggacagaccatcttgctttaacatatcacacatgctgatactttttattttgcttgcaccaagttgaggcttttgttacagagaagttttaaaggagtttcttaccaatttattgttactgtcactttccttgataataatcctaccattgctctttttgatctccatcagcgttgcgattggacgtgaaggtggggttccacctctaattgcacttgcacggtctgaagccgaggtaagaactttgagcatagccaagccatcttggataatctgatataaaatttcctcaatgtgctggtttttttcccaggatgtacatgaaactgcagcaggagctctatggaatcttgcttttaatcctggtaatgcactccgcattgttgaggaaggaggagttccagctcttgttcacttgtgttcgtcttctgtctcaaaaatggctcgattcatggctgcattggctttggcatacatgtttgatggaaggtatattaatatataacttagttaataaacatcccaaattcaatccgactctcacggttttcgatctgaattatcgatctgcaacaggatggatgaatatgctctgatgataggaacttcttcatcagagagcacatcgaaaaacattagcttagatggggcaagaaacatggctcttaaacacattgaagcttttgtcctaagttttatagatcctcacatatttgaatctcctgttgtttcatctacccctactatgctagcacaagtcacagagagagctcgcatacaagaagctggccatttgagatgcaggttaaatcttttcgcctctatctatctctatcagcggtgtcttgtgtttgattgaaaactgatttgaaatttttaaatgtattgttttctttgcagtggtgctgaaattggaagatttgtaacaatgttgcgcaatcctgattcaacactcaaagcatgtgctgcgtttgcgcttcttcaggtatgtaaaaatgtgaaaacaaacattgtgtcgtgttctctgttggttacaacaactgatgcatatatcttatctttttgtgcttgctctaattcagtttacaataccgggtggtcgacatgcaatgcatcacgtaagccttatgcagaacggaggagaatcgagattccttcgttctgcagctgcttctgcaaaaacgcctcgtgaagctaagatctttacgaaaattctcctacgcaatctcgagcatcaccaggcggaatcttccatttaagcctcttagagaaaatgatagttaaaagtcccgtttacttagaaatacgtctgtatctcaaatacgcaagaagccaaagccatactgcaaaaccacaaactctcaagatgctttatcagaccaagaatgtcctctctgtgtgattacatgagactattgtgttcttctttatcgtgttttgagaattttcctgtaataacaggtccaaaggattcgaaggtgctgtttcttctatctcctatcttgttcatcgttcctttttggctctgatcatttcttgtgccaagatctattgacgatattaccctccgctctgttattcccttagataaatcatatgtgttgtaaattaggcccaatgacatgctcatgaaaatggaaaactaaacagagcttctgtcacttgacgtttcaggttttcaaaagagaaacattaatacagagcggagggtaattttgtgtcgattcatatttttcacagagcaaaaagtttccttcagcaagaatcaattcatatcagaaatacagataataatgagaaaacaccatttttgaagaagccgatacataaagttgaataaatcaattcgatttcatttgtcaagaaccggaactggacccatatcaaaccggttttattgatcttcctttgtctttccgagagcatggggagtgcagaaaatgatgacatggacatagagtgagcaaaggagataatatctactacatagcaatgtgtaggatgacttacatttagggtcaagatgaggaagatttcaagccagagagatggcttaaggatggcgtgttccaaccttaagaaatacatttctaataaaacctgagatgttttctttctttgactatgtatgtaggctggtccaagaatctgtcttggcaaagatttcgcataccggcaaatgaagacacttattcacttctttcgcttcaaaatggctgatgagaagactactgtatgttactagagaatgcttactcttcgtgtccaaggaggacaaacacctctaaaaaacttttttttcatatcaaataatatatggaagtataatcaattaaaaaaaacacatttttcccccatatcttctgttttgtctttatataatttgattacgtggtacaaaagaaagttgaggccctaattcatattgtgcgactttttcacccacaattactacatgagaaaacatcaaaacgacaaaatcggttacactcaacgttaaccttcgaggtaaaagagagggttcagaatgtttcgttggatgcgtgtaaaatccgtcttgacttttcgtgattgttgaatcgtctatatatgacttcttagcgggaagattgaaaaaatcagacaacaagacgaaacaacttccaagccaaaaaaaaaaaagtgaatcaatg

SEQ ID NO: 11336 - DNA, 3000 bp, Unknown
  misc_feature (1)..( 3000): cDNA_ID_2706215_gDNA_ID_2214490_Annot_ID_183640 3000 nt of promoter + ATG
aaattgttagatacgtcgatacaatcatgtggtacgtgaaaatatcataattattttgtaatgattaaattggctcagcaagcaataacattgatggatggactaaacagtagaactatggttgaatgattttcttttctttttgacgtcattgatagtgagtgatttatacgaataaaaatatgccgatgagcaacagatttcagttgttagttgttaccgtgtcaaaaaaaaatgttgagcaaagatcaaaatttatatatattttttttgctaataacagaatataaattgatactttacattaatatatgtataattataaatgcacatggttatggacacacacgtgggaccaaattgtgtatcttctttttaaaaatgtagatgtatcaaaattattgaactcttgaattaagtaagtatgataaggatttatattcatgcatgattacctcagaaactctcgttgttggtacaacatgggctttggttgctttggccggttttcaccggatcctgttcgtagctgtctcttaccgaactgatatctttaaattaattccctcgccatacagttataacaaaactcaaaccatattgtaaatatactcatatccacaatttaactcatatttacgtgtattaatatattgagttttttgttttgctaaagatcttatcgagtatcttctaacgttctcttctttaaattctctcaacgatttaaaaaaaaaaaaaaaaaaatcacagcgatttttacaggaaaaattacgcgagagtgagcgcgtggaattgttaggaaccatcgagtcggaggaggagagaagtatccaatgattaaagagaagtgaatgtctggtcgtggaggaacaaaaattacgccgcacgagtgtggtcactggggaccatgttctgccacgttggcaacttcccacgtgaaccccttcccatttcccacgtgaccaccacttcttctatttcctttgaatctcttgctttacttcttctacactctctcccacaccattcacacgcttcattccagaatttcacattcttaaatatgcaatgtactgaaacatcaatacatcatcagctcttaaacatatttcaaccaatcgtgaaaacaaatgaattaatttgtacgaatttcacggagaacgaagatgtagtaacgatatattttctttttcatattagttacacttcatgtagttttatcatgaaacattcatacaaaaatatagcatagccatgtaacaaagcagaatcatacatacatacgttttctagacaaaaagacaaataaaaaaaacacttgtctgattttccttaaaacattcaagaatgccaggagaattggggaaaaatagattacagtataagcttagaaacaactgtatataattaatgaacatgggttatgaattgtaacttgcaacaaactttacattaatatgcatgatacggctcatatatcataaacccatgctaacttagttcaaaccccttattcatttatcaataaatacatactttgtagctttgagcaaaaaagcttacaagaaaatttaggaatataataatttgtttgtataactattgttttcagagtactatactatcaatcaagtcaactaaccaattaggctccaaaataaaatcaattttctaaacgtaatttaccaagaaaagtttataagaaaggtcaaagcaagttataagagtcaatgaaaagaccgcattgattgaagatacataagaagtcaatatatagtcattaagaataaatttgaaagtaattaatttgttttgaaaaagcgtcgggcgttatttaactttaaaattaattaacaaacgagacctgtcttgtcttgtctgtaactctcaaagaaactgaagtagtaataatgatggcattatcaacaactttgaaaacaatagaaaggaaacataaaccaaaaattattgtttcaatgacaggaagtagccgtaaactctaccatccactaatgttttccaaatgtccgtttgctatttgatttagccataaaattcaatggaaaaacttgaatattgcttttattagttgaccaaaagaattactcgaaggatagtttttggaaaagggaataataaattaattgaagactaattagatgcatgttgggttcacggggtaactctagagtcttaaaaccccatgcagtattaggctctgtgttatcaaagacgacatcgttttctgactaccatacccattttgagcccaacgccattctattcagttccacgcgttcttactcacgtttgttctacacgagcgacgctactttaccatatacatctgtcttttcttgttaaaataccatctcatggttttaagaaataaaaagagtattcaaacaaagatctttgttatactactattattgtttagtagatctacaaagcgtgtgcattacttcccaaaataatttaataatgggttttataagctaatcaagttcgaaatatgaattttcgagaataaaaaatgattgattagttaagcatcatttttaaaacgttgtaccataaccaaatacagtacttattactgtcaaagacaaaaaaataactgagattttaggtattaaaatgttaacgtttgttattgacttttaggacgaaaatgaacaaaaattcatttgtcaaacgtattgaaaaaattaaacgcattggagttgaatgacttttttttttttttttttttaaagagagaggagcaggtaacagtatatatcatcattgaaattacaagggtctttctgacacaagtcatcattgaaaccccaagcaccccacataaccccttctctctattaattgtctacatatcaacttctgtgtatatatatattagtcgtgtctttaaccccattatcactacatcgattttctcgagaaagtctttcaaaatccagaaaagaaaagttctttctgttgaggacaatg
